United States Patent Application Publication US 2021/0260178 A1 - sequence listing, part 11

SEQ ID NO: 18372 - RNA, 2021 nt, Artificial Sequence
  mRNA product Design a-1 (A100) comprising derived and/or modified sequence from LASV(LM765-SLE-2012;Clade IV)__AIT17815__SP-HsPLAT_NP(2-569) (opt4)
aggagagucccgcagucggcguccagcggcucugcuuguucgugugugugucguugcaggccuuauucaagcuuaccauggacgccaugaagagaggccugugcugcgugcugcugcugugcggcgccguguucgugagccccagcgccagcaaggagaucaagagcuuccuguggacccagagccugagaagagagcugagcggcuacugcagcaacaucaagcugcagguggugaaggacgcccaggcccugcugcacggccuggacuucagcgaggugagcaacgugcagagacugaugagaaaggagagaagagacgacaacgaccugaagagacugagagaccugaaccaggccgugaacaaccugguggagcugaagagcacccagcagaagagcauccugagagugggcacccugaccagcgacgaccugcugauccuggccgccgaccuggagaagcugaagagcaaggugaccagaaccgagagaccccugagcgccggcguguacaugggcaaccugagcagccagcagcuggaccagagaagagcccugcuggacaugaucggcaugagcggcagcaaccagggcgccagagccggcagagacggcguggugagagugugggacgugaagaacgccgagcugcugaacaaccaguucggcaccaugcccagccugacccuggccugccugaccaagcagggccagguggaccugaacgacgccgugcaggcccugaccgaccugggccugaucuacaccgccaaguaccccaacaccagcgaccuggacagacugacccagagccaccccauccugaacaugaucgacaccaagaagagcagccugaacaucagcggcuacaacuucagccugggcgccgccgugaaggccggcgccugcaugcuggacggcggcaacaugcuggagaccaucaaggugagcccccagaccauggacggcauccugaagagcauccugaaggugaagaaggcccugggcauguucaucagcgacgcccccggcgagagaaaccccuacgagaacauccuguacaagaucugccugagcggcgacggcuggcccuacaucgccagcagaaccagcaucaccggcagagccugggagaacaccgugguggaccuggagagcgacggcaagccccagaaggccggcagcaacggcagcaacaagagccugcagagcgccggcuucaccgccggccugaccuacagccagcugaugacccugaaggacgccaugcugcagcuggaccccaacgccaagaccuggauggacaucgagggcagacccgaggaccccguggagaucgcccuguaccagcccagcagcggcugcuacauccacuucuucagagagcccaccgaccugaagcaguucaagcaggacgccaaguacagccacggcaucgacgugaccgaccuguucgccgcccagcccggccugaccagcgccgugaucgacgcccugcccagaaacauggugaucaccugccagggcagcgacgacaucagaaagcuguucgagagccagggcagaaaggacaucaagcugaucgacaucgcccugagcaagaccgacagcagaaaguacgagaacgccgugugggaccaguacaaggaccugugccacaugcacaccggcaucgugguggagaagaagaagagaggcggcaaggaggagaucaccccccacugcgcccugauggacugcaucauguucgacgccgccgugagcggcggccugaacaccagcgugcugagagccgugcugcccagagacaugguguucagaaccagcacccccagaguggugcugugaggacuagucccuguucccagagcccacuuuuuuuucuuuuuuugaaauaaaauagccugucuuucagaucuaaaaaaaaaaaaaaaaaaaaaaaaaaaaaaaaaaaaaaaaaaaaaaaaaaaaaaaaaaaaaaaaaaaaaaaaaaaaaaaaaaaaaaaaaaaaaaaaaaaa

SEQ ID NO: 18373 - RNA, 2021 nt, Artificial Sequence
  mRNA product Design a-1 (A100) comprising derived and/or modified sequence from LASV(LM776-SLE-2012;Clade IV)__AIT17825__SP-HsPLAT_NP(2-569) (opt4)
aggagagucccgcagucggcguccagcggcucugcuuguucgugugugugucguugcaggccuuauucaagcuuaccauggacgccaugaagagaggccugugcugcgugcugcugcugugcggcgccguguucgugagccccagcgccagcaaggagaucaagagcuuccuguggacccagagccugagaagagagcugagcagcuacugcagcaacaucaagcugcagguggugaaggacgcccaggcccugcugcacggccuggacuucagcgaggugagcaacgugcagagacugaugagaaaggagagaagagacgacaacgaccugaagagacugagagaccugaaccaggccgugaacaaccugguggagcugaagagcacccagcagaagagcauccugagagugggcacccugaccagcgacgaccugcugauccuggccgccgaccuggagaagcugaagagcaaggugaccagaaccgagagaccccugagcgccggcguguacaugggcaaccugagcagccagcagcuggaccagagaagagcccugcugagcaugaucggcaugagcggcagcaaccagggcgccagagccggcagagacggcguggugagagugugggacgugaagaacgccgagcugcugaacaaccaguucggcaccaugcccagccugacccuggccugccugaccaagcagggccagguggaccugaacgacgccgugcaggcccugaccgaccugggccugaucuacaccgccaaguaccccaacaccagcgaccuggacagacugacccagagccaccccauccugaacaugaucgacaccaagaagagcagccugaacaucagcggcuacaacuucagccugggcgccgccgugaaggccggcgccugcaugcuggacggcggcaacaugcuggagaccaucaaggugagcccccagaccauggacggcauccugaagagcauccugaaggugaagaaggcccugggcauguucaucagcgacacccccggcgagagaaaccccuacgagaacauccuguacaagaucugccugagcggcgacggcuggcccuacaucgccagcagaaccagcaucaccggcagagccugggagaacaccgugguggaccuggagagcgacggcaagccccagaaggccggcagcaacaacagcaacaagagccugcagagcgccggcuucaccgccggccugaccuacagccagcugaugacccugaaggacgccaugcugcagcuggaccccaacgccaagaccuggauggacaucgagggcagacccgaggaccccguggagguggcccuguaccagcccagcagcggcugcuacauccacuucuucagagagcccaccgaccugaagcaguucaagcaggacgccaaguacagccacggcaucgacgugaccgaccuguucgccgcccagcccggccugaccagcgccgugaucgacgcccugcccagaaacauggugaucaccugccagggcagcgacgacaucagaaagcugcuggagagccagggcagaaaggacaucaagcugaucgacaucgcccugagcaagaccgacagcagaaaguacgagaacgccgugugggaccaguacaaggaccugugccacaugcacaccggcguggugguggagaagaagaagagaggcggcaaggaggagaucaccccccacugcgcccugauggacugcaucauguucgacgccgccgugagcggcggccugaacaccagcgugcugagagccgugcugcccagagacaugguguucagaaccagcacccccagaguggugcugugaggacuagucccuguucccagagcccacuuuuuuuucuuuuuuugaaauaaaauagccugucuuucagaucuaaaaaaaaaaaaaaaaaaaaaaaaaaaaaaaaaaaaaaaaaaaaaaaaaaaaaaaaaaaaaaaaaaaaaaaaaaaaaaaaaaaaaaaaaaaaaaaaaaaa

SEQ ID NO: 18374 - RNA, 2021 nt, Artificial Sequence
  mRNA product Design a-1 (A100) comprising derived and/or modified sequence from LASV(Mad39;Clade IV)__ANH09723__SP-HsPLAT_NP(2-569) (opt4)
aggagagucccgcagucggcguccagcggcucugcuuguucgugugugugucguugcaggccuuauucaagcuuaccauggacgccaugaagagaggccugugcugcgugcugcugcugugcggcgccguguucgugagccccagcgccagcaaggagaucaagagcuuccuguggacccagagccugagaagagagcugagcggcuacugcagcaacaucaagcugcagguggugaaggacgcccaggcccugcugcacggccuggacuucagcgaggugagcaacgugcagagacugaugagaaagcagagaagagacgacaacgaccugaagagacugagagaccugaaccaggccgugaacaaccugguggagcugaagagcacccagcagaagagcgugcugagagugggcacccugaccagcgacgaccugcugacccuggccgccgaccuggagaagcugaagagcaaggugaccagaaccgagagaccccugaccgccggcguguacaugggcaaccugagcagccagcagcuggaccagagaagagcccugcugaacaugaucggcaugagcggcggcaaccagggcgccagaaccggcagagacggcguggugagagugugggacgugaagaacgccgagcugcugaacaaccaguucggcaccaugcccagccugacccuggccugccugaccaagcagggccagguggaccugaacgacguggugcaggcccugaccgaccugggccugaucuacaccgccaaguaccccaacaccagcgaccuggacagacugacccagagccaccccauccugaacaugaucgacaccaacaagagcagccugaacaucagcggcuacaacuucagccugggcgccgccgugaaggccggcgccugcaugcuggacggcggcaacaugcuggagaccaucaaggugagcccccagaccauggacggcauccugaagagcauccugaaggugaagaagagccugggcauguucaucagcgacacccccggcgagagaaaccccuacgagaacauccuguacaagaucugccugagcggcgacggcuggcccuacaucgccagcagaaccagcaucaccggcagagccugggagaacaccgugguggaccuggagagcggcggcaagccccagaaggccggcagcaacaacagcaacaagagccugcagagcgccggcuucgccgccggccugaccuacagccagcugaugacccugaaggacgccaugcugcagcuggaccccaacgccaagaccuggauggacaucgagggcagacccgaggaccccguggagaucgcccuguaccagcccaucagcggcugcuacauccacuucuucagagagcccaccgaccugaagcaguucaagcaggacgccaaguacagccacggcaucgacgugaccgaccuguucgccgcccagcccggccugaccagcgccgugaucgaggcccugcccagaaacauggugaucaccugccagggcagcgacgacaucagaaagcuguucgagagccagggcagaaaggacaucaagcugaucgacaucgcccugagcaagaccgacagcagaaaguacgagaacgccgugugggaccaguacaaggaccugugccacaugcacaccggcguggugguggagaagaagaagaagggcggcaaggaggagaucaccccccacugcgcccugauggacugcaucauguucgacgccgccgugagcggcggccugaacacccuggugcugagagccgugcugcccagagacaugguguucagaaccagcacccccaagguggugcugugaggacuagucccuguucccagagcccacuuuuuuuucuuuuuuugaaauaaaauagccugucuuucagaucuaaaaaaaaaaaaaaaaaaaaaaaaaaaaaaaaaaaaaaaaaaaaaaaaaaaaaaaaaaaaaaaaaaaaaaaaaaaaaaaaaaaaaaaaaaaaaaaaaaaa

SEQ ID NO: 18375 - RNA, 2021 nt, Artificial Sequence
  mRNA product Design a-1 (A100) comprising derived and/or modified sequence from LASV(Z0947-SLE-2011;Clade IV)__AIT17841__SP-HsPLAT_NP(2-569) (opt4)
aggagagucccgcagucggcguccagcggcucugcuuguucgugugugugucguugcaggccuuauucaagcuuaccauggacgccaugaagagaggccugugcugcgugcugcugcugugcggcgccguguucgugagccccagcgccagcaaggagaucaagagcuuccuguggacccagagccugagaagagagcugagcggcuacugcagcaacaucaagcugcagguggugaaggacgcccaggcccugcugcacggccuggacuucagcgaggugagcaacgugcagagacugaugagaaaggagagaagagacgacaacgaccugaagagacugagagaccugaaccaggccgugaacaaccugguggagcugaagagcacccagcagaagagcauccugagagugggcacccugaccagcgacgaccugcugauccuggccgccgaccuggagaagcugaagagcaaggugaccagaaccgagagaccccugagcgccggcguguacaugggcaaccugagcagccagcagcuggaccagagaagagcccugcugaacaugaucggcaugagcggcagcaaccagggcgccagaaccggcagagacggcguggugagagugugggacgugaagaacgccgagcugcugaacaaccaguucggcaccaugcccagccugacccuggccugccugaccaagcagggccagguggaccugaacgacgccgugcaggcccugaccgaccugggccugaucuacaccgccaaguaccccaacaccagcgaccuggacagacugacccagagccaccccauccugaacaugaucgacaccaagaagagcagccugaacaucagcggcuacaacuucagccugggcgccgccgugaaggccggcgccugcaugcuggacggcggcaacaugcuggagaccaucaaggugagcccccagaccauggacggcauccugaagagcauccugaaggugaagaaggcccugggcauguucaucagcgacgcccccggcgagagaaaccccuacgagaacauccuguacaagaucugccugagcggcgacggcuggcccuacaucgccagcagaaccagcaucaccggcagagccugggagaacaccgugguggaccuggagagcgacggcaagccccagaaggccggcagcaacggcagcaacaagagccugcagagcgccggcuucaccgccggccugaccuacagccagcugaugacccugaaggacgccaugcugcagcuggaccccaacgccaagaccuggauggacaucgagggcagacccgaggaccccguggagaucgcccuguaccagcccagcagcggcugcuacauccacuucuucagagagcccaccgaccugaagcaguucaagcaggacgccaaguacagccacggcaucgacgugaccgaccuguucgccgcccagcccggccugaccagcgccgugaucgacgcccugcccagaaacauggugaucaccugccagggcagcgacgacaucagaaagcuguucgagagccagggcagaaaggacaucaagcugaucgacaucgcccugagcaagaccgacagcagaaaguacgagaacgccgugugggaccaguacaaggaccugugccacaugcacaccggcaucgugguggagaagaagaagagaggcggcaaggaggagaucaccccccacugcgcccugauggacugcaucauguucgacgccgccgugagcggcggccugaacaccagcgugcugagagccgugcugcccagagacaugguguucagaaccagcacccccagaguggugcugugaggacuagucccuguucccagagcccacuuuuuuuucuuuuuuugaaauaaaauagccugucuuucagaucuaaaaaaaaaaaaaaaaaaaaaaaaaaaaaaaaaaaaaaaaaaaaaaaaaaaaaaaaaaaaaaaaaaaaaaaaaaaaaaaaaaaaaaaaaaaaaaaaaaaa

SEQ ID NO: 18376 - RNA, 2021 nt, Artificial Sequence
  mRNA product Design a-1 (A100) comprising derived and/or modified sequence from LASV(Josiah;Clade IV)__NP_694869__SP-HsPLAT_NP(2-569) (opt5)
aggagagucccgcagucggcguccagcggcucugcuuguucgugugugugucguugcaggccuuauucaagcuuaccauggacgccaugaagagaggccugugcugugugcuccugcuuugcggggcugucuucguuagccccagcgccuccaaggagaucaaaucuuuccuguggacccagagccucagacgggaacuguccggcuacugcucuaacauuaagcugcaaguggucaaagacgcucaggcccugcuccacgggcuggauuuuagcgagguuuccaaugugcagcgccuuaugagaaaggaacggcgcgacgauaacgaccugaaaagacuccgggaucugaaucaggcggugaacaaucuggucgagcucaagucuacacaacaaaagagcauccugcgcgugggaacgcuuaccuccgacgaucugcucauucuggcugccgaccuugaaaaacuuaagagcaaaguuaucagaacagagcggccccucucugccggcguguauauggggaaccuguccagccagcagcuggaucagcgcagagcucuccugaauaugauuggaaugucuggcgggaaccagggagcccgggcuggccgcgacggcgucgugagaguuugggaugugaagaaugccgagcuucugaacaaucaguucgggaccaugccuucccucacacuggcgugucuuaccaaacagggacaagucgaccugaacgaugccgugcaggcucucacagaccugggccugaucuacaccgccaaguauccgaauacgagcgaccucgaucggcugacccagucucaucccauccuuaacaugauugacacaaagaaauccagccugaauaucuccggguacaacuuuucucucggagcugccgugaaggcgggcgccugcaugcuggaugggggaaacaugcuugaaaccauuaaagucagcccucaaacaauggacggcauccugaaguccauucucaaaguuaagaaagcucugggcauguucaucagcgauacccccggggagcgcaauccuuaugaaaacauucuguacaagaucugucucucuggagacggcuggcccuauaucgccuccagaacgagcauuacagggcgggcuugggagaauaccgugguggaucuggagucugacggaaagccucagaaagccgauagcaacaauuccucuaagagccuucaguccgccggcuuuacagcugggcugaccuacagccagcucaugacccugaaagacgcgaugcugcaacuugauccgaacgccaagacauggauggacaucgaaggaagacccgaggacccugucgaaauugcucucuaccagcccucuuccggcugcuauauccacuucuuucgcgagccuacggaucugaaacaguucaagcaggacgccaaguacagccauggcauugaugugaccgaccuguuugccacacaacccgggcucaccucugcuguuaucgaugcccugccgcggaauauggugaucacaugucagggauccgacgauauuagaaaacuucuggaaagccagggccgcaaggacaucaaacucauugauaucgcgcuguccaagaccgacucucggaaauaugagaacgcugucugggaucaguacaaggaccugugccacaugcauacgggggugguuguggagaagaaaaagagaggaggcaaagaagagauuacaccucacugugcccuuauggauugcaucauguucgacgccgcugucagcgggggccucaauaccuccgugcugcgcgccguccugccccgggacaugguguuuagaaccucuacaccucgcguugugcucugaggacuagucccuguucccagagcccacuuuuuuuucuuuuuuugaaauaaaauagccugucuuucagaucuaaaaaaaaaaaaaaaaaaaaaaaaaaaaaaaaaaaaaaaaaaaaaaaaaaaaaaaaaaaaaaaaaaaaaaaaaaaaaaaaaaaaaaaaaaaaaaaaaaaa

SEQ ID NO: 18377 - RNA, 2021 nt, Artificial Sequence
  mRNA product Design a-1 (A100) comprising derived and/or modified sequence from LASV(LP;Clade I)__AAF86702__SP-HsPLAT_NP(2-569) (opt5)
aggagagucccgcagucggcguccagcggcucugcuuguucgugugugugucguugcaggccuuauucaagcuuaccauggacgccaugaagagaggccugugcugugugcuccugcuuugcggggcugucuucguuagccccagcaacuccaaggagaucaaaucuuuccuguggacccagagccucagacgggaacuguccggcuacugcucuaauauuaagcuccaaguggucaaagacgcccaggcucugcuccacgggcuggauuuuagcgagguuuccaacgugcagcgccuuaugagaaagcagaaacgggacgaugccgaccugaagcgccucagagaucugaaucaagcggugaacaaucuggucgaacucaagucuacacagcagaaaaacgugcugcggguuggaacgcuuagcuccgacgaucugaucacccucgcugccgaccuggagaaacuuaaaagcaaggugauucgcacagaaagaccccugucuuccggcgucuauauggggaaucucagcucucagcaacuggaucagcggcgcgcccugcucuccaugaucggaaugagcggcgggccucagggaaacagaaccggcggcgacggggugguucgggugugggaugucaaaaaugcugagcugcuuaacaaucaguucggaacaaugccgucucugacccucgccugucugacaaagcaaggccagguggaccuuaacgaugcugugcaggcccugaccgaccucgggcugauuuacacggcgaaguaucccaauuccagcgaccuggauaugcucacccaaucccauccuauccugggaauggucgacacaaagaagucuagccuuaacaucuccggcuacaauuuuagccugggggccgcuguuaaagccggagcuugcaugcucgauggcggcaacaugcuggagaccauuaaggugucuccccagacaauggacgggauccuuaaauccauucugaaggugaaacgcagccucggaauguucaucucugauaccccuggcgaaagaaaccccuaugagaauauucuguacaagaucugucugagcggggaaggauggccuuauauugccucccggacgucuaucacaggccgcgcgugggagaacacccucgucgaccuggagagcgauaauaagccgcccaaacuuaacuccgccgggagcaauaagucucugcaggcugccggacucaacgcuggccugacauacucccagcugaugacccuuaaagacugcaugcuccaacuggauccuagcucuaagaccuggaucgacauugaaggcagacccgaggauccuguggaaaucgcccuguuucagcccuccagcggguguuacauucacuucuuucgggagccgacagaccucaaacaguucaagcaggacgccaaguauucccauggaaucgauguuacggaccuguuuucuacccaaccuggccuuacaagcgcugugauugaagcgcugcccagaaauaugguccuuaccugccagggguccgaugacaucaaaaagcugcuggagucucagggacgccgggauaucaaacuuauugacaucagccucuccaaggccgauagcagaaaauucgagaacgcugugugggaccaguacaaggaucugugucacaugcauacaggcguuguggucgaaaagaaaaagcgcgggggcaaagaggaaauuaccccucacugcgcccugcucgacuguaucauguuugaugccgcuacgacaggaucucugaauauuaccacccuucgggccgugcugcccagagacauggucuuccgcacauccacccccaaggugguucucugaggacuagucccuguucccagagcccacuuuuuuuucuuuuuuugaaauaaaauagccugucuuucagaucuaaaaaaaaaaaaaaaaaaaaaaaaaaaaaaaaaaaaaaaaaaaaaaaaaaaaaaaaaaaaaaaaaaaaaaaaaaaaaaaaaaaaaaaaaaaaaaaaaaaa

SEQ ID NO: 18378 - RNA, 2021 nt, Artificial Sequence
  mRNA product Design a-1 (A100) comprising derived and/or modified sequence from LASV(803213;Clade II)__AAF86704__SP-HsPLAT_NP(2-569) (opt5)
aggagagucccgcagucggcguccagcggcucugcuuguucgugugugugucguugcaggccuuauucaagcuuaccauggacgccaugaagagaggccugugcugugugcuccugcuuugcggggcugucuucguuagccccagcgccuccaaggaggugaaaucuuuccuguggacccagagccucagacgggaacuguccggcuacugcucuaacaucaaacuucaagucguuaaggacgcucaggcccugcuccacgggcuggauuuuagcgaggugaauaacgugcagcgccuuaugagaaagcagaaacgggacgauggagaccugaagcgccucagagaucugaaucaagcggucaacaaucugguggaacucaaguccacacagcagaaaucuauucugcggguuggcacgcuuaccagcgacgaucugcucacacuggcugccgaccuugagaagcugaaauccaaggugauccgcaccgaaagaccccucagcucuggggucuauaugggaaaccuguccacacagcaacuggagcagcggcgcgcccuccugaauaugauuggcauggugggaggagcucagggcacccagccuggcagagaugggguugugcgggucugggacgugaaaaacccggaucuucugaauaaccaauucggaacaaugcccagccucacccuggccugucuuacgaagcagggccagguggaccugaaugaugcuguccucgcccugaccgaccuggggcucaucuacacagcgaaguauccuaacucuuccgaccuggaucgccuuagccaaucucaucccauucugaauaugguugacaccaaaaaguccagccucaacaucuccggauacaauuuuucucugggcgccgcugugaaagccggggcuugcaugcuugauggaggcaacaugcuggagacaaucaaggugaccccucagacgauggacggcauucucaaaagcauccugaaggucaaaagaucccuggggauguucgugagcgauacacccggagaacggaacccuuaugagaauauucucuacaagaucugucugucuggcgacggguggccguauauugccucccgcaccagcaucguugggagagcgugggaaaacacaaccguggaucuugagucugacggcaagccccagaaagucgggaccgccggaagcaauaagucccugcagucugcuggcuuuccuacaggccucacguacagccaacugaugacccugaaagauuccaugaugcagcuugaccccagcgccaagacauggauugauaucgaggggcggccugaagaccccguggagaucgcucucuaccagccgaugucuggaugcuauauucacuucuuuagagaaccuaccgaccugaaacaguucaagcaagaugccaaguacucccauggcaucgacguugccgaucuguuucccgcucagccugggcucacaagcgcggugauugaggcccugccccgcaacaugguccuuaccugucagggaucugacgauaucaaaaagcugcucgacucccagggccggagagauauuaaacugaucgacaucagccuguccaagguggauucucgcaaauucgaaaaugcugucugggaccaaugcaaggaucuuugucacaugcauacgggggugguuguggagaagaaaaagcggggcggaaaagaggaaauuacaccccacugcgcccucauggacuguaucauguuugaugccgcugucagcggcgggcugaacauuccugugcugagagccguucucccgcgcgacaugguguuccggaccuccucucccaaggucgugcugugaggacuagucccuguucccagagcccacuuuuuuuucuuuuuuugaaauaaaauagccugucuuucagaucuaaaaaaaaaaaaaaaaaaaaaaaaaaaaaaaaaaaaaaaaaaaaaaaaaaaaaaaaaaaaaaaaaaaaaaaaaaaaaaaaaaaaaaaaaaaaaaaaaaaa

SEQ ID NO: 18379 - RNA, 2024 nt, Artificial Sequence
  mRNA product Design a-1 (A100) comprising derived and/or modified sequence from LASV(GA391;Clade III)__CAA36646__SP-HsPLAT_NP(2-570) (opt5)
aggagagucccgcagucggcguccagcggcucugcuuguucgugugugugucguugcaggccuuauucaagcuuaccauggacgccaugaagagaggccugugcugugugcuccugcuuugcggggcugucuucguuagccccagcgccuccaaggaggugagaucuuuccuguggacccagagccuccggcgcgaacuguccggcuacugcucuaacaucaaacuucaagucguuaaggacgcucaggcccugcuccacgggcuggauuuuagcgagguguccaaugugcagagacuuaugcggaaacagaagcgcgacgauggagaccugaaaagacuccgggaucugaaccaagcggucaauaaccugguggaacucaagucuacacagcagaaaagcguucugcgcgugggcacgcuuuccagcgacgaucugcucauucuggcugccgaccuugagaaacugaagucuaaagucaccagaacagaacggccccucuccagcgggguguauaugggaaaucugucuucccagcaacuggaucagcgcagagcccuccugaacaugaucggcaugaccgggguuagcggaggcggcaagggggcuucugacggaauugugcgggucugggaugugaaaaaugccgagcuucugaacaaucaguucggcacaaugccuucccucacccuggcuugucuuacaaagcaggggcaaguggaccugaacgaugccguccaggcgcucaccgaccugggacugaucuacacggccaaguauccgaauagcuccgaccucgaucgccugucucagagccaucccauucuuaacaugaucgacaccaaaaaguccagccugaauaucucuggcuacaacuuuucccucggggcugccguuaaagcuggagccugcaugcuggauggcggcaauaugcuugagacaauuaaggugagcccucaaaccauggacgggauccugaaaucuauucucaaggugaaaaagagccugggaauguucgucuccgauacacccggcgaaagaaacccuuaugagaacauccuguacaagauuugucucucuggggacggauggcccuauaucgcgagccggaccuccauugugggccgcgccugggaaaauacgguuguggaucuggagcaggacaacaaaccucagaagaucgggaauggaggcagcaacaaaucucuucaguccgcuggcuuugccgcugggcugacauacagccaacucaugacccugaaggauuucaaaugcuuuaaucugaucccgaacgccaagacauggauggacauugagggaagacccgaagauccugucgagaucgcccuuuaccagcccucuuccggcuguuaugugcacuucuuucgggaaccuaccgaccucaagcaguucaaacaggacgcuaaguacagccaugggauugauguuaccgaccuguuugcggcccaacccggacugacauccgcugugaucgaggcccucccgagaaauauggucauuacgugccagggcucugaagauauccgcaaacugcuugagagccaggggcggagagacaucaagcugauugauaucacccucuccaaagccgacucucgcaaguucgagaacgcugugugggaucaguuuaaggaccugugucacaugcauacaggcgucgugguugaaaagaagaaacggggaggcaaggaggaaauuaccccucacugcgcccugauggauuguaucauguucgacgcggcugugagcgggggacuugaugccaaaguccucagagugguucugccccgcgacaugguguuccggacauccaccccuaaggucgugcugugaggacuagucccuguucccagagcccacuuuuuuuucuuuuuuugaaauaaaauagccugucuuucagaucuaaaaaaaaaaaaaaaaaaaaaaaaaaaaaaaaaaaaaaaaaaaaaaaaaaaaaaaaaaaaaaaaaaaaaaaaaaaaaaaaaaaaaaaaaaaaaaaaaaaa

SEQ ID NO: 18380 - RNA, 2021 nt, Artificial Sequence
  mRNA product Design a-1 (A100) comprising derived and/or modified sequence from LASV(AV;Clade V)__CCA30315__SP-HsPLAT_NP(2-569) (opt5)
aggagagucccgcagucggcguccagcggcucugcuuguucgugugugugucguugcaggccuuauucaagcuuaccauggacgccaugaagagaggccugugcugugugcuccugcuuugcggggcugucuucguuagccccagcgccuccaaggaggugaaaucuuuccuguggacccagagccucagacgggaacuguccggcuacugcucuaacaucaaacuucaagucguuaaggacgcucaggcccugcuccacgggcuggauuuuagcgagguguccaaugugcagcgccuuaugagaaagcagcggcgcgacgauucugaccugaaaagacuccgggaucugaaccaagcggucaauaaccugguggaacucaagagcacacagcagaaguccguucugcgcgugggaacgcuuagcucugacgaucugcucacccuggcugccgaccuugagaaacugaaguccaaagucacaagaaccgaacggccccucagcucuggcguguauauggggaaucuguccagccagcaacuggaucagcgcagagcccuccugaaccuuauuggaaugacaaauggcucucaggggucccaggcuggacgggacggcguugugcgcgucugggaugugaagaacgccgagcugcucaauaaccaauucggcaccaugccuagccugacacuugcuugucugaccaaacagggacagguggaccucaaugaugucguucaagcccugacggaccuggggcucaucuacaccgcgaaguauccgaacacauccgaccuggauagacuuacccagucucaucccauucugaauaugaucgacacaaagaaaagcucccucaacauuagcggcuacaauuuuucucugggggccgcugugaaggccggagcuugcaugcuugauggcgggaacaugcuggagaccaucaaaguguccccucagagcauggacggaauccucaagucuauucugaaagucaagcgggcccugggcauguucgugagcgauacgcccggcgaacgcaacccuuaugagaauauccucuacaaaauuugucuguccggggacggauggcccuauaucgcgucuagaacaagcauuguuggccgggccugggaaaacaccguggucgaucuugagacagacgggaagccucagaagaucggauccggcaauagcaacaaaucucugcaauccgcuggguuuagcgccggacucaccuacucucagcugaugacccugaaggaugcuaugcuucagcucgacccgaaugccaaaacauggauggauauugagggcagacccgaagacccuguggagguugcccuguaccagcccaucuccggcugcuauauccacuucuuucgcgaaccuacggaccugaagcaauucaaacaggaugcuaaguacagccaugggauugacaucgcggaucucuuugccgcucagcccggacugaccuccgccgugauugaggcccuuccgcggaacauggucaucacaugucagggcucugaagacauuaagaaacugcucgagagccaagggagaaaggauaucaaacugaucgacauugcucuguccaagaucgauucucgcaaauucgagaaugccgugugggaccaguauaaggaucuuugccacaugcauaccggagucgugguugaaaagaaaaagcggggcgggaaagaggaaauuacaccucacugugcgcucauggacugcaucauguuugaugcugccgugagcggcggacugaacacccugguccucagagccgugcugccccgcgacaugguuuuccggacguccacaccuagagugguccuuugaggacuagucccuguucccagagcccacuuuuuuuucuuuuuuugaaauaaaauagccugucuuucagaucuaaaaaaaaaaaaaaaaaaaaaaaaaaaaaaaaaaaaaaaaaaaaaaaaaaaaaaaaaaaaaaaaaaaaaaaaaaaaaaaaaaaaaaaaaaaaaaaaaaaa

SEQ ID NO: 18381 - RNA, 2021 nt, Artificial Sequence
  mRNA product Design a-1 (A100) comprising derived and/or modified sequence from LASV(Togo/2016/7082;Clade VI)__AMR44578__SP-HsPLAT_NP(2-569) (opt5)
aggagagucccgcagucggcguccagcggcucugcuuguucgugugugugucguugcaggccuuauucaagcuuaccauggacgccaugaagagaggccugugcugugugcuccugcuuugcggggcugucuucguuagccccagcaacuccaaggaggugaaaucuuuccuguggacccagagccucagacgggaacuguccggcuacugcucuaauaucaaacuucaagucguuaaagacgcccaggcucugcuccacgggcuggauuuuagcgagguguccaacgugcagcgccuuaugagaaagcagaaacgggacgauggagaccugaagcgccucagagaucugaaucaagccgucaacaaucugguggaacucaagucuguucagcagaaaagcauucugcgggugggcacacuuacguccgacgaucugcucacccuggcggcugaccuugagaagcugaaaagcaaggucacacgcaccgaaagaccccucucuuccgggguguauaugggaaaccugagcucucagcaacuggaucagcggcgcgcccuccuguccaugaucggcaugagcgggggaaaucagaacucucagccuaaaggcgacggcguugugagagucugggaugugaagaaugccgaccuucugaacaaucaauucgggacaaugccgucccucacccuggcuugucuuacaaagcagggacagguggaucugaacgacgccguccaagcucucaccgaccugggccugauuuacacggccaaauaucccaauagcuccgaucucgaccggcugucucagagccauccuauccuuaacaugauugauaccaagaaauccagccugaauaucucuggguacaacuuuucccucggagcggccaucaagacaggcgcuugcaugcuggacgggggaaacaugcuugagaccauuaaaguuacaccccagaccauggauggcauccucaagagcauucugaaagugaagcgcucucugggcauguucaucagcgacacgccuggggagagaaaucccuaugaaaacauucuguacaagaucugucucuccggagauggcuggccuuauauugccucucggacagcuaucaucgggcgcgccugggagaauaccguggucgaccuggaaagcgauuccaaaccgcagaagauuggaagcaacggcucuaauaaaucccuucaaagcgcgggguuugcccccggacugacauacucucagcucaugacccugaaggacuccaugcugcagcuugauccuaacgcuaaaaccuggaucgacauugagggcagacccgaggacccuguggaaguugcccucuuccagcccaucagcggcugcuacauucacuuuuuccgggagccgacagaucugaagcaauuuaagcaggacgcuaaauauucccaugggaucgaugugacggaccuguucgccgcccagccuggacucaccucugcugucaucgaagcgcugcccagaaauauggugcuuacaugucagggcagcgaugacauuaagaaacugcucgauucccaagggcgccgggacaucaagcugauugauguuucucugaacaaaaucgacagcagaaaguuugagaaugccgugugggaucaguacaaggaccuuugccacaugcauaccggagucguggucgaaaagaagaaaaagggcgggaaagaggagauuacaccucacugugcucuccuggauugcaucauguucgacgccgccguguccggcggacugaacgcuaccguucuccgcgccgugcugccccgggacauggucuuuagaacgagcucucccaaggugguucuuugaggacuagucccuguucccagagcccacuuuuuuuucuuuuuuugaaauaaaauagccugucuuucagaucuaaaaaaaaaaaaaaaaaaaaaaaaaaaaaaaaaaaaaaaaaaaaaaaaaaaaaaaaaaaaaaaaaaaaaaaaaaaaaaaaaaaaaaaaaaaaaaaaaaaa

SEQ ID NO: 18382 - RNA, 2021 nt, Artificial Sequence
  mRNA product Design a-1 (A100) comprising derived and/or modified sequence from LASV(KAK-428;Clade n.d. (VII))__ANH09741__SP-HsPLAT_NP(2-569) (opt5)
aggagagucccgcagucggcguccagcggcucugcuuguucgugugugugucguugcaggccuuauucaagcuuaccauggacgccaugaagagaggccugugcugugugcuccugcuuugcggggcugucuucguuagccccagcaacuccaaggaggugaaaucuuuccuguggacccagagccucagacgggaacuguccggcuacugcacaaauaucaaacuucaagucguuaaggacgcccaggcucugcuccacgggcuggauuuuucugaggugagcaacgugcagcgccuuaugagaaagcagaaacgggacgauaaugaccugaagcgccucagagaucugaaccaagccgucaauaaccugguggaacucaaguccguucagcagaaaucugugcugaaggucggaacgcuuaauagcgacgaucugcucacccuggcggcugaccuugagaaacugaaguccaaagugguucggacagaacgcccccucagcucuggcguguauauggggaaccuguccagccagcaacuggaucagagacgggcccuccugaauaugauuggaauggccggcgggucucagggaaaccagccuucccgcgacggcgucgugagagugugggaugucaagaaugcugaccuucugaacaaucaauucggcaccaugccgagccucacacuggccugucuuaccaagcaggggcagguugaucugaacgacguggugcucgcucugacagaccugggacucaucuacaccgccaaauaucccaauucuuccgaucuggaccggcuuagccaaaaccauccuguccugaacaugauugaugugaauaaguccucucucaacaucagcggcuacaauuuuucccugggggcggccguuaaagcuggagccugcaugcuugacggcgggaacaugcuggagacgauuaagaucagcccccagaccguggauggaauccucaaaucuauucugaaggucaaacgcgcucugggcauguucguguccgacacaccuggcgagagaaaucccuaugaaaacauccucuacaagguuugucugagcgggaauggauggccuuauauugccucucggaccagcaucgugggccgcgcgugggagaacacagucguggaucuugaauccaauaagaaccagccgaaagucgggaauaacggaucuaauaagaugcugcagagcuccggcuuugccaccgggcucacguacagccaacugaugacacugagagacucuaugcuucagcucgaucccaccgcuaaaacauggauugacaucgagggacggccugaggaucccguggaacuggcccuguuccagccuuccagcggcugcuacauucacuuuuucagagagcccaccgaccucaagcaguuuaaacaagacgcuaaguauucucauggcaucgauguuaacgaccuguucuccgcccagccggggcuuaccagcgccgugcuggaagcucucccucgcaauaugguccugacaugucagggauccgaugacauccggaagcugcuugauucucaggacagaaaagauauuaagcucaucgacauuagccuguccaaagcggaugcccgcaaguuugagaacgacgugugggaucaauucaaagaccugugccacaugcauacgggcaucguuguggaaaagaagaaaaagggagggaaacaggagaugacaccccacugugcucuccuggauugcauuauguuugacgccgccgucucuggcgggcuuaacgugccuacccugcgggcugugcuccccaccgacaugguuuucagaacaaucaccacgaaggucgugcugugaggacuagucccuguucccagagcccacuuuuuuuucuuuuuuugaaauaaaauagccugucuuucagaucuaaaaaaaaaaaaaaaaaaaaaaaaaaaaaaaaaaaaaaaaaaaaaaaaaaaaaaaaaaaaaaaaaaaaaaaaaaaaaaaaaaaaaaaaaaaaaaaaaaaa

SEQ ID NO: 18383 - RNA, 2021 nt, Artificial Sequence; identical to SEQ ID NO: 18377
  mRNA product Design a-1 (A100) comprising derived and/or modified sequence from LASV(Pinneo-NIG-1969;Clade I)__AIT17837__SP-HsPLAT_NP(2-569) (opt5)

SEQ ID NO: 18384 - RNA, 2021 nt, Artificial Sequence
  mRNA product Design a-1 (A100) comprising derived and/or modified sequence from LASV(ISTH0009-NIG-2011;Clade II)__AIT17405__SP-HsPLAT_NP(2-569) (opt5)
aggagagucccgcagucggcguccagcggcucugcuuguucgugugugugucguugcaggccuuauucaagcuuaccauggacgccaugaagagaggccugugcugugugcuccugcuuugcggggcugucuucguuagccccagcguguccaaggaggucaaaucuuuccuguggacccagagccucagacgggaacuguccggcuacugcucuaacaucaaacuucaaguugugaaggacgcccaggcucugcuccacgggcuggauuuuagcgagguguccaauguccagcgccuuaugagaaagcagaaacgggacgauucugaccugaagcgccucagagaucugaaccaagccgugaauaaccugguugaacucaagagcacacagcagaaauccauucugcgggugggaacgcuuaccagcgacgaucugcucacacuggcggcugaccuugagaagcugaaaucuaaggucauccgcaccgaaagaccccucuccagcggcguguauauggggaaucugucuacacagcaacuggagcagcggcgcgcccuccugaacaugauuggaaugguuggcggggcccagggaacccagccuggcagagauggcgugguccgggugugggacgugaaaaauccggaucuucugaacaaucaauucgggacaaugcccucccucacccuggcuugucuuacgaagcagggacaggucgaccugaacgaugccguucucgcucugaccgaccugggccucaucuacacagccaaguauccuaauagcucugaccuggaucgccuuucccaaagccaucccauucugaacaugguggacaucaaaaaguccucucucaauaucagcggguacaacuuuucccugggagcggccgugaaagcuggcgccugcaugcuugaugggggaaauaugcuggagaccauuaaggucacaccucagaccauggacggcauccucaaaagcauucugaaggugaaaagaucucugggcauguucguuuccgauacgcccggggaacggaacccuuaugagaacauccucuacaagauuugucugagcggagacggcuggccguauaucgcuucucgcacaagcauuguggggagagccugggaaaauaccacagucgaucuugaguccgacggaaagccccagaaagugggcucugcggggagcaacaagucccugcagagcgccggauuuccuaccggccucaccuacucucaacugaugacacugaaagauuccaugaugcagcuugaccccagcgcuaagacguggaucgauaucgagggccggccugaagaccccguugagauugcccucuaccagccgaugucugggugcuauauccacuucuuuagagaaccuaccgaccugaaacaguucaagcaagaugcuaaguacucccauggaauugacguggccgaucuguuucccgcccagccuggccucacaagcgcugucaucgaggcgcugccccgcaauauggugcuuaccugucagggguccgacgauauuaaacggcugcucgacucucagggaagacgcgauaucaagcugaucgacauugcccugagcaaagcugauucccggagauucgaaaacgccgucugggaccaaugcaaggaucuuugucacaugcauacaggcgugguuguggagaaaaagaagcgcgggggcaaagaggaaaucacgccccacugcgcccucauggacuguauuauguaugaugcugccgucucuggaggccugaauaucccugugcugcgggcgguucucccgagagacaugguguuucgcaccagcucccccaaggucgugcugugaggacuagucccuguucccagagcccacuuuuuuuucuuuuuuugaaauaaaauagccugucuuucagaucuaaaaaaaaaaaaaaaaaaaaaaaaaaaaaaaaaaaaaaaaaaaaaaaaaaaaaaaaaaaaaaaaaaaaaaaaaaaaaaaaaaaaaaaaaaaaaaaaaaaa

SEQ ID NO: 18385 - RNA, 2021 nt, Artificial Sequence
  mRNA product Design a-1 (A100) comprising derived and/or modified sequence from LASV(ISTH2010-NIG-2012;Clade II)__AIT17483__SP-HsPLAT_NP(2-569) (opt5)
aggagagucccgcagucggcguccagcggcucugcuuguucgugugugugucguugcaggccuuauucaagcuuaccauggacgccaugaagagaggccugugcugugugcuccugcuuugcggggcugucuucguuagccccagcgccuccaaggaggugaaaucuuuccuguggacccagagccucagacgggaacuguccggcuacugcucuaacaucaaacuucaagucguuaaggacgcucaggcccugcuccacgggcuggauuuuagcgagguguccaaugugcagcgccuuaugagaaagcagaaacgggacgauucugaccugaagcgccucagagaucugaaccaagcggucaauaaccugguggaacucaagagcacacagcagaaauccauucugcggguuggaacgcuuaccagcgacgaucugcucacacuggcugccgaccuugagaagcugaaaucuaaggugauccgcaccgaaagaccccucuccagcggcgucuauauggggaaucugucuacacagcaacuggagcagcggcgcgcccuccugaaccuuauuggaauggugggcggggcucagggaacccagccuggcagagauggcguugugcgggucugggacgugaaaaauccggaucugcucaacaaucaauucgggacaaugcccucccugacccuugccugucugacgaagcagggacagguggaccucaacgaugcuguccuggcccugaccgaccucggccugaucuacacagcgaaguauccuaauagcucugaccuugaucgccugucccaaagccaucccauucucaacaugguugacaccaaaaaguccucucugaauaucagcggguuuaacuucucccuuggagccgcugugaaagccggcgcuugcaugcuggaugggggaaauaugcucgagacaaucaaggugaccccucagacgauggacggcauucugaaaagcauccugaaggucaaaaagucucucggcauguuuguguccgauacacccggggaaagaaacccuuacgagaacauucuguauaagaucugucuuagcggagacggcuggccguacauugccucucggaccagcaucguugggcgcgcgugggaaaauacaaccguggaucuggaguccgacggaaaaccccacaaggucggcaccgccgggucuaacaaaagccuccaguccgcuggauucccuacaggccugacguauagccagcugaugacccuuaaggauucuaugaugcaacucgaccccuccgccaaaacauggauugauaucgagggcagaccugaagaccccguggagaucgcucuguaccagccgaugagcgggugcuacauucacuuuuuccgggaaccuaccgaccugaagcaguuuaagcaggaugccaaauauucucauggaaucgacguugccgaucucuuccccgcucaaccuggccugacauccgcggugauugaggcccuucccagaaauaugguccugaccugucaggggagcgacgauaucaagcgccuccuggacucccagggacggagagauauuaaacugaucgacaucgcucuuucuaaggccgauagccgccgguuugaaaacgccgugugggaccagugcaaagaucucugucauaugcacacgggcgucgugguugagaagaagaaaagagggggcaaggaggaaauuacaccccacugcgcucugauggacuguaucauguacgaugccgcgguguccggaggccugaauauuccuguccuccgcgcugugcugccgcgggacaugguuuucagaaccucuagccccaaagugguccuuugaggacuagucccuguucccagagcccacuuuuuuuucuuuuuuugaaauaaaauagccugucuuucagaucuaaaaaaaaaaaaaaaaaaaaaaaaaaaaaaaaaaaaaaaaaaaaaaaaaaaaaaaaaaaaaaaaaaaaaaaaaaaaaaaaaaaaaaaaaaaaaaaaaaaa

SEQ ID NO: 18386 - RNA, 2021 nt, Artificial Sequence
  mRNA product Design a-1 (A100) comprising derived and/or modified sequence from LASV(Lassa virus/H.sapiens-wt/NGA/2015/ISTH_0543;Clade II)__AVO03640__SP-HsPLAT_NP(2-569) (opt5)
aggagagucccgcagucggcguccagcggcucugcuuguucgugugugugucguugcaggccuuauucaagcuuaccauggacgccaugaagagaggccugugcugugugcuccugcuuugcggggcugucuucguuagccccagcgccuccaaggaggugaaaucuuuccuguggacccagagccucagacgggaacuguccggcuacugcucuaacaucaaacuucaagucguuaaggacgcucaggcccugcuccacgggcuggauuuuagcgagguguccaaugugcagcgccuuaugagaaagcagaaacgggacgauucugaccugaagcgccucagagaucugaaccaagcggucaauaaccugguggaacucaagagcacacagcagaaauccauucugcggguuggaacgcuuaccagcgacgaucugcucacacuggcugccgaccuugagaagcugaaaucuaaggugauccgcaccgaaagaccccucuccagcggcgucuauauggggaaucugucuacacagcaacuggagcagcggcgcgcccuccugaacaugauuggaauggugggcggggcucagggaacccagccuggcagagauggcguugugcgggucugggacgugaaaaauccggaucuucugaacaaucaauucgggacaaugcccucccucacccuggccugucuuacgaagcagggacagguggaccugaacgaugcuguccucgcccugaccgaccugggccucaucuacacagcgaaguauccuaauagcucugaccuggaucgccuuucccaaagccaucccauucugaacaugguugacaccaaaaaguccucucucaauaucagcggguacaacuuuucccugggagccgcugugaaagccggcgcuugcaugcuugaugggggaaauaugcuggagacaaucaaggugaccccucagacgauggacggcauucucaaaagcauccugaaggucaaaaagucucugggcauguucguguccgauacacccggggaaagaaacccuuaugagaacauucucuacaagaucugucugagcggagacggcuggccguauauugccucucggaccagcaucguugggcgcgcgugggaaaauacaaccguggaucuugaguccgacggaaaaccccagaaggucggcucugccgggagcaacaaaucccugcagagcgcuggauuuccuaccggccucacauacucucaacugaugacgcugaaggauuccaugaugcagcuugaccccagcgccaaaaccuggauugauaucgagggcagaccugaagaccccguggagaucgcucucuaccagccgaugucugggugcuauauucacuucuuucgggaaccuacagaccugaagcaguucaagcaagaugccaaauacucccauggaaucgacguugccgaucuguuucccgcucagccuggccucaccagcgcggugauugaggcccugcccagaaauaugguccuuacaugucagggguccgacgauaucaagcgccugcucgacucucagggacggaaagauauuaagcugaucgacaucgcucugagcaaagccgauuccagacgcuucgaaaacgccgugugggaccaaugcaaggaucuuugucacaugcauaccggcgucgugguugagaagaaaaagagagggggcaaagaggaaauuacgccccacugcgcucucauggacuguaucauguaugaugccgcggugucuggaggccugaauauuccuguccugcgggcugugcucccgcgcgacaugguuuuucggacaagcucccccaaggugguccugugaggacuagucccuguucccagagcccacuuuuuuuucuuuuuuugaaauaaaauagccugucuuucagaucuaaaaaaaaaaaaaaaaaaaaaaaaaaaaaaaaaaaaaaaaaaaaaaaaaaaaaaaaaaaaaaaaaaaaaaaaaaaaaaaaaaaaaaaaaaaaaaaaaaaa

SEQ ID NO: 18387 - RNA, 2021 nt, Artificial Sequence
  mRNA product Design a-1 (A100) comprising derived and/or modified sequence from LASV(Lassa virus/H.sapiens-wt/NGA/2016/ISTH_0009;Clade II)__AVO03572__SP-HsPLAT_NP(2-569) (opt5)
aggagagucccgcagucggcguccagcggcucugcuuguucgugugugugucguugcaggccuuauucaagcuuaccauggacgccaugaagagaggccugugcugugugcuccugcuuugcggggcugucuucguuagccccagcgccuccaaggaggugaaaucuuuccuguggacccagagccucagacgggaacuguccggcuacugcucuaacaucaaacuucaagucguuaaggacgcucaggcccugcuccacgggcuggauuuuagcgagguguccaaugugcagcgccuuaugagaaagcagaaacgggacgauucugaccugaagcgccucagagaucugaaccaagcggucaauaaccugguggaacucaagagcacacagcagaaauccauucugcggguuggaacgcuuaccagcgacgaucugcucacacuggcugccgaccuugagaagcugaaaucuaaggugauccgcaccgaaagaccccucuccagcggcgucuauauggggaaucugucuacacagcaacuggagcagcggcgcgcccuccugaacaugauuggaauggugggcggggcucagggaacccagccuggcagagauggcguugugcgggucugggacgugaaaaauccggaucuucugaacaaucaauucgggacaaugcccucccucacccuggccugucuuacgaagcagggacagguggaccugaacgaugcuguccucgcccugaccgaccugggccucaucuacacagcgaaguauccuaauagcucugaccuggaucgccuuucccaaagccaucccauucugaacaugguugacaccaaaaaguccucucucaauaucagcggguacaacuuuucccugggagccgcugugaaagccggcgcuugcaugcuugaugggggaaauaugcuggagacaaucaaggugaccccucagacgauggacggcauucucaaaagcauccugaaggucaaaaagucucugggcauguucguguccgauacacccggggaaagaaacccuuaugagaacauucucuacaagaucugucugagcggagacggcuggccguauauugccucucggaccagcaucguugggcgcgcgugggaaaauacaaccguggaucuugaguccgacggaaaaccccagaaggucggcucugccgggagcaacaaaucccugcagagcgcuggauuuccuaccggccucacauacucucaacugaugacgcugaaggauuccaugaugcagcuugaccccagcgccaaaaccuggauugauaucgagggcagaccugaagaccccguggagaucgcucucuaccagccgaugucugggugcuauauucacuucuuucgggaaccuacagaccugaagcaguucaagcaagaugccaaauacucccauggaaucgacguugccgaucuguuucccgcucagccuggccucaccagcgcggugauugaggcccugcccagaaauaugguccuuacaugucagggguccgacgauaucaagcgccugcucgacucucagggacggagagauauuaaacugaucgacaucgcucugagcaaggccgauucccgccgguucgaaaacgccgugugggaccaaugcaaagaucuuugucacaugcauaccggcgucgugguugagaagaagaaaagagggggcaaggaggaaauuacgccccacugcgcucucauggacuguaucauguaugaugccgcggugucuggaggccugaauauuccuguccugcgcgcugugcucccgcgggacaugguuuuuagaacaagcucccccaaagugguccugugaggacuagucccuguucccagagcccacuuuuuuuucuuuuuuugaaauaaaauagccugucuuucagaucuaaaaaaaaaaaaaaaaaaaaaaaaaaaaaaaaaaaaaaaaaaaaaaaaaaaaaaaaaaaaaaaaaaaaaaaaaaaaaaaaaaaaaaaaaaaaaaaaaaaa

SEQ ID NO: 18388 - RNA, 2021 nt, Artificial Sequence
  mRNA product Design a-1 (A100) comprising derived and/or modified sequence from LASV(Lassa virus/H.sapiens-wt/NGA/2016/ISTH_0017;Clade II)__AVO03568__SP-HsPLAT_NP(2-569) (opt5)
aggagagucccgcagucggcguccagcggcucugcuuguucgugugugugucguugcaggccuuauucaagcuuaccauggacgccaugaagagaggccugugcugugugcuccugcuuugcggggcugucuucguuagccccagcgccuccaaggaggugaaaucuuuccuguggacccagagccucagacgggaacuguccggcuacugcucuagcaucaaacuucaagucguuaaggacgcucaggcccugcuccacgggcuggauuuuuccgaggugucuaacgugcagcgccuuaugagaaagcagaaacgggacgauagcgaccugaagcgccucagagaucugaaucaagcggucaacaaucugguggaacucaaguccacacagcagaaaagcauucugcggguuggaacgcuuaccucugacgaucugcucacacuggcugccgaccuugagaagcugaaauccaaggugauccgcaccgaaagaccccucagcucuggcgucuauauggggaaccuguccacacagcaacuggagcagcggcgcgcccuccugaauaugauuggaauggcuggcggggcccagggaacccagccuggcagagauggcgugguucgggugugggacgucaaaaacccggaucuucugaauaaccaauucgggacaaugcccagccucacccuggcuugucuuacgaagcagggacagguggaccugaaugaugccgugcucgcgcugaccgaccugggccucaucuacacagccaaguauccuaacucuuccgaccuggaucgccuuagccaaucccaucccauucugaauauggucgacaccaaaaagucuagccucaacaucuccggguacaauuuuagccugggagcugccguuaaagcuggcgccugcaugcuugaugggggaaacaugcuggagacaaucaaggugaccccucagacgauggacggcauucucaaaucuauccugaaggugaaaagaucccugggcauguucgucagcgaugcgcccggggaacggaauccuuaugagaacauucucuacaagaucugucugucuggagacggcuggccguauauugccagccgcacauccaucguggggagagcuugggaaaacaccacaguugaucuugagucugacggaaagccccagaaagugggcgccaccgggagcaauaagucccugcagagcgcuggauuuccuaccggccucacauacucucaacugaugacgcugaaagauuccaugaugcagcuugaccccagcgccaagaccuggauugauaucgagggccggccugaagaccccgucgagguggcccucuaccagccgguuucugggugcuauauccacuucuuuagagaaccuacagaccugaaacaguucaagcaagaugcuaaguacucccauggaauugacguggcggaucuguuucccgcccagccuggccucaccagcgcugucaucgaggcccugccccgcaacauggugcuuacaugucagggguccgacgauauuaaaaagcugcucgacucucagggacggaaagauaucaagcugauugacaucgcccugagcaaagcugauuccagacgcuucgaaaaugccgucugggaccaaugcaaggaucuuugucacaugcauaccggcgugguuguggagaagaaaaagagagggggcaaagaggaaaucacgccccacugcgcgcucauggacuguauuauguaugaugcugccgucucuggaggccugaacaucccugugcugcgggccguucucccgcgcgacaugguguuucggacaagcucccccaaggucgugcugugaggacuagucccuguucccagagcccacuuuuuuuucuuuuuuugaaauaaaauagccugucuuucagaucuaaaaaaaaaaaaaaaaaaaaaaaaaaaaaaaaaaaaaaaaaaaaaaaaaaaaaaaaaaaaaaaaaaaaaaaaaaaaaaaaaaaaaaaaaaaaaaaaaaaa

SEQ ID NO: 18389 - RNA, 2021 nt, Artificial Sequence
  mRNA product Design a-1 (A100) comprising derived and/or modified sequence from LASV(Lassa virus/H.sapiens-wt/NGA/2018/ISTH_0959;Clade II)__AVV65100__SP-HsPLAT_NP(2-569) (opt5)
aggagagucccgcagucggcguccagcggcucugcuuguucgugugugugucguugcaggccuuauucaagcuuaccauggacgccaugaagagaggccugugcugugugcuccugcuuugcggggcugucuucguuagccccagcgccuccaaggaggugaaaucuuuccuguggacccagagccucagacgggaacuguccggcuacugcucuaacaucaaacuucaagucguuaaggacgcucaggcccugcuccacgggcuggauuuuagcgagguguccaaugugcagcgccuuaugagaaagcagaaacgggacgauucugaccugaagcgccucagagaucugaaccaagcggucaauaaccugguggaacucaagagcacccagcagaaauccauucugcggguuggaacgcuuaccagcgacgaucugcucacacuggcugccgaccuugagaagcugaaaucuaaggugauccgcaccgaaagaccccucuccagcggcgucuauauggggaaucugucuacacagcaacuggagcagcggcgcgcccuccugaaccuuauuggaauggugggcggggcucagggaacccagccuggcagagauggcguugugcgggucugggacgugaaaaauccggaucugcucaacaaucaauucgggacaaugcccucccugacccuugccugucugacgaagcagggacagguggaccucaacgaugucguucuggcucugaccgaccucggccugaucuacacagccaaguauccuaauagcucugaccuugaucgccugucccaaagccaucccauucucaacaugguggacaccaaaaaguccucucugaauaucagcggguuuaacuucucccuuggagcggccgugaaagcuggcgccugcaugcuggaugggggaaauaugcucgagacaaucaaggucaccccucagacgauggacggcauucugaaaagcauccugaaggugaaaaagucucucggcauguuuguuuccgauacacccggggaaagaaacccuuacgagaacauucuguauaagaucugucuuagcggagacggcuggccguacauugcuucucggaccagcaucguggggcgcgccugggaaaauacaaccgucgaucuggaguccgacggaaaaccccacaaggugggcaccgcggggucuaacaaaagccuccaguccgccggauucccuacaggccugacguauagccagcugaugacccuuaaggauucuaugaugcaacucgaccccuccgcuaaaacauggauugauaucgagggcagaccugaagaccccguugagaucgcccuguaccagccgaugagcgggugcuacauucacuuuuuccgggaaccuaccgaccugaagcaguuuaagcaggaugcuaaauauucucauggaaucgacguggccgaucucuuccccgcccaaccuggccugacauccgcugucauugaggcgcuucccagaaauauggugcugaccugucaggggagcgacgauaucaagcgccuccuggacucccagggacggaaagauauuaagcugaucgacaucgcccuuucuaaaacggauagcagacgcuuugaaaacgcugucugggaccagugcaaggaucucugucauaugcacacaggcgugguuguggagaagaaaaagagagggggcaaagaggaaauuacaccccacugcgcccugauggacuguaucauguacgaugccgcugucuccggaggccugaauauuccugugcuccgggccguucugccgcgcgacaugguguuccggaccucuagccccaaggucgugcuuugaggacuagucccuguucccagagcccacuuuuuuuucuuuuuuugaaauaaaauagccugucuuucagaucuaaaaaaaaaaaaaaaaaaaaaaaaaaaaaaaaaaaaaaaaaaaaaaaaaaaaaaaaaaaaaaaaaaaaaaaaaaaaaaaaaaaaaaaaaaaaaaaaaaaa

SEQ ID NO: 18390 - RNA, 2021 nt, Artificial Sequence
  mRNA product Design a-1 (A100) comprising derived and/or modified sequence from LASV(LASV003-NIG-2008;Clade II)__AIT17581__SP-HsPLAT_NP(2-569) (opt5)
aggagagucccgcagucggcguccagcggcucugcuuguucgugugugugucguugcaggccuuauucaagcuuaccauggacgccaugaagagaggccugugcugugugcuccugcuuugcggggcugucuucguuagccccagcgccuccaaggaggugaaaucuuuccuguggacccagagccucagacgggaacuguccggcuacugcucuagcaucaaacuucaagucguuaaggacgcucaggcccugcuccacgggcuggauuuuuccgaggugucuaacgugcagcgccuuaugagaaagcagaaacgggacgauagcgaccugaagcgccucagagaucugaaucaagcggucaacaaucugguggaacucaaguccacccagcagaaaagcguucugcgggugggaacgcuuaccucugacgaucugcucacacuggcugccgaccuugagaagcugaaauccaaggucauucgcaccgaaagaccccucagcucuggcguguauauggggaaccuguccgcccagcaacuggagcagcggcgcacacuccugaauaugaucggaaugguuggcggggcucagggaacccagccuggcagagauggcgugguccgggugugggacgugaaaaacccggaucuucugaauaaccaauucgggacaaugcccagccucacccuggccugucuuacgaagcagggacaggucgaccugaaugauguugugcucgcucugaccgaccugggccucauuuacacagccaaguauccuaacucuuccgaccuggaucgccuuagccaaucccaucccauccugucuaugguggacaccaaaaagagcucccucaauauuagcggguacaacuuuucucugggagcggccgucaaagcuggcgccugcaugcuugaugggggaaauaugcuggagacaaucaaggugaccccucagacgauggacggcauccucaaauccauucugaagguuaaaaagagccugggcauguucgugucugauacacccggggaaagaaacccuuaugagaauauccucuacaagauuugucugagcggagacggcuggccguauaucgcuucccggaccucuauugucgggcgcgccugggaaaacacaaccguggaucuugagagcgacggaaaaccccagaagguuggcaccgcgggguccaacaaaagccugcagucugccggauuuccuacaggccucacguacucccaacugaugacccugaaggauagcaugaugcagcuugaccccucugcuaaaacauggaucgauauugagggcagaccugaagaccccguggagaucgcccucuaccagccgauguccgggugcuauauccacuucuuucgggaaccuaccgaccugaagcaguucaagcaagaugcuaaauacagccauggaauugacgucacagaucuguuucccgcccagccuggccucaccuccgccgugaucgaggcucugcccagaaauaugguccuuacgugucaggggucugacgauauuaagcgccugcucgacagccagggacggagagauaucaaacugauugacaucgcgcuguccaaggccgauucucgccgguucgaaaacgcugugugggaccaaugcaaagaucuuugucacaugcauacaggcguuguggucgagaagaagaaaagagggggcaaggaggaaaucacaccccacugcgcccucauggacuguauuauguaugaugccgcugugagcggaggccugaauaucccuguucugcgcgccgugcucccgcgggacauggucuuuagaaccuccagccccaaaguggugcugugaggacuagucccuguucccagagcccacuuuuuuuucuuuuuuugaaauaaaauagccugucuuucagaucuaaaaaaaaaaaaaaaaaaaaaaaaaaaaaaaaaaaaaaaaaaaaaaaaaaaaaaaaaaaaaaaaaaaaaaaaaaaaaaaaaaaaaaaaaaaaaaaaaaaa

SEQ ID NO: 18391 - RNA, 2021 nt, Artificial Sequence
  mRNA product Design a-1 (A100) comprising derived and/or modified sequence from LASV(LASV035-NIG-2009;Clade II)__AIT17589__SP-HsPLAT_NP(2-569) (opt5)
aggagagucccgcagucggcguccagcggcucugcuuguucgugugugugucguugcaggccuuauucaagcuuaccauggacgccaugaagagaggccugugcugugugcuccugcuuugcggggcugucuucguuagccccagcgccuccaaggaggugaaaucuuuccuguggacccagagccucagacgggaacuguccggcuacugcucuagcaucaaacuucaagucguuaaagacgcucaggcccugcuccacgggcuggauuuuuccgaggugucuaacgugcagcgccuuaugagaaagcagaaacgggacgauagcgaccugaagcgccucagagaucugaaucaagcggucaacaaucugguggaacucaaguccacacagcagaaaagcauucugcggguuggaacgcuuaccucugacgaucugcucacacuggcugccgaccuugagaagcugaaauccaaggugauccgcaccgaaagaccccucagcucuggcgucuauauggggaaccuguccgcccagcaacuggagcagcggcgcgcucuccugaauaugauuggaauggugggcggggcccagggaacacagccuggcagagauggcguugugcgggucugggacgugaaaaacccggaucuucugaauaaccaauucgggaccaugcccagccucacacuggcuugucuuaccaagcagggacagguggaccugaaugaugccguccucgcgcugacggaccugggccucaucuacaccgccaaguauccuaacucuuccgaccuggaucgccuuagccaaucccaucccauucugaauaugguugacacaaagaagucuagccucaacaucuccggguacaauuuuagccugggagcugccgugaaagcuggcgccugcaugcuugaugggggaaacaugcuggagaccaucaaggugacaccucagaccauggacggcauucucaaaucuauccugaaggucaaaagaucccugggcauguucgugagcgauacgcccggggaacggaauccuuaugagaacauucucuacaagaucugucugucuggagacggcuggccguauauugcgagccgcacauccaucguugggagagccugggaaaacaccacaguggaucuugagucugacggaaagccccagaaagucggcaccaccgggagcaauaagucccugcagagcgcuggauuuccuacaggccucacguacucucaacugaugacccugaaagauuccaugaugcagcuugaccccagcgccaagacauggauugauaucgagggccggccugaagaccccguggagaucgcucucuaccagccgaugucugggugcuauauucacuucuuuagagaaccuaccgaccugaaacaguucaagcaagaugccaaguacucccauggaaucgacguugccgaucuguuucccgcucagccuggccucacaagcgcggugauugaggcccugccccgcaacaugguccuuaccugucagggguccgacgauaucaaaaagcugcucgacucucagggacggagagauauuaaacugaucgacaucgcucugagcaaggccgauucccgcaaauucgaaaaugccgugugggaccaaugcaaggaucuuugucacaugcauacgggcgucgugguugagaagaaaaagagagggggcaaagaggaaauuacaccccacugcgcucucauggacuguaucauguaugaugccgcggugucuggaggccugaacauuccuguccugcgggcugugcucccgcgcgacaugguuuuucggaccagcucccccaaggugguccugugaggacuagucccuguucccagagcccacuuuuuuuucuuuuuuugaaauaaaauagccugucuuucagaucuaaaaaaaaaaaaaaaaaaaaaaaaaaaaaaaaaaaaaaaaaaaaaaaaaaaaaaaaaaaaaaaaaaaaaaaaaaaaaaaaaaaaaaaaaaaaaaaaaaaa

SEQ ID NO: 18392 - RNA, 2021 nt, Artificial Sequence
  mRNA product Design a-1 (A100) comprising derived and/or modified sequence from LASV(LASV1000-NIG-2009;Clade II)__AIT17783__SP-HsPLAT_NP(2-569) (opt5)
aggagagucccgcagucggcguccagcggcucugcuuguucgugugugugucguugcaggccuuauucaagcuuaccauggacgccaugaagagaggccugugcugugugcuccugcuuugcggggcugucuucguuagccccagcgccuccaaggaggugaaaucuuuccuguggacccagagccucagacgggaacuguccggcuacugcucuaacaucaaacuucaagucguuaaggacgcucaggcccugcuccacgggcuggauuuuagcgagguguccaaugugcagcgccuuaugagaaagcagaaacgggacgauucugaccugaagcgccucagagaucugaaccaagcggucaauaaccugguggaacucaagagcacacagcagaaauccauucugcggguuggaacgcuuaccagcgacgaucugcucacacuggcugccgaccuugagaagcugaaaucuaaggugauccgcaccgaaagaccccucuccagcggcgucuauauggggaaucugucuacacagcaacuggagcagcggcgcgcccuccugaacaugauuggaauggugggcggggcucagggaacccagccuggcagagauggcguugugcgggucugggacgugaaaaauccggaucuucugaacaaucaauucgggacaaugcccucccucacccuggccugucuuacgaagcagggacagguggaccugaacgaugucguucucgcucugaccgaccugggccucaucuacacagccaaguauccuaauagcucugaccuggaucgccuuucccaaagccaucccauucugaacaugguggacaccaaaaaguccucucucaauaucagcggguacaacuuuucccugggagcggccgugaaagcuggcgccugcaugcuugaugggggaaauaugcuggagacaaucaaggucaccccucagacgauggacggcauucucaaaagcauccugaaggugaaaaagucucugggcauguucguuuccgauacacccggggaaagaaacccuuaugagaacauucucuacaagaucugucugagcggagacggcuggccguauauugcuucucggaccagcaucguggggcgcgccugggaaaauacaaccgucgaucuugaguccgacggaaaaccccagaaggugggcaccgcggggucuaacaaaagccugcaguccgccggauuuccuacaggccucacguacagccaacugaugacccugaaggauucuaugaugcagcuugaccccuccgcuaaaacauggauugauaucgagggcagaccugaagaccccguugagaucgcccucuaccagccggugagcgggugcuauauucacuucuuucgggaaccuaccgaccugaagcaguucaagcaagaugcuaaauacucucauggaaucgacgucgccgaucuguuucccgcccagccuggccucacauccgcugugauugaggcgcugcccagaaauaugguccuuaccugucaggggagcgacgauaucaagcgccugcucgacucccagggacggagagauauuaaacugaucgacaucgcccugucuaaggcugauagccgccgguucgaaaacgccgugugggaccaaugcaaagaucuuugucacaugcauacgggcguuguggucgagaagaagaaaagagggggcaaggaggaaauuacaccccacugcgcccucauggacuguaucauguaugaugcugccguguccggaggccugaauauuccuguucugcgcgcggugcucccgcgggacauggucuuuagaaccucuagccccaaaguggugcugugaggacuagucccuguucccagagcccacuuuuuuuucuuuuuuugaaauaaaauagccugucuuucagaucuaaaaaaaaaaaaaaaaaaaaaaaaaaaaaaaaaaaaaaaaaaaaaaaaaaaaaaaaaaaaaaaaaaaaaaaaaaaaaaaaaaaaaaaaaaaaaaaaaaaa

SEQ ID NO: 18393 - RNA, 2021 nt, Artificial Sequence
  mRNA product Design a-1 (A100) comprising derived and/or modified sequence from LASV(LASV221-NIG-2010;Clade II)__AIT17625__SP-HsPLAT_NP(2-569) (opt5)
aggagagucccgcagucggcguccagcggcucugcuuguucgugugugugucguugcaggccuuauucaagcuuaccauggacgccaugaagagaggccugugcugugugcuccugcuuugcggggcugucuucguuagccccagcgccuccaaggaggugaaaucuuuccuguggacccagagccucagacgggaacuguccggcuacugcucuagcaucaaacuucaagucguuaaggacgcucaggcccugcuccacgggcuggauuuuuccgaggugucuaacgugcagcgccuuaugagaaagcagcggcgcgacgauagcgaccugaaaagacuccgggaucugaaucaagcggucaacaaucugguggaacucaaguccacacagcaaaagagcauucugcgcguuggaacgcuuaccucugacgaucugcucacacuggcugccgaccuugagaaacugaaguccaaagugaucagaaccgaacggccccucagcucuggcgucuauauggggaaccuguccacacagcagcuggagcagcgcagagcccuccugaauaugauuggaauggugggcggggcucagggaacccagccuggccgggauggcguugugcgcgucugggacgugaagaacccggaucuucugaauaaccaauucgggacaaugcccagccucacccuggccugucuuacgaaacagggacagguggaccugaaugaugcuguccucgcccugaccgaccugggccucaucuacacagcgaaguauccuaacucuuccgaccuggauagacuuagccaaucccaucccauucugaauaugguugacaccaagaaaucuagccucaacaucuccggguacaauuuuagccugggagccgcugugaaggccggcgcuugcaugcuugaugggggaaacaugcuggagacaaucaaagugaccccucagacggucgacggcauucucaagucuauccugaaagugaagcggucccugggcauguucguuagcgauacacccggggaacgcaauccuuaugagaacauucucuacaaaaucugucugucuggagacggcuggccguauauugccagcagaaccuccaucguggggcgggcgugggaaaacacaaccgucgaucuugagucugacggaaagccccagaaggugggcaccgccgggagcaauaaaucccugcagagcgcuggauuuccuacaggccucacguacucucaacugaugacccugaaggauuccaugaugcagcuugaccccagcgccaaaacauggauugauaucgagggcagaccugaagaccccguugagaucgcucucuaccagccgaugucugggugcuauauucacuucuuucgcgaaccuaccgaccugaagcaguucaaacaagaugccaaguacucccauggaaucgacguggccgaucuguuucccgcucagccuggccucacaagcgcggucauugaggcccugccccggaacauggugcuuaccugucagggguccgacgauaucaagagacugcucgacucucagggacgccgggauauuaaacugaucgacaucgcucugagcaaggccgauuccagaaaauucgaaaaugccgucugggaccaaugcaaggaucuuugucacaugcauacgggcgugguuguggagaaaaagaagcgcgggggcaaagaggaaauuacaccccacugcgcucucauggacuguaucauguaugaugccgcggucucuggaggccugaacauuccugugcugcgggcuguucucccgagagacaugguguuucgcaccagcucccccaaggucgugcugugaggacuagucccuguucccagagcccacuuuuuuuucuuuuuuugaaauaaaauagccugucuuucagaucuaaaaaaaaaaaaaaaaaaaaaaaaaaaaaaaaaaaaaaaaaaaaaaaaaaaaaaaaaaaaaaaaaaaaaaaaaaaaaaaaaaaaaaaaaaaaaaaaaaaa

SEQ ID NO: 18394 - RNA, 2021 nt, Artificial Sequence
  mRNA product Design a-1 (A100) comprising derived and/or modified sequence from LASV(LASV237-NIG-2010;Clade II)__AIT17639__SP-HsPLAT_NP(2-569) (opt5)
aggagagucccgcagucggcguccagcggcucugcuuguucgugugugugucguugcaggccuuauucaagcuuaccauggacgccaugaagagaggccugugcugugugcuccugcuuugcggggcugucuucguuagccccagcgccuccaaggaggugaaaucuuuccuguggacccagagccucagacgggaacuguccggcuacugcucuaacaucaaacuucaagucguuaaggacgcucaggcccugcuccacgggcuggauuuuagcgagguguccaaugugcagcgccuuaugagaaagcagaaacgggacgauucugaccugaagcgccucagagaucugaaccaagcggucaauaaccugguggaacucaagagcacacagcagaaauccauucugcggguuggaacgcuuaccagcgacgaucugcucacacuggcugccgaccuugagaagcugaaaucuaaggugauccgcaccgaaagaccccucuccagcggcgucuauauggggaaucugucuacacagcaacuggagcagcggcgcgcccuccugaacaugauuggaauggugggcggggcucagggaacccagccuggcagagauggcguugugcgggucugggacgugaaaaauccggaucuucugaacaaucaauucgggacaaugcccucccucacccuggccugucuuacgaagcagggacagguggaccugaacgaugcuguccucgcccugaccgaccugggccucaucuacacagcgaaguauccuaauagcucugaccuggaucgccuuucccaaagccaucccauucugaacaugguugacaucaaaaaguccucucucaauaucagcggguacaacuuuucccugggagccgcugugaaagccggcgcuugcaugcuugaugggggaaauaugcuggagaccauuaaggugacaccucagaccauggacggcauccucaaaagcauucugaaggucaaaagaucucugggcauguucguguccgauacgcccggggaacggaacccuuaugagaacauccucuacaagauuugucugagcggagacggcuggccguauaucgccucucgcacaagcauuguugggagagcgugggaaaauaccacaguggaucuugaguccgacggaaagccccagaaagucggcucugccgggagcaacaagucccugcagagcgcuggauuuccuaccggccucaccuacucucaacugaugacacugaaagauuccaugaugcagcuugaccccagcgccaagacguggaucgauaucgagggccggccugaagaccccguggagauugcucucuaccagccgaugucugggugcuauauccacuucuuuagagaaccuaccgaccugaaacaguucaagcaagaugccaaguacucccauggaauugacguugccgaucuguuucccgcucagccuggccucacaagcgcggugaucgaggcccugccccgcaauaugguccuuaccugucagggguccgacgauauuaaacggcugcucgacucucagggaagacgcgauaucaagcugaucgacauugcucugagcaaagccgauucccggagauucgaaaacgccgugugggaccaaugcaaggaucuuugucacaugcauacaggcgucgugguugagaaaaagaagcgcgggggcaaagaggaaaucacgccccacugcgcucucauggacuguauuauguaugaugccgcggugucuggaggccugaauaucccuguccugcgggcugugcucccgagagacaugguuuuucgcaccagcucccccaaggugguccugugaggacuagucccuguucccagagcccacuuuuuuuucuuuuuuugaaauaaaauagccugucuuucagaucuaaaaaaaaaaaaaaaaaaaaaaaaaaaaaaaaaaaaaaaaaaaaaaaaaaaaaaaaaaaaaaaaaaaaaaaaaaaaaaaaaaaaaaaaaaaaaaaaaaaa

SEQ ID NO: 18395 - RNA, 2021 nt, Artificial Sequence
  mRNA product Design a-1 (A100) comprising derived and/or modified sequence from LASV(LASV253-NIG-2011;Clade II)__AIT17671__SP-HsPLAT_NP(2-569) (opt5)
aggagagucccgcagucggcguccagcggcucugcuuguucgugugugugucguugcaggccuuauucaagcuuaccauggacgccaugaagagaggccugugcugugugcuccugcuuugcggggcugucuucguuagccccagcgccuccaaggaggugaaaucuuuccuguggacccagagccucagacgggaacuguccggcuacugcucuagcaucaaacuucaagucguuaaggacgcucaggcccugcuccacgggcuggauuuuuccgaggugucuaacgugcagcgccuuaugagaaagcagaaacgggacgauagcgaccugaagcgccucagagaucugaaucaagcggucaacaaucugguggaacucaaguccacccagcagaaaagcguucugcgggugggaacgcuuaccucugacgaucugcucacacuggcugccgaccuugagaagcugaaauccaaggucauucgcaccgaaagaccccucagcucuggcguguauauggggaaccuguccacacagcaacuggagcagcggcgcgcccuccugaauaugaucggaaugguuggcggggcucagggaacccagccuggcagagauggcgugguccgggugugggacgugaaaaacccggaucuucugaauaaccaauucgggacaaugcccagccucacccuggccugucuuacgaagcagggacaggucgaccugaaugauguugugcucgcucugaccgaccugggccucauuuacacagccaaguauccuaacucuuccgaccuggaucgccuuagccaaucccaucccauccugaauaugguggacaccaaaaagucuagccucaacauuuccggguacaauuuuagccugggagcggccgucaaagcuggcgccugcaugcuugaugggggaaacaugcuggagacaaucaaggugaccccucagacgauggacggcauccucaaaucuauucugaagguuaaaaagucccugggcauguucgugagcgauacacccggggaaagaaauccuuaugagaacauccucuacaagauuugucugucuggagacggcuggccguauaucgcuagccggaccuccauugucgggcgcgccugggaaaacacaaccguggaucuugagucugacggaaaaccccagaagguuggcaccgcggggagcaauaaaucccugcagagcgccggauuuccuacaggccucacguacucucaacugaugacccugaaggauuccaugaugcagcuugaccccagcgcuaaaacauggaucgauauugagggcagaccugaagaccccguggagaucgcccucuaccagccgaugucugggugcuauauccacuucuuucgggaaccuaccgaccugaagcaguucaagcaagaugcuaaauacucccauggaauugacgucacagaucuguuucccgcccagccuggccucaccagcgccgugaucgaggcucugcccagaaacaugguccuuacgugucagggguccgacgauauuaagcgccugcucgacucucagggacggagagauaucaaacugauugacaucgcgcugagcaaggccgauucccgccgguucgaaaaugcugugugggaccaaugcaaagaucuuugucacaugcauacaggcguuguggucgagaagaagaaaagagggggcaaggaggaaaucacaccccacugcgcccucauggacuguauuauguaugaugccgcugugucuggaggccugaacaucccuguucugcgcgccgugcucccgcgggacauggucuuuagaaccagcucccccaaaguggugcugugaggacuagucccuguucccagagcccacuuuuuuuucuuuuuuugaaauaaaauagccugucuuucagaucuaaaaaaaaaaaaaaaaaaaaaaaaaaaaaaaaaaaaaaaaaaaaaaaaaaaaaaaaaaaaaaaaaaaaaaaaaaaaaaaaaaaaaaaaaaaaaaaaaaaa

SEQ ID NO: 18396 - RNA, 2021 nt, Artificial Sequence
  mRNA product Design a-1 (A100) comprising derived and/or modified sequence from LASV(LASV254-NIG-2011;Clade II)__AIT17675__SP-HsPLAT_NP(2-569) (opt5)
aggagagucccgcagucggcguccagcggcucugcuuguucgugugugugucguugcaggccuuauucaagcuuaccauggacgccaugaagagaggccugugcugugugcuccugcuuugcggggcugucuucguuagccccagcgccuccaaggaggugaaaucuuuccuguggacccagagccucagacgggaacuguccggcuacugcucuagcaucaaacuucaagucguuaaggacgcucaggcccugcuccacgggcuggauuuuuccgaggugucuaacgugcagcgccuuaugagaaagcagaaacgggacgauagcgaccugaagcgccucagagaucugaaucaagcggucaacaaucugguggaacucaaguccacacagcagaaaagcguucugcgggugggaacgcuuaccucugacgaucugcucacacuggcugccgaccuugagaagcugaaauccaaggucauucgcaccgaaagaccccucagcucuggcguguauauggggaaccuguccacacagcaacuggagcagcggcgcgcccuccugaauaugaucggaaugguuggcggggcucagggaacccagccuggcagagauggcgugguccgggugugggacgugaaaaacccggaucuucugaauaaccaauucgggacaaugcccagccucacccuggccugucuuacgaagcagggacaggucgaccugaaugaugcuguucucgcccugaccgaccugggccucauuuacacagcgaaguauccuaacucuuccgaccuggaucgccuuagccaaucccaucccauccugaauaugguggacaccaaaaagucuagccucaacauuuccggguacaauuuuagccugggagccgcugugaaagccggcgcuugcaugcuugaugggggaaacaugcuggagacaaucaaggucaccccucagacgauggacggcauccucaaaucuauucugaaggugaaaaagucccugggcauguucguuagcgauacacccggggaaagaaauccuuaugagaacauccucuacaagauuugucugucuggagacggcuggccguauaucgccagccggaccuccauuguggggcgcgcgugggaaaacacaaucgucgaucuugagucugacggaaaaccccagaaggugggcaccgccgggagcaauaaaucccugcagagcgcuggauuuccuaccggccucacauacucucaacugaugacgcugaaggauuccaugaugcagcuugaccccagcgccaaaaccuggauugauaucgagggcagaccugaagaccccguugagaucgcucucuaccagccgaugucugggugcuauauucacuucuuucgggaaccuacagaccugaagcaguucaagcaagaugccaaauacucccauggaaucgacguggccgaucuguuucccgcucagccuggccucaccagcgcggucauugaggcccugcccagaaacauggugcuuacaugucagggguccgacgauaucaagcgccugcucgacucucagggacggagagauauuaaacugaucgacaucgcucugagcaaggccgauucccgccgguucgaaaaugccgucugggaccaaugcaaagaucuuugucacaugcauaccggcgugguuguggagaagaagaaaagagggggcaaggaggaaauuacgccccacugcgcucucauggacuguaucauguaugaugccgcggucucuggaggccugaacauuccugugcugcgcgcuguucucccgcgggacaugguguuuagaacaagcucccccaaagucgugcugugaggacuagucccuguucccagagcccacuuuuuuuucuuuuuuugaaauaaaauagccugucuuucagaucuaaaaaaaaaaaaaaaaaaaaaaaaaaaaaaaaaaaaaaaaaaaaaaaaaaaaaaaaaaaaaaaaaaaaaaaaaaaaaaaaaaaaaaaaaaaaaaaaaaaa

SEQ ID NO: 18397 - RNA, 2021 nt, Artificial Sequence
  mRNA product Design a-1 (A100) comprising derived and/or modified sequence from LASV(Nig08-04;Clade II)__ADU56611__SP-HsPLAT_NP(2-569) (opt5)
aggagagucccgcagucggcguccagcggcucugcuuguucgugugugugucguugcaggccuuauucaagcuuaccauggacgccaugaagagaggccugugcugugugcuccugcuuugcggggcugucuucguuagccccagcgccuccaaggaggugaaaucuuuccuguggacccagagccucagacgggaacuguccggcuacugcucuaacaucaaacuucaagucguuaaggacgcucaggcccugcuccacgggcuggauuuuagcgagguguccaaugugcagcgccuuaugagaaagcagaaacgggacgauggagaccugaagcgccucagagaucugaaccaagcggucaauaaccugguggaacucaagucuacccagcagaaaagcguucugcgggugggcacgcuuaccuccgacgaucugcucacacuggcugccgaccuugagaagcugaaaagcaaggucauucgcaccgaaagaccccucucuuccgggguguauaugggaaaucugagcacacagcaacuggagcagcggaaagcccuccugucuaugaucggcaugguugggggagcucagggcacccagccuggccgcgaugggguggucagagugugggacgugaagaacccggaucuucugaauaaccaauucggaacaaugcccucccucacccuggccugucuuacgaagcagggccaggucgaccugaaugaugcuguucucgcccugaccgaccuggggcucauuuacacagcgaaauauccuaacagcucugaccuggaucggcuuucccaaagccaucccauccugaauaugguggacaccaagaaauccucucucaacauuagcggauacaauuuuucccugggcgccgcugugaaggccggggcuugcaugcuugauggaggcaacaugcuggagacaaucaaagucaccccucagacgauggacggcauccucaagagcauucugaaagugaagcgcucucuggggauguucguuuccgauacacccggagaaagaaauccuuaugagaacauccucuacaagauuugucugagcggcgacggguggccguauaucgccucucggaccagcauugugggacgcgcgugggaaaacacaaccgucgaucuugaguccgacggcaaaccccagaagguggggaccgccggaucuaauaaaagccugcaguccgcuggcuuuccuacaggccucacguacagccaacugaugacccugaaggauucuaugaugcagcuugaccccuccgccaaaacauggaucgauauugaggggagaccugaagaccccguugagaucgcucucuaccagccgaugagcggaugcuauauccacuucuuucgggaaccuaccgaccugaagcaguucaagcaagaugccaaauacucucauggcauugacgugacagaucuguuuuccgcccagcccgggcucaccagcgcugucaucgaggcgcugccuagaaacauggugcuuacgugucagggauccgacgauauuaagaaacugcucgacucucagggccgccgggauaucaagcugauugacaucagccugaauaaagccgauuccagacgcuucgaaaacgcugucugggaccaaugcaaggaucuuugucacaugcauacaggggugguuguggagaagaaaaagcggggcggaaaagaggaaaucacaccccacugcgcccucauggacuguauuauguuugaugccgcugucucuggcgggcugaauauccccauucugagagccgugcucccucgcgacaugguuuuccggaccagcuccccgaaggugguccugugaggacuagucccuguucccagagcccacuuuuuuuucuuuuuuugaaauaaaauagccugucuuucagaucuaaaaaaaaaaaaaaaaaaaaaaaaaaaaaaaaaaaaaaaaaaaaaaaaaaaaaaaaaaaaaaaaaaaaaaaaaaaaaaaaaaaaaaaaaaaaaaaaaaaa

SEQ ID NO: 18398 - RNA, 2024 nt, Artificial Sequence
  mRNA product Design a-1 (A100) comprising derived and/or modified sequence from LASV(GA391;Clade III)__AAA46284__SP-HsPLAT_NP(2-570) (opt5)
aggagagucccgcagucggcguccagcggcucugcuuguucgugugugugucguugcaggccuuauucaagcuuaccauggacgccaugaagagaggccugugcugugugcuccugcuuugcggggcugucuucguuagccccagcgccuccaaggaggugagaucuugccuguggacccagagccuccggcgcgaacuguccggcuacuguucuaacaucaaacuucaagucguuaaggacgcucaggcccugcuccacgggcuggauuucagcgagguguccaaugugcagagacuuaugcggaaacagaagcgcgacgauggagaccugaaaagacuccgggaucugaaccaagcggucaauaaccugguggaacucaagucuacacagcagaaaagcguucugcgcgugggcacgcuuuccagcgacgaucugcucauucuggcugccgaccuugagaaacugaagucuaaagucaccagaacagaacggccccucuccagcgggguguauaugggaaaucugucuucccagcaacuggaucagcgcagagcccuccugaacaugaucggcaugaccgggguuagcggaggcggcaagggggcuucuaauggaauugugcgggucugggacgugaaaaacgccgagcuucugaauaaccaguuuggcacaaugccuucccucacccuggcuugccuuacaaagcaggggcaaguggaucugaaugacgccguccaggcgcucaccgaucugggacugaucuacacggccaaguauccgaacagcuccgaccucgaccgccugucucagagccaucccauucuuaauaugaucgauaccaaaaaguccagccugaacaucucuggcuacaauuucucccucggggcugccguuaaagcuggagccuguaugcuggacggcggcaacaugcuugagacaauuaaggugagcccucaaaccauggaugggauccugaaaucuauucucaaggugaaaaagagccugggaauguuugucuccgacacacccggcgaaagaaacccuuaugagaauauccuguacaagauuugccucucuggggauggauggagcuauaucgcgucccggaccagcauugugggccgcgccugggaaaacacgguuguggaccuggagcaggauaauaaaccccagaagaucgggaacggaggcucuaauaaaucccuucagagcgcuggcuucgccgcugggcugaucuacucucaacucaugacacugaaggacuuuaaauguuucaaccugauuccuaaugccaagaccuggauggauaucgagggaagaccggaagaccccgucgagauugcccuuuaccagccuuccagcggcugcuaugugcacuuuuuccgggaacccacagaucucaagcaguuuaaacaggacgcuaaguacucccaugggagagacguuaccgaucuguucgcggcccaaccuggacugaccucugcugugaucgaggcccucccccgcaacauggucauuacaugucagggcagcgaagacauccggaaacugcuugagucccaggggagacgcgauaucaagcugauugacaucacgcucucuaaagccgauagccggaaguuugagaaugcugugugggaccaguucaaggaucugugccacaugcauaccggcgucgugguugaaaagaagaaaagaggaggcaaggaggaaauuacaccgcacugugcccugauggacugcaucauguuugaugcggcuguguccgggggacuugacgccaaaguccuccgcgugguucugccucgggauaugguguucagaaccagcacacccaaggucgugcugugaggacuagucccuguucccagagcccacuuuuuuuucuuuuuuugaaauaaaauagccugucuuucagaucuaaaaaaaaaaaaaaaaaaaaaaaaaaaaaaaaaaaaaaaaaaaaaaaaaaaaaaaaaaaaaaaaaaaaaaaaaaaaaaaaaaaaaaaaaaaaaaaaaaaa

SEQ ID NO: 18399 - RNA, 2021 nt, Artificial Sequence
  mRNA product Design a-1 (A100) comprising derived and/or modified sequence from LASV(Nig08-A19;Clade III)__ADU56619__SP-HsPLAT_NP(2-569) (opt5)
aggagagucccgcagucggcguccagcggcucugcuuguucgugugugugucguugcaggccuuauucaagcuuaccauggacgccaugaagagaggccugugcugugugcuccugcuuugcggggcugucuucguuagccccagcgccuccaaggaggugaaaucuuuccuguggacccagagccucagacgggaacuguccggcuacugcucuaacaucaaacuucaagucguuaaggacgcucaggcccugcuccacgggcuggauuuuagcgagguguccaaugugcagcgccuuaugagaaagcagaaacgggacgauggagaccugaagcgccucagagaucugaaccaagcggucaauaaccugguggaacucaagucuacacagcagaaaagcguucugcgggugggcacgcuuuccagcgacgaucugcucguccuggcugccgaccuugagaagcugaaaucuaaggugguucgcaccgaaagaccccucuccagcgggauuuauaugggaaaucugucuucccagcaacuggaucagcggaaagcccuccugaacaugaucggcaugacagggggaaauggcggccgcaacaccacaagcgacgggauugugagagucugggaugugaagaaugcugagcuucugaacaaucaguucggaaccaugccuucucucacacuggccugucuuaccaagcagggccaaguggaccugaacgaugcuguccaggcccucacggaccuggggcugaucuacaccgcgaaauaucccaauuccagcgaccucgaucggcuggcccagucccauccgauucuuaacaugaucgacacaaagaaaucuagccugaauaucuccggauacaacuuuagccucggcgcugccguuaaggcuggggccugcaugcuggauggaggcaacaugcuugagaccauuaaagugucuccucaaacaauggacggcauccugaaguccauucucaaagugaagcgcagccuggggauguucaucucugauacccccggagaaagaaauccuuaugagaacauucuguacaagaucugucucagcggcgacggguggcccuauauugcgucccggacgucuaucgucggacgcgccugggaaaauacagugguugaucuggagagcgacaacaaaccucagaagaccggcaaugggggauccaacaaaagccuucagucugcuggcuuugccgcuggccugacauacucccagcucaugacccugaaggauagcaugcugcaacuugacccgaaugccaaaaccuggauggauaucgaggggagacccgaagacccuguggagauugcccucuaccagcccucuuccggaugcuauauccacuucuuucgggaaccuacagaccugaagcaguucaagcaggaugcuaaauacagccauggcauugacgucacggaucuguuugcggcccaacccgggcucaccuccgcugugaucgaggcccugccgagaaacaugguuauuacaugucagggaucugaagacauccgcaaacuucuggagagccagggccggagagauaucaagcucauugacaucucccugucuaagguggauagccgcaaauucgagaaugccgucugggaccaguuuaaggaucugugccacaugcauaccgggauuguggucgaaaagaaaaagcggggcggaaaagaggaaaucacaccucacugugcucuuauggacugcauuauguucgaugccgcgguguccggcgggguugacgcuaaggugcucagagccguccugccccgcgauaugguguuucggaccagcacgccuaaaguugugcugugaggacuagucccuguucccagagcccacuuuuuuuucuuuuuuugaaauaaaauagccugucuuucagaucuaaaaaaaaaaaaaaaaaaaaaaaaaaaaaaaaaaaaaaaaaaaaaaaaaaaaaaaaaaaaaaaaaaaaaaaaaaaaaaaaaaaaaaaaaaaaaaaaaaaa

SEQ ID NO: 18400 - RNA, 2021 nt, Artificial Sequence
  mRNA product Design a-1 (A100) comprising derived and/or modified sequence from LASV(G1180-SLE-2010;Clade IV)__AIT17169__SP-HsPLAT_NP(2-569) (opt5)
aggagagucccgcagucggcguccagcggcucugcuuguucgugugugugucguugcaggccuuauucaagcuuaccauggacgccaugaagagaggccugugcugugugcuccugcuuugcggggcugucuucguuagccccagcgccuccaaggagaucaaaucuuuccuguggacccagagccucagacgggaacuguccggcuacugcucuaacauuaagcugcaaguggucaaagacgcucaggcccugcuccacgggcuggauuuuagcgagguuuccaaugugcagcgccuuaugagaaaggaacggcgcgacgauaacgaccugaaaagacuccgggaucugaaucaggcggugaacaaucuggucgagcucaagucuacacaacaaaagagcauccugcgcgugggaacgcuuaccuccgacgaucugcucauucuggcugccgaccuugaaaaacuuaagagcaaaguuaucagaacagagcggccccucucugccggcguguauauggggaaccuguccagccagcagcuggaucagcgcagagcucuccugucuaugauuggaauguccagcggcaaucagcgggcccaggcugggcgcgacggagucgugagaguuugggaugugaagaacgucgagcuucugaauaaccaguucggcaccaugccuucucucacacuggccugucuuaccaaacaaggccagguggaccugaaugaugcggugcaggcccucacagaccuggggcugaucuacaccgcuaaguauccgaacacguccgaccucgaucggcugacccaaagccaucccauccuuaauaugauugacacaaagaaauccucucugaacaucagcggauacaauuuuucccucggcgccgcugucaaggccggggcgugcaugcuggauggaggcaacaugcuugaaaccauuaaaguuagcccucagacaauggacgggauccugaagucuauucucaaagugaagaaagcccugggaauguucaucuccgauacccccggcgagcgcaacccuuaugaaaauauucuguacaagaucugucucagcggcgacggguggcccuauaucgcuucuagaacgagcauuacaggacgggccugggagaacaccguggucgaucuggaguccgacggcaagccucagaaagcugggucuaauaacagcaauaagucccuucagagcgugggauuuacagccggccugaccuacucucaacucaugacccugaaagaugccaugcugcagcuugacccgaacgcuaagacauggauggauaucgaagggagacccgaggacccuguugaaauugcgcucuaccagcccuccagcggaugcuauauccacuucuuucgcgagccuacggaccugaaacaguucaagcaagaugccaaguacucucauggcauugacgugaccgaucuguuugcugcccagcccggccucacauccgccgucaucgacgcucugccgcggaauauggugaucaccugucaggggagcgaugacauuagaaaacuucuggaaucccagggacgcaaggauaucaaacucauugacaucgcccugucuaagacagauagccggaaauaugagaacgcgguuugggaccaauacaaggaucugugccacaugcauaccggcguggucguggagaagaaaaagagagggggaaaagaagagauuacgccucacugugcucuuauggacugcaucauguucgaugccgccgucuccggcgggcucaauacaucugugcugcgcgcuguucugccccgggacaugguguuuagaaccagcaccccucgcgucgugcucugaggacuagucccuguucccagagcccacuuuuuuuucuuuuuuugaaauaaaauagccugucuuucagaucuaaaaaaaaaaaaaaaaaaaaaaaaaaaaaaaaaaaaaaaaaaaaaaaaaaaaaaaaaaaaaaaaaaaaaaaaaaaaaaaaaaaaaaaaaaaaaaaaaaaa

SEQ ID NO: 18401 - RNA, 2021 nt, Artificial Sequence
  mRNA product Design a-1 (A100) comprising derived and/or modified sequence from LASV(G1442-SLE-2011;Clade IV)__AIT17181__SP-HsPLAT_NP(2-569) (opt5)
aggagagucccgcagucggcguccagcggcucugcuuguucgugugugugucguugcaggccuuauucaagcuuaccauggacgccaugaagagaggccugugcugugugcuccugcuuugcggggcugucuucguuagccccagcgccuccaaggaggugaaaucuuuccuguggacccagagccucagacgggaacuguccggcuacugcucuaacaucaaacuucaagucguuaaggacgcucaggcccugcuccacgggcuggauuuuagcgagguguccaaugugcagcgccuuaugagaaagcagcggcgcgacgauaacgaccugaaaagacuccgggaucugaaucaagcggucaacaaucugguggaacucaagucuacacagcaaaagagcguucugcgcgugggaacgcuuaccuccgacgaucugcucguccuggcugccgaccuugagaaacuuaagagcaaagugauuagaacagaacggccccucucugccggcguuuauauggggaaccuguccagccagcagcuggaucagcgcagagcucuccugaauaugaucggaaugucuggcgggauucagggaacccggacaggccgcgacggcguggucagagugugggaugugaagaacgccgaccuucugaauaaccaguucgggaccaugccuucccucacacuggcuugucuuaccaaacaaggacaggucgaucugaaugacguugugcaggcccucacggaccugggccugaucuacaccgcgaaguauccgaacgccagcgaucucgaccggcugacacaaucucaucccauucuuaauaugaucgauaccaagaaauccagccugaacaucuccggguacaauuuuucucucggagcugccgugaaggcuggcgccugcaugcuggacgggggaaacaugcuugagacaauuaaagucagcccucagaccauggauggcauccugaaguccauucucaaagugaagaaaacgcugggcauguucaucagcgacacacccggggagcgcaacccuuaugaaaauauucuguacaagaucugucucucuggagauggcuggcccuauauugcguccagaaccagcaucacagggcgggccugggagaacaccguuguggaccuggaaucugauggaaagccucagaaagcuggcagcaauaacuccaauaagucucuucagagcgccggguuugcugccggacugaccuacucccaacucaugacacugaaagacgccaugcugcagcuugauccgaacgcuaagacguggauggacaucgagggcagacccgaggacccugucgaaauugcgcucuaccagcccagcucuggcugcuauauccacuucuuucgcgagccuaccgaucugaaacaguucaagcaagacgccaaguacucccaugggauugaugugacagaccuguuugcugcccagcccggacucaccagcgccguuaucgaagcucugccgcggaauauggugauuacaugucagggcucugaugacaucaaaaagcugcuggagucccaggggagaaaagauaucaagcucauugacaucgcccugagcaaaaccgauucccgcaaguaugaaaacgcggucugggaccaauacaaggaucugugccacaugcauacgggaguggucguggagaaaaagaaacggggcgggaaggaggaaauuacaccucacugugcucuuauggacugcaucauguucgaugccgccguuucuggcggacucaauacccuggugcugagagcuguccucccccgcgacaugguguuucggaccagcacaccuagaguugugcugugaggacuagucccuguucccagagcccacuuuuuuuucuuuuuuugaaauaaaauagccugucuuucagaucuaaaaaaaaaaaaaaaaaaaaaaaaaaaaaaaaaaaaaaaaaaaaaaaaaaaaaaaaaaaaaaaaaaaaaaaaaaaaaaaaaaaaaaaaaaaaaaaaaaaa

SEQ ID NO: 18402 - RNA, 2021 nt, Artificial Sequence
  mRNA product Design a-1 (A100) comprising derived and/or modified sequence from LASV(G3010-SLE-2013;Clade IV)__AIT17345__SP-HsPLAT_NP(2-569) (opt5)
aggagagucccgcagucggcguccagcggcucugcuuguucgugugugugucguugcaggccuuauucaagcuuaccauggacgccaugaagagaggccugugcugugugcuccugcuuugcggggcugucuucguuagccccagcgccuccaaggagaucaaaucuuuccuguggacccagagccucagacgggaacuguccggcuacugcucuaacauuaaacuucaaguggucaaagacgcucaggcccugcuccacgggcuggauuuuagcgagguuuccaaugugcagcgccuuaugagaaaggaacggcgcgacgauaacgaccugaaaagacuccgggaucugaaucaggcggugaacaaucuggucgagcucaagucuacacaacaaaagagcauccugcgcgugggaacgcuuaccuccgacgaucugcucauucuggcugccgaccuugaaaaacuuaagagcaaaguuacaagaaccgagcggccccucucugccggcguguauauggggaaccuguccagccagcagcuggaucagcgcagagcucuccugucuaugaucggaauguccagcggcguccagggggcccgggcuggacgcgacggcgugguuagagugugggaugucaagaaugccgagcuucugaacaaucaguucggcacaaugccuucucucacccuggcgugucuuacaaaacaggggcaaguggaccugaacgaugugguccaggcccucaccgaccugggacugauuuacacggcuaaguauccgaauaccuccgaccucgaucggcugacacagagccaucccauccuuaacaugaucgacaccaagaaauccucucugaauauuagcggcuacaacuuuucccucggggccgcuguuaaggccggagcgugcaugcuggauggcgggaauaugcuugaaacaaucaaagugagcccucaaaccauggacggcauucugaagucuauccucaaagugaagaaagcccugggaauguucauuuccgagacgcccggcgaacgcaacccuuaugagaacauccuguacaagauuugucucagcggggauggauggcccuauaucgcuucuagaacaagcaucaccggccgggccugggagaauacagucguggaccuggaauccgaugggaagccucagaaagcuggaucuaacaauagcaacaagucccuucagagcgccggcuuuaccgccgggcugaccuacucucagcucaugacacugaaagacgcuaugcugcaacuugauccgaaugcgaagacguggauggacauugagggaagacccgaagauccuguugagguggcccucuaccagcccuccagcggcugcuauauccacuucuuucgcgaaccuaccgaccugaaacaguucaagcaggacgcuaaguacucucauggcauugaugucacagaccuguuugccgcccaacccgggcucaccuccgcugugaucgaugcccugccgcggaacaugguuauuacaugucagggaagcgacgauaucaaaaagcugcuggagucccagggcagaaaagacaucaagcucauugauaucgcgcugucuaaaaccgacagccgcaaguaugagaaugcugugugggaucaguacaaggaccugugccacaugcauacgggggucguggucgaaaagaagaaacggggaggcaaggaggaaauuacaccucacugugcccuuauggauugcaucauguucgacgccgcuguguccgggggccucaacaccucuguucugagagccgugcugccccgcgauauggucuuucggaccagcacaccuagagugguucucugaggacuagucccuguucccagagcccacuuuuuuuucuuuuuuugaaauaaaauagccugucuuucagaucuaaaaaaaaaaaaaaaaaaaaaaaaaaaaaaaaaaaaaaaaaaaaaaaaaaaaaaaaaaaaaaaaaaaaaaaaaaaaaaaaaaaaaaaaaaaaaaaaaaaa

SEQ ID NO: 18403 - RNA, 2021 nt, Artificial Sequence
  mRNA product Design a-1 (A100) comprising derived and/or modified sequence from LASV(G502-SLE-2009;Clade IV)__AIT17127__SP-HsPLAT_NP(2-569) (opt5)
aggagagucccgcagucggcguccagcggcucugcuuguucgugugugugucguugcaggccuuauucaagcuuaccauggacgccaugaagagaggccugugcugugugcuccugcuuugcggggcugucuucguuagccccagcgccuccaaggagaucaaaucuuuccuguggacccagagccucagacgggaacuguccggcuacugcucuaacauuaagcugcaaguggucaaagacgcucaggcccugcuccacgggcuggauuuuagcgagguuuccaaugugcagcgccuuaugagaaaggaacggcgcgacgauaacgaccugaaaagacuccgggaucugaaucaggcggugaacaaucuggucgagcucaagucuacacaacaaaagagcauccugcgcgugggaacgcuuaccuccgacgaucugcucauucuggcugccgaccuugaaaaacuuaagagcaaaguuaucagaacagagcggccccucucugccggcguguauauggggaaccuguccagccagcagcuggaucagcgcagagcucuccugucuaugauuggaauguccggcgggaaucagggaguccgggccggcaaggacggcgugguucgcgugugggaugucaaaaacgcugagcuucugaauaaccaguucgggaccaugccuagccucacacuggccugucuuaccaagcagggacaaguggaccugaaugaugcggugcaggcccucacagaccugggccugaucuacaccgcuaaguauccgaacacgucugaccucgauagacugacccagucccaucccauccuuaauaugauugacaccaaaaagagcucccugaacaucucuggguacaauuuuagccucggagccgcugucaaagccggcgcgugcaugcuggaugggggaaacaugcuugaaacaauuaagguuuccccucaaacaauggacggcauccugaaaagcauucucaaggugaaaaaggcccugggcauguucaucucugauacccccggggagcggaacccuuaugaaaauauucuguacaagaucugucucuccggagacggcuggcccuauaucgcuagccgcacgucuauuacagggagagccugggagaacaccguggucgaucuggagagcgacggaaaaccucagaaggcuggcuccaauaacucuaauaaaagccuucaguccgccggguuuacagccggacugaccuacagccagcucaugacccugaaggaugcuaugcugcaacuugacccgaacacaaaaacguggauggauaucgaaggccggcccgaggacccuguggaaauugcgcucuaccagcccucuuccggcugcuauauccacuucuuuagagagccuaccgaccugaagcaguucaagcaggaugccaaauacagccaugggauugacguuacagaucuguuugcugcccaacccggacucaccucugccgugaucgacgcucugccgcgcaauauggucaucacaugucagggcuccgaugacauucggaaacuucuggaaagccaggggagaaaggauaucaagcucauugacaucgcccugaacaaaaccgauucccgcaaguaugagaaugcggugugggaccaguacaaggaucugugccacaugcauacgggaguuguggucgagaaaaagaaacggggcgggaaggaagagauuacaccucacugugcucuuauggacugcaucauguucgaugccgccgugucuggcggacucaacaccagcguccugagagcugugcugccccgcgacaugguuuuucggaccuccacaccuagagugguccucugaggacuagucccuguucccagagcccacuuuuuuuucuuuuuuugaaauaaaauagccugucuuucagaucuaaaaaaaaaaaaaaaaaaaaaaaaaaaaaaaaaaaaaaaaaaaaaaaaaaaaaaaaaaaaaaaaaaaaaaaaaaaaaaaaaaaaaaaaaaaaaaaaaaaa

SEQ ID NO: 18404 - RNA, 2021 nt, Artificial Sequence
  mRNA product Design a-1 (A100) comprising derived and/or modified sequence from LASV(G733-SLE-2010;Clade IV)__AIT17155__SP-HsPLAT_NP(2-569) (opt5)
aggagagucccgcagucggcguccagcggcucugcuuguucgugugugugucguugcaggccuuauucaagcuuaccauggacgccaugaagagaggccugugcugugugcuccugcuuugcggggcugucuucguuagccccagcgccuccaaggagaucaaaucuuuccuguggacccagagccucagacgggaacuguccggcuacugcucuaacauuaagcugcaaguggucaaagacgcucaggcccugcuccacgggcuggauuuuagcgagguuuccaaugugcagcgccuuaugagaaaggaacggcgcgacgauaacgaccugaaaagacuccgggaucugaaucaggcggugaacaaucuggucgagcucaagucuacacaacaaaagagcgugcugcgcguuggaacgcuuaccuccgacgaacugcucgugcuggcugccgaucuugagaaacuuaagagcaaagucaucagaacagagcggccccucucugccggcguguauauggggaaccuguccagccagcagcuggaccagcgcagagcucuccugucuaugauuggaauguccggcgggaaucagggagcccggaccggccgcgauggcguugugagagucugggacgugaagaacgcugaacuucugaauaaccaguucgggacaaugccuagccucacccuggccugucuuacaaaacagggacaaguggaucugaaugacgcgguccaggcccucaccgaucugggccugaucuacacggcuaaguauccgaacaccucugaccucgaccggcugacacagucccaucccauucuuaauaugaucgauaccaagaaaagcucccugaacaucucuggguacaauuuuagccucggagccgcuguuaaggccggcgcgugcaugcuggacgggggaaacaugcuugagacaauuaaaguguccccucaaaccauggauggcauccucaagagcauucugaaagugaagaaagcccugggcauguucaucucugacacgcccggggaacgcaacccuuaugagaauauucuguacaagaucugucucuccggagauggcuggcccuauauugcuagcagaacaucuaucaccgggcgggccugggagaacacagucguggaccuggaaagcgauggaaagccucagaaagcuggcuccaauaacucuaauaagagccuucaguccgccggguuuaccgccggacugaccuacagccagcucaugacacugaaagacgcuaugcugcaacuugauccgaacgcgaagacguggauggacaucgagggcagacccgaagauccuguugagauugcccucuaccagcccucuuccggcugcuauauccacuucuuucgcgaaccuaccgaccugaaacaguucaagcaggacgcuaaguacagccaugggauugaugugacagaccuguuugccgcccaacccggacucaccucugcugucaucgaugcccugccgcggaauauggugauuacaugucagggcuccgacgauaucagaaaacuucuggagagccaggggcgcaaggacaucaaacucauugauaucgcgcuguccaagauugacucucggaaauaugagaacgcuguuugggaucaguacaaggaccugugccacaugcauaccggaguggucguggaaaagaaaaagagaggcgggaaagaggaaaucacgccucacugugcccuuauggauugcauuauguucgacgccgcugucagcggcggacucaauucccuggugcugcgcgccguucucccccgggauaugguguuuagaacaucuaccccucgcgucgugcugugaggacuagucccuguucccagagcccacuuuuuuuucuuuuuuugaaauaaaauagccugucuuucagaucuaaaaaaaaaaaaaaaaaaaaaaaaaaaaaaaaaaaaaaaaaaaaaaaaaaaaaaaaaaaaaaaaaaaaaaaaaaaaaaaaaaaaaaaaaaaaaaaaaaaa

SEQ ID NO: 18405 - RNA, 2021 nt, Artificial Sequence
  mRNA product Design a-1 (A100) comprising derived and/or modified sequence from MOPV/LASV reassortant(IGS-1;Clade IV)__AFY05578__SP-HsPLAT_NP(2-569) (opt5)
aggagagucccgcagucggcguccagcggcucugcuuguucgugugugugucguugcaggccuuauucaagcuuaccauggacgccaugaagagaggccugugcugugugcuccugcuuugcggggcugucuucguuagccccagcgccuccaaggagaucaaaucuuuccuguggacccagagccucagacgggaacuguccggcuacugcucuaacauuaaacuucaaguggucaaggacgcucaggcccugcuccacgggcuggauuuuagcgagguuuccaaugugcagcgccuuaugagaaaggaacggcgcgacgauaacgaccugaaaagacuccgggaucugaaucaggcggugaacaaucuggucgagcucaagucuacacaacaaaagagcauccugcgcgugggaacgcuuaccuccgacgaucugcucauucuggcugccgaccuugaaaaacugagaagcaagguuauccggacagagcgcccccucucugccggcguguauauggggaaccuguccagccagcagcuggaucagagacgggcucuccugaauaugauuggaaugucuggcgggaaccagggagcccgcgcuggcagagacggcgucgugcggguuugggaugugaaaaaugccgagcuucuguccaaccaguucgggaccaugccuagccucacacuggcgugucuuaccaagcagggacaagucgaccugaaugaugccgugcaggcucucacagaccugggccugaucuacaccgccaaauauccgaacacgucugaccucgaucgccugacccagucccaucccauccuuaauaugauugacacaaagaaaagcucccugaacaucucuggguacaauuuuagccucggagcugccgugaaggcgggcgccugcaugcuggaugggggaaacaugcuugaaaccauuaaggucuccccucaaacaauggacggcauccugaaaagcauucucaagguuaaaaaggcucugggcauguucaucucugauacccccggggagagaaacccuuaugaaaauauucuguacaaaaucugucucuccggagacggcuggcccuauaucgccagccggacgucuauuacagggagagcuugggagaacaccgugguggaucuggagagcgacggaaagccucagaaggccgauuccaauaacucuagcaaaucccuucagagcgccggcuuuacagcugggcugaccuacucucagcucaugacccugaaggacgcgaugcugcaacuugauccgaaugccaaaacauggauggacaucgaaggacgccccgaggacccugucgaaauugcucucuaccagcccuccagcggcugcuauauccacuucuuucgggagccuacggaucugaagcaguucaaacaggacgccaaguacucucauggcauugaugugaccgaccuguuugccacacaacccgggcucaccuccgcuguuaucgaugcccugccgagaaacauggugaucacaugucagggaagcgacgauauucgcaaacuucuggaaucccagggccggaaggacaucaagcucauugauaucgaccugucuaaaaccgauagcagaaaguaugagaaugcggucugggaccaguacaaagaucugugccacaugcauacgggggugguuguggagaagaagaaacgcggaggcaaggaagagauuacaccucacugugcucuuauggacugcaucauguucgacgccgccgucuccgggggccucaacaccucugugcugcgggcuguccugcccagagauaugguguuucgcaccagcacaccucggguugugcucugaggacuagucccuguucccagagcccacuuuuuuuucuuuuuuugaaauaaaauagccugucuuucagaucuaaaaaaaaaaaaaaaaaaaaaaaaaaaaaaaaaaaaaaaaaaaaaaaaaaaaaaaaaaaaaaaaaaaaaaaaaaaaaaaaaaaaaaaaaaaaaaaaaaaa

SEQ ID NO: 18406 - RNA, 2021 nt, Artificial Sequence
  mRNA product Design a-1 (A100) comprising derived and/or modified sequence from LASV(LM765-SLE-2012;Clade IV)__AIT17815__SP-HsPLAT_NP(2-569) (opt5)
aggagagucccgcagucggcguccagcggcucugcuuguucgugugugugucguugcaggccuuauucaagcuuaccauggacgccaugaagagaggccugugcugugugcuccugcuuugcggggcugucuucguuagccccagcgccuccaaggagaucaaaucuuuccuguggacccagagccucagacgggaacuguccggcuacugcucuaacauuaagcugcaaguggucaaagacgcucaggcccugcuccacgggcuggauuuuagcgagguuuccaaugugcagcgccuuaugagaaaggaacggcgcgacgauaacgaccugaaaagacuccgggaucugaaucaggcggugaacaaucuggucgagcucaagucuacacaacaaaagagcauccugcgcgugggaacgcuuaccuccgacgaucugcucauucuggcugccgaccuugaaaaacuuaagagcaaaguuacaagaaccgagcggccccucucugccggcguguauauggggaaccuguccagccagcagcuggaucagcgcagagcucuccuggacaugaucggaaugucuggcuccaaucagggggcccgggcuggacgcgauggcgucgugagaguuugggacgugaagaacgccgagcuucugaauaaccaguucggcacaaugccuagccucacccuggcgugucuuacaaaacaggggcaagucgaucugaaugacgccgugcaggcucucaccgaccugggacugauuuacacggccaaguauccgaacaccucugaucucgaccggcugacacagucccaucccauccuuaauaugaucgauaccaagaaaagcucccugaacauuucuggcuacaauuuuagccucggggcugccgugaaggcgggagccugcaugcuggacggcgggaacaugcuugaaacaaucaaagucuccccucaaaccauggauggcauucucaagagcauccugaaaguuaagaaagcucugggaauguucauuucugacgcccccggcgagcgcaacccuuaugaaaauauccuguacaagauuugucucuccggggauggauggcccuauaucgcuagcagaacgucuaucacaggccgggccugggagaacaccgugguggaccuggagagcgaugggaagccucagaaagccggauccaauggcucuaacaagagccuucaguccgcuggguuuacagcgggacugaccuacagccagcucaugacccugaaagacgccaugcugcaacuugauccgaaugcuaagacauggauggacauugaaggcagacccgaggacccugucgaaaucgcccucuaccagcccucuuccggcugcuauauucacuucuuucgcgagccuacggaucugaaacaguucaagcaggacgccaaguacagccaugggaucgaugugaccgaccuguuugcugcccaacccggacucacaucugcgguuauugaugcucugccgcggaacauggugaucaccugucagggcuccgacgauaucagaaaacuuuucgaaagccaggggcgcaaggacauuaaacugaucgauauugcccucuccaagacagacucucggaaauaugagaaugccgucugggaucaguacaaggaccugugccacaugcauaccggaaucgugguugagaagaaaaagagaggcgggaaagaagagauuacgccucacugugcucugauggauugcaucauguuugacgccgcugugagcggcggacuuaacacauccguccuccgcgccgugcugccccgggacauggucuucagaaccucuaccccucgcgugguucugugaggacuagucccuguucccagagcccacuuuuuuuucuuuuuuugaaauaaaauagccugucuuucagaucuaaaaaaaaaaaaaaaaaaaaaaaaaaaaaaaaaaaaaaaaaaaaaaaaaaaaaaaaaaaaaaaaaaaaaaaaaaaaaaaaaaaaaaaaaaaaaaaaaaaa

SEQ ID NO: 18407 - RNA, 2021 nt, Artificial Sequence
  mRNA product Design a-1 (A100) comprising derived and/or modified sequence from LASV(LM776-SLE-2012;Clade IV)__AIT17825__SP-HsPLAT_NP(2-569) (opt5)
aggagagucccgcagucggcguccagcggcucugcuuguucgugugugugucguugcaggccuuauucaagcuuaccauggacgccaugaagagaggccugugcugugugcuccugcuuugcggggcugucuucguuagccccagcgccuccaaggagaucaaaucuuuccuguggacccagagccucagacgggaacuguccucuuacugcagcaacauuaaacuucaaguggucaaggacgcucaggcccugcuccacggccuggauuuuuccgagguuucuaaugugcagcgccuuaugagaaaggaacggcgcgacgauaacgaccugaaaagacuccgggaucugaaucaggcggugaacaaucuggucgagcucaagagcacacaacagaaguccauccugcgcguggggacgcuuaccagcgacgaucugcucauucuggcugccgaccuugaaaaacugaagucuaaaguuacaagaaccgagcggccccucuccgccggaguguauaugggcaaccugagcucucagcagcuggaucaacgcagagcucuccuguccaugaucgggaugagcggaucuaaucagggcgcccgggcugggcgcgacggagucgugagaguuugggaugugaagaacgccgagcuucugaauaaccaguucggcacaaugccuucccucacccuggcgugucuuacaaaacagggccaagucgaccugaaugaugccgugcaggcucucaccgaccuggggcugauuuacacggccaaguauccgaacaccagcgaccucgaucggcugacacagucccaucccauccuuaauaugaucgacaccaagaaaucuagccugaacauuuccggauacaauuuuagccucggcgcugccgugaaggcgggggccugcaugcuggauggaggcaacaugcuugaaacaaucaaagucucuccucaaaccauggacgggauucugaaguccauccucaaaguuaagaaagcucugggaauguucauuagcgauacgcccggcgagcgcaacccuuaugaaaauauccuguacaagauuugucucucuggcgacggguggcccuauaucgccagcagaacauccaucaccggacgggcuugggagaacacagugguggaucuggagucugacggcaagccucagaaagccgggagcaauaacuccaauaagagccuucagucugccggauuuaccgcuggccugaccuacucccagcucaugacacugaaagaugcgaugcugcaacuugacccgaacgccaagacguggauggauauugaagggagacccgaggacccugucgaaguggcucucuaccagcccagcucuggaugcuauauccacuucuuucgcgagccuaccgaccugaaacaguucaagcaggaugccaaguacucccauggcauugacguuacagaucuguuugccgcucaacccggccucaccagcgccgugaucgacgcgcugccgcggaauauggucauuacaugucagggguccgaugacaucagaaaacuucuggaaucucagggacgcaaggauaucaaacucauugacaucgcucugagcaagaccgauucccggaaauaugagaacgccgugugggaccaguacaaggaucugugccacaugcauacgggcguuguggucgagaagaaaaagagagggggaaaagaagagauuacaccucacugugcccuuauggacugcaucauguucgaugcugccgugucuggcgggcucaauaccagcguccugcgcgcugugcugccccgggacaugguuuuuagaaccuccacaccucgcgugguccucugaggacuagucccuguucccagagcccacuuuuuuuucuuuuuuugaaauaaaauagccugucuuucagaucuaaaaaaaaaaaaaaaaaaaaaaaaaaaaaaaaaaaaaaaaaaaaaaaaaaaaaaaaaaaaaaaaaaaaaaaaaaaaaaaaaaaaaaaaaaaaaaaaaaaa

SEQ ID NO: 18408 - RNA, 2021 nt, Artificial Sequence
  mRNA product Design a-1 (A100) comprising derived and/or modified sequence from LASV(Mad39;Clade IV)__ANH09723__SP-HsPLAT_NP(2-569) (opt5)
aggagagucccgcagucggcguccagcggcucugcuuguucgugugugugucguugcaggccuuauucaagcuuaccauggacgccaugaagagaggccugugcugugugcuccugcuuugcggggcugucuucguuagccccagcgccuccaaggagaucaaaucuuuccuguggacccagagccucagacgggaacuguccggcuacugcucuaacauuaagcugcaaguggucaaagacgcucaggcccugcuccacgggcuggauuuuagcgagguuuccaaugugcagcgccuuaugagaaagcagcggcgcgacgauaacgaccugaaaagacuccgggaucugaaucaagcggugaacaaucuggucgaacucaagucuacacagcaaaagagcgugcugcgcguuggaacgcuuaccuccgacgaucugcucacacuggcugccgaccuugagaaacuuaagagcaaagugaccagaacagaacggccccucaccgccggcgucuauauggggaaccugucuucccagcagcuggaucagcgcagagcucuccugaauaugaucggaaugagcggcgggaaccagggagcccggacaggccgcgacggcgugguuagagugugggaugucaagaaugcugagcuucugaacaaucaguucgggaccaugccuucucucacgcuggccugucuuaccaaacaaggacagguggaccugaacgaugugguccaggcgcucacagaccugggccugauuuacaccgccaaguauccgaauacauccgaccucgaucggcugacccaaagccaucccauccuuaacaugauugacacgaauaagucuucccugaacaucagcggguacaacuuuucccucggagcugccguuaaagcuggcgccugcaugcuggaugggggaaauaugcuugagacaaucaaggugucuccucagaccauggacggcauucugaaaagcauccucaaggugaaaaagucccugggcauguucauuagcgauacacccggggaacgcaacccuuaugagaauauccuguacaaaauuugucucucuggagacggcuggcccuauaucgcguccagaaccagcauuaccgggcgggccugggaaaacacagucguggaucuggagucuggaggcaagccucagaaggcugggagcaauaacuccaauaaaucucuucagagcgccggauuugcugccggccugacguacucccaacucaugacccugaaggacgccaugcugcagcuugauccgaacgcuaaaacauggauggacaucgagggcagacccgaagauccuguugagaucgcgcucuaccagcccauuagcgggugcuauauccacuucuuucgcgaaccuaccgaccugaagcaguucaaacaagacgccaaguacucucauggaauugaugugacagaccuguuugcugcccagcccggccucaccuccgccgucaucgaggcucugccgcggaauauggugauuacgugucaggggagcgaugacaucagaaaacuuuucgaaucucagggacgcaaggauaucaagcugauugacaucgcccucuccaaaacagauagccggaaguaugagaacgcgguuugggaccaauacaaagaucugugccacaugcauaccggcguggucguggagaagaagaaaaagggcgggaaagaagagauuaccccucacugugcucugauggacugcaucauguuugaugccgccgucuccggaggccuuaauacacucgugcugagagcuguucugccccgcgacaugguguuccggaccucuacaccuaaggucgugcucugaggacuagucccuguucccagagcccacuuuuuuuucuuuuuuugaaauaaaauagccugucuuucagaucuaaaaaaaaaaaaaaaaaaaaaaaaaaaaaaaaaaaaaaaaaaaaaaaaaaaaaaaaaaaaaaaaaaaaaaaaaaaaaaaaaaaaaaaaaaaaaaaaaaaa

SEQ ID NO: 18409 - RNA, 2021 nt, Artificial Sequence
  mRNA product Design a-1 (A100) comprising derived and/or modified sequence from LASV(Z0947-SLE-2011;Clade IV)__AIT17841__SP-HsPLAT_NP(2-569) (opt5)
aggagagucccgcagucggcguccagcggcucugcuuguucgugugugugucguugcaggccuuauucaagcuuaccauggacgccaugaagagaggccugugcugugugcuccugcuuugcggggcugucuucguuagccccagcgccuccaaggagaucaaaucuuuccuguggacccagagccucagacgggaacuguccggcuacugcucuaacauuaagcugcaaguggucaaagacgcucaggcccugcuccacgggcuggauuuuagcgagguuuccaaugugcagcgccuuaugagaaaggaacggcgcgacgauaacgaccugaaaagacuccgggaucugaaucaggcggugaacaaucuggucgagcucaagucuacacaacaaaagagcauccugcgcgugggaacgcuuaccuccgacgaucugcucauucuggcugccgaccuugaaaaacuuaagagcaaaguuacaagaaccgagcggccccucucugccggcguguauauggggaaccuguccagccagcagcuggaucagcgcagagcucuccugaauaugaucggaaugucuggcuccaaccagggggcccggacaggacgcgacggcgucgugagaguuugggaugugaagaaugcugagcuucugaacaaucaguucggcaccaugccuagccucacacuggccugucuuaccaaacaggggcaagucgaccugaacgaugcggugcaggcccucacggaccugggacugauuuacaccgcuaaguauccgaauacaucugaccucgaucggcugacccagucccaucccauccuuaacaugaucgacacaaagaaaagcucccugaauauuucuggcuacaacuuuagccucggggccgcugugaaggccggagcgugcaugcuggauggcgggaacaugcuugaaaccaucaaagucuccccucaaacgauggacggcauucucaagagcauccugaaaguuaagaaagcccugggaauguucauuucugaugcucccggcgagcgcaauccuuaugaaaacauccuguacaagauuugucucuccggggacggauggcccuauaucgccagcagaacaucuaucaccggccgggcuugggagaauacagugguggaucuggagagcgacgggaagccucagaaagccggauccaacggcucuaauaagagccuucaguccgccggguuuaccgcuggacugaccuacagccagcucaugacacugaaagaugcgaugcugcaacuugacccgaacgccaagacguggauggauauugaaggcagacccgaggacccugucgaaaucgcucucuaccagcccucuuccggcugcuauauucacuucuuucgcgagccuaccgaccugaaacaguucaagcaggaugccaaguacagccaugggaucgacgugacagaucuguuugccgcucaacccggacucaccucugccguuauugacgcgcugccgcggaauauggugaucacaugucagggcuccgaugacaucagaaaacuuuucgaaagccaggggcgcaaggauauuaaacugaucgacauugcucucuccaagaccgauucucggaaauaugagaacgccgucugggaccaguacaaggaucugugccacaugcauacgggaaucgugguugagaagaaaaagagaggcgggaaagaagagauuacaccucacugugcccugauggacugcaucauguuugaugcugccgugagcggcggacuuaauaccuccguccuccgcgcugugcugccccgggacauggucuucagaaccucuacaccucgcgugguucugugaggacuagucccuguucccagagcccacuuuuuuuucuuuuuuugaaauaaaauagccugucuuucagaucuaaaaaaaaaaaaaaaaaaaaaaaaaaaaaaaaaaaaaaaaaaaaaaaaaaaaaaaaaaaaaaaaaaaaaaaaaaaaaaaaaaaaaaaaaaaaaaaaaaaa

SEQ ID NO: 18410 - RNA, 2033 nt, Artificial Sequence
  mRNA product Design a-2 (hSL-A64-N5) comprising derived and/or modified sequence from LASV(Josiah;Clade IV)__NP_694869__SP-HsPLAT_NP(2-569) (opt1)
aggagaguccgcucagccagguugcagaagcggcuuagcguguguccuaaucuucucucugcguguagguaggccugugccgcaaacaagcuuaccauggacgccaugaagcgcggccugugcugcgugcuccugcugugcggggccgucuucgugagccccagcgccuccaaggagaucaagagcuuccuguggacccagucccuccgccgggagcugagcggcuacugcuccaacaucaagcuccagguggucaaggacgcccaggcgcugcugcacgggcuggacuucagcgagguguccaacgugcagcgccucaugcggaaggagcgccgggacgacaacgaccugaagcgccugcgggaccucaaccaggccgucaacaaccugguggagcucaagagcacccagcagaaguccauccugcgcgugggcacccugaccagcgacgaccugcucauccuggccgccgaccuggagaagcucaaguccaaggucauccggaccgagcgcccccugagcgccgggguguacaugggcaaccuguccagccagcagcucgaccagcggcgcgcgcugcugaacaugaucgggauguccggcggcaaccagggggcccgggccggccgcgacggggugguccgggugugggacgugaagaacgccgagcuccugaacaaccaguucggcaccaugccgagccugacgcucgcgugccugaccaagcaggggcaggucgaccugaacgacgccgugcaggcccucaccgaccugggccugaucuacaccgccaaguaccccaacacguccgaccucgaccgccugacccagagccaccccauccugaacaugaucgacaccaagaaguccagccucaacaucagcggcuacaacuucucccugggggccgcggugaaggccggcgccugcaugcuggacgggggcaacaugcucgagaccaucaaggucagcccccagacgauggacggcauccugaaguccauccugaaggugaagaaggcccucgggauguucaucagcgacaccccgggcgagcggaaccccuacgagaacauccuguacaagaucugccuguccggggacggcuggcccuacaucgccagccgcaccuccaucaccgggcgggcgugggagaacacgguggucgaccucgagagcgacggcaagccccagaaggccgacuccaacaacagcuccaagagccugcaguccgccggcuucaccgccgggcugaccuacagccagcucaugacccugaaggacgccaugcugcagcuggacccgaacgcgaagacguggauggacaucgagggccgccccgaggaccccguggagaucgcccucuaccagcccuccagcgggugcuacauccacuucuuccgggagccgaccgaccugaagcaguucaagcaggacgccaaguacucccacggcaucgacgugaccgaccuguucgccacccagcccgggcucacgagcgccgucaucgacgcgcugccccgcaacauggugaucacgugccagggcuccgacgacauccgcaagcugcucgagagccagggccggaaggacaucaagcugaucgacaucgcccugagcaagaccgacucccgcaaguacgagaacgccgugugggaccaguacaaggaccucugccacaugcacaccggggucguggucgagaagaagaagcggggcgggaaggaggagaucaccccgcacugcgcccugauggacugcaucauguucgacgcggccgugagcggcgggcugaacaccuccgugcuccgcgccguccugccccgggacaugguguuccgcaccagcacgccccgggugguccugugaggacuagucccuguucccagagcccacuuuuuuuucuuuuuuugaaauaaaauagccugucuuucagaucucaaaggcucuuuucagagccaccaaaaaaaaaaaaaaaaaaaaaaaaaaaaaaaaaaaaaaaaaaaaaaaaaaaaaaaaaaaaaaaaagaauu

SEQ ID NO: 18411 - RNA, 2033 nt, Artificial Sequence
  mRNA product Design a-2 (hSL-A64-N5) comprising derived and/or modified sequence from LASV(LP;Clade I)__AAF86702__SP-HsPLAT_NP(2-569) (opt1)
aggagaguccgcucagccagguugcagaagcggcuuagcguguguccuaaucuucucucugcguguagguaggccugugccgcaaacaagcuuaccauggacgccaugaagcgcggccugugcugcgugcuccugcugugcggggccgucuucgugagccccagcaacuccaaggagaucaagagcuuccuguggacccagucccuccgccgggagcugagcggcuacugcuccaacaucaagcuccagguggucaaggacgcccaggcccugcugcacgggcuggacuucagcgagguguccaacgugcagcgccucaugcggaagcagaagcgcgacgacgcggaccugaagcggcugcgcgaccucaaccaggccgucaacaaccugguggagcucaagagcacccagcagaagaacgugcugcgggucggcacgcuguccagcgacgaccugaucacccucgccgccgaccuggagaagcugaaguccaaggugauccgcaccgagcggccccucagcuccgggguguacaugggcaaccugagcucccagcagcuggaccagcgccgggcccuccugagcaugaucgggauguccggcggcccgcaggggaaccgcaccggcggggacggcgucgugcgggugugggacgucaagaacgcggagcugcucaacaaccaguucgggacgaugcccagccugacccuggccugccucaccaagcagggccagguggaccugaacgacgccgugcaggcccugaccgaccucggccugaucuacacggcgaaguaccccaacuccagcgaccuggacaugcucacccagagccaccccauccuggggauggucgacaccaagaaguccagccugaacaucuccggcuacaacuucagccucggggccgccgugaaggccggcgccugcaugcuggacggcgggaacaugcuggagaccaucaagguguccccgcagacgauggacggcauccucaagagcauccugaaggucaagcgcucccuggggauguucaucagcgacacccccggcgagcggaaccccuacgagaacauccucuacaagaucugccuguccggggagggcuggcccuacaucgcgagccgcaccuccaucaccggccgggccugggagaacacgcugguggaccucgagagcgacaacaagccgcccaagcugaacuccgccgggagcaacaagucccugcaggccgccggccucaacgcggggcugaccuacagccagcugaugacccugaaggacugcaugcuccagcuggaccccuccagcaagaccuggaucgacaucgagggccgccccgaggacccgguggagaucgcccuguuccagcccuccagcgggugcuacauccacuucuuccgggagcccacggaccucaagcaguucaagcaggacgccaaguacagccacggcaucgacgucaccgaccuguucuccacccagcccggccugaccagcgccgugaucgaggcccucccgcgcaacauggugcugacgugccagggguccgacgacaucaagaagcugcucgagagccagggccggcgcgacaucaagcugaucgacaucucccugagcaaggcggacucccgcaaguucgagaacgccgucugggaccaguacaaggaccucugccacaugcacaccgggguggucguggagaagaagaagcggggcgggaaggaggagaucacgccccacugcgcccugcuggacugcaucauguucgacgccgccaccaccggcagccucaacaucaccacccugcgcgcggugcugccccgggacauggucuuccgcaccuccacgcccaagguggugcucugaggacuagucccuguucccagagcccacuuuuuuuucuuuuuuugaaauaaaauagccugucuuucagaucucaaaggcucuuuucagagccaccaaaaaaaaaaaaaaaaaaaaaaaaaaaaaaaaaaaaaaaaaaaaaaaaaaaaaaaaaaaaaaaaagaauu

SEQ ID NO: 18412 - RNA, 2033 nt, Artificial Sequence
  mRNA product Design a-2 (hSL-A64-N5) comprising derived and/or modified sequence from LASV(803213;Clade II)__AAF86704__SP-HsPLAT_NP(2-569) (opt1)
aggagaguccgcucagccagguugcagaagcggcuuagcguguguccuaaucuucucucugcguguagguaggccugugccgcaaacaagcuuaccauggacgccaugaagcgcggccugugcugcgugcuccugcugugcggggccgucuucgugagccccagcgccuccaaggaggugaaguccuuccuguggacccagagccuccgccgggagcugagcggcuacugcuccaacaucaagcugcaggucgugaaggacgcccaggcgcuccugcacgggcuggacuucagcgaggugaacaacguccagcgccucaugcggaagcagaagcgcgacgacggcgaccugaagcggcugcgcgaccucaaccaggccgugaacaaccugguggagcugaaguccacccagcagaaguccauccuccgggucgggacgcugaccagcgacgaccugcucacccuggccgccgaccuggagaagcucaagagcaaggugauccgcaccgagcggccccuguccagcggcguguacauggggaaccuguccacgcagcagcucgagcagcgccgggcccugcugaacaugaucggcauggucggcggggcgcagggcacccagccggggcgcgacggcguggugcgggucugggacgugaagaaccccgaccuccugaacaaccaguucgggaccaugcccagccugacccucgccugccugacgaagcagggccagguggaccugaacgacgccguccucgcccugaccgaccugggccucaucuacaccgcgaaguaccccaacuccagcgaccuggaccgccugucccagagccacccgauccucaacaugguggacaccaagaaguccagccugaacaucagcggguacaacuucucccugggcgccgccgugaaggccggggccugcaugcucgacggcggcaacaugcuggagacgaucaaggucacgccccagaccauggacgggauccucaagagcauccugaaggugaagcggucccugggcauguucgugagcgacacccccggggagcgcaaccccuacgagaacauccuguacaagaucugccucuccggcgacggguggccguacaucgcgagccggaccuccaucgucggccgcgccugggagaacaccaccguggaccuggagagcgacggcaagccccagaagguggggaccgccggcuccaacaagagccugcaguccgccggguuccccacgggccucaccuacagccagcugaugacccugaaggacuccaugaugcagcuggaccccagcgccaagaccuggaucgacaucgaggggcggccggaggaccccgucgagaucgcgcucuaccagcccauguccggcugcuacauccacuucuuccgcgagcccacggaccugaagcaguucaagcaggacgccaaguacagccacggcaucgacguggccgaccuguucccggcccagcccgggcucaccuccgccgucaucgaggcgcugccccggaacauggugcugaccugccagggcagcgacgacaucaagaagcuccuggacucccaggggcgccgcgacaucaagcugaucgacaucagccucagcaagguggacucccggaaguucgagaacgccgucugggaccagugcaaggaccugugccacaugcacaccggcgugguggucgagaagaagaagcgcgggggcaaggaggagaucacgccccacugcgcccugauggacugcaucauguucgacgccgccgugagcggcgggcucaacaucccggugcugcgggcgguccugccccgcgacaugguguuccggaccuccagccccaaggugguccucugaggacuagucccuguucccagagcccacuuuuuuuucuuuuuuugaaauaaaauagccugucuuucagaucucaaaggcucuuuucagagccaccaaaaaaaaaaaaaaaaaaaaaaaaaaaaaaaaaaaaaaaaaaaaaaaaaaaaaaaaaaaaaaaaagaauu

SEQ ID NO: 18413 - RNA, 2036 nt, Artificial Sequence
  mRNA product Design a-2 (hSL-A64-N5) comprising derived and/or modified sequence from LASV(GA391;Clade III)__CAA36646__SP-HsPLAT_NP(2-570) (opt1)
aggagaguccgcucagccagguugcagaagcggcuuagcguguguccuaaucuucucucugcguguagguaggccugugccgcaaacaagcuuaccauggacgccaugaagcgcggccugugcugcgugcuccugcugugcggggccgucuucgugagccccagcgccuccaaggaggugcgcagcuuccuguggacccagucccuccggcgcgagcugagcggcuacugcuccaacaucaagcugcaggucgugaaggacgcccaggcgcuccugcacgggcuggacuucagcgagguguccaacguccagcggcucaugcgcaagcagaagcgggacgacggcgaccugaagcgccugcgggaccucaaccaggccgugaacaaccugguggagcucaagagcacccagcagaaguccguccugcgcguggggacccugagcuccgacgaccugcucauccuggccgccgaccuggagaagcucaagagcaaggugacccggaccgagcgcccccuguccagcggcgucuacauggggaaccuguccagccagcagcucgaccagcggcgcgcccugcugaacaugaucggcaugaccggcguguccgggggcgggaagggcgcgagcgacgggaucgugcgggucugggacgugaagaacgccgagcuccugaacaaccaguucggcacgaugccgucccugacccucgccugccugaccaagcagggccagguggaccugaacgacgccguccaggcgcucaccgaccuggggcugaucuacacggccaaguaccccaacagcagcgaccucgaccgccugucccagagccaccccauccugaacaugaucgacaccaagaaguccagccucaacaucuccggcuacaacuucagccugggggccgccgugaaggccggcgcgugcaugcuggacggcgggaacaugcucgagaccaucaaggugagcccccagaccauggacggcauccucaaguccauccugaaggucaagaagucccuggggauguucgugagcgacacgccgggcgagcggaaccccuacgagaacauccuguacaagaucugccuguccggggacggcuggcccuacaucgccagccgcaccuccaucgugggccgggccugggagaacaccgucguggaccucgagcaggacaacaagccccagaagaucgggaacggcgggagcaacaagucccugcagagcgccggcuucgccgcggggcugaccuacucccagcucaugacgcugaaggacuucaagugcuucaaccugaucccgaacgccaagaccuggauggacaucgagggccgccccgaggaccccguggagaucgcccuguaccagcccagcuccggcugcuacguccacuucuuccgggagccgaccgaccucaagcaguucaagcaggacgccaaguacagccacgggaucgacgugaccgaccuguucgccgcgcagcccggccugacgagcgccgucaucgaggcccucccccgcaacauggugaucacgugccagggguccgaggacauccggaagcugcuggagagccagggccgccgcgacaucaagcucaucgacaucacccuguccaaggccgacagccggaaguucgagaacgccgugugggaccaguucaaggaccugugccacaugcacaccggggucgugguggagaagaagaagcgcggcggcaaggaggagaucacgccccacugcgcgcucauggacugcaucauguucgacgccgccgucuccgggggccuggacgccaaggugcugcgggugguccucccgcgcgacaugguguuccggaccagcacccccaaggugguccugugaggacuagucccuguucccagagcccacuuuuuuuucuuuuuuugaaauaaaauagccugucuuucagaucucaaaggcucuuuucagagccaccaaaaaaaaaaaaaaaaaaaaaaaaaaaaaaaaaaaaaaaaaaaaaaaaaaaaaaaaaaaaaaaaagaauu

SEQ ID NO: 18414 - RNA, 2033 nt, Artificial Sequence
  mRNA product Design a-2 (hSL-A64-N5) comprising derived and/or modified sequence from LASV(AV;Clade V)__CCA30315__SP-HsPLAT_NP(2-569) (opt1)
aggagaguccgcucagccagguugcagaagcggcuuagcguguguccuaaucuucucucugcguguagguaggccugugccgcaaacaagcuuaccauggacgccaugaagcgcggccugugcugcgugcuccugcugugcggggccgucuucgugagccccagcgccuccaaggaggugaaguccuuccuguggacccagagccuccgccgggagcugagcggcuacugcuccaacaucaagcugcaggucgugaaggacgcccaggcgcuccugcacgggcuggacuucagcgagguguccaacguccagcgccucaugcggaagcagcgccgggacgacagcgaccugaagcgccugcgggaccucaaccaggccgugaacaaccugguggagcugaaguccacccagcagaaguccguccuccgcgugggcacgcugagcagcgacgaccugcucacccuggccgccgaccuggagaagcucaaguccaaggugacccggaccgagcgcccccugagcuccggggucuacaugggcaaccugagcucccagcagcucgaccagcggcgcgcccugcugaaccucaucgggaugacgaacggcagccagggcucccaggcggggcgggacggcguggugcgcgucugggacgugaagaacgccgagcugcugaacaaccaguucgggaccaugccgagccucacccuggccugccugaccaagcagggccagguggaccucaacgacgucgugcaggcccugacggaccuggggcucaucuacaccgcgaaguaccccaacaccagcgaccuggaccggcugacccagucccaccccauccucaacaugaucgacacgaagaaguccagccugaacaucagcggcuacaacuucucccugggcgccgccgugaaggccggggccugcaugcucgacggcgggaacaugcuggagaccaucaaggucagcccccaguccauggacggcauccucaagagcauccugaaggugaagcgcgcgcugggcauguucguguccgacaccccgggggagcggaaccccuacgagaacauccuguacaagaucugccucagcggcgacggguggcccuacaucgccucccgcaccagcaucgucggccgggccugggagaacacggugguggaccuggagaccgacgggaagccccagaagaucggcuccggcaacagcaacaagucccugcagagcgccggguucuccgccggccucaccuacagccagcugaugacccugaaggacgcgaugcugcagcucgacccgaacgccaagacguggauggacaucgaggggcgccccgaggaccccgucgagguggcccuguaccagcccaucuccggcugcuacauccacuucuuccgggagccgaccgaccugaagcaguucaagcaggacgccaaguacagccacgggaucgacaucgccgaccucuucgcggcccagcccggccugaccagcgccgucaucgaggcccugccccgcaacauggugaucacgugccagggcuccgaggacaucaagaagcuccuggagagccaggggcgcaaggacaucaagcugaucgacaucgcccucuccaagaucgacagccggaaguucgagaacgcggugugggaccaguacaaggaccugugccacaugcacaccggcgucgugguggagaagaagaagcgcgggggcaaggaggagaucaccccgcacugcgcccugauggacugcaucauguucgacgccgccgucuccgggggccucaacacccuggugcugcgggcggugcucccccgcgacauggucuuccggaccagcacgccccgcguggugcugugaggacuagucccuguucccagagcccacuuuuuuuucuuuuuuugaaauaaaauagccugucuuucagaucucaaaggcucuuuucagagccaccaaaaaaaaaaaaaaaaaaaaaaaaaaaaaaaaaaaaaaaaaaaaaaaaaaaaaaaaaaaaaaaaagaauu

SEQ ID NO: 18415 - RNA, 2033 nt, Artificial Sequence
  mRNA product Design a-2 (hSL-A64-N5) comprising derived and/or modified sequence from LASV(Togo/2016/7082;Clade VI)__AMR44578__SP-HsPLAT_NP(2-569) (opt1)
aggagaguccgcucagccagguugcagaagcggcuuagcguguguccuaaucuucucucugcguguagguaggccugugccgcaaacaagcuuaccauggacgccaugaagcgcggccugugcugcgugcuccugcugugcggggccgucuucgugagccccagcaacuccaaggaggugaaguccuuccuguggacccagagccuccgccgggagcugagcggcuacugcuccaacaucaagcugcaggucgugaaggacgcccaggcccuccugcacgggcuggacuucagcgagguguccaacguccagcgccucaugcggaagcagaagcgcgacgacggcgaccugaagcggcugcgcgaccucaaccaggcggugaacaaccugguggagcucaagagcguccagcagaaguccauccugcggguggggacccugaccagcgacgaccugcucacccuggccgccgaccuggagaagcucaaguccaaggugacccgcaccgagcggccccugagcuccggcgucuacauggggaaccugagcucccagcagcucgaccagcgccgggcccugcugagcaugaucggcauguccggcgggaaccagaacagccagccgaagggcgacgggguggugcgcgucugggacgugaagaacgccgaccuccugaacaaccaguucggcacgaugcccucccugacccucgcgugccugaccaagcagggccagguggaccugaacgacgccguccaggcccucaccgaccuggggcugaucuacacggccaaguaccccaacagcagcgaccucgaccggcugucccagagccaccccauccugaacaugaucgacaccaagaaguccagccucaacaucuccggcuacaacuucagccugggggcggccaucaagaccggcgccugcaugcuggacgggggcaacaugcucgagaccaucaaggugacgccgcagaccauggacggcauccugaaguccauccugaaggugaagcgcagccucgggauguucaucuccgacacccccggcgagcggaaccccuacgagaacauccuguacaagaucugccugagcggggacggcuggcccuacaucgccucccgcaccgccaucaucgggcgggcgugggagaacacggucguggaccucgagagcgacuccaagccgcagaagaucggcagcaacggcuccaacaagagccugcaguccgccggguucgcccccggccugaccuacagccagcucaugacccugaaggacuccaugcugcagcuggaccccaacgccaagaccuggaucgacaucgaggggcgccccgaggacccgguggaggucgcccucuuccagcccaucagcggcugcuacauccacuucuuccgggagcccacggaccugaagcaguucaagcaggacgcgaaguacagccacgggaucgacgugaccgaccuguucgccgcccagcccggccucaccuccgccgugaucgaggcccugccgcgcaacaugguccugaccugccagggcagcgacgacaucaagaagcuccuggacucccaggggcggcgcgacaucaagcugaucgacgugagccucaacaagaucgacucccgcaaguucgagaacgcggucugggaccaguacaaggaccugugccacaugcacacgggcgugguggucgagaagaagaagaagggcgggaaggaggagaucacgccccacugcgcccugcucgacugcaucauguucgacgccgccgugagcgggggccugaacgccaccgugcugcgggcgguccucccccgcgacaugguguuccggaccuccagccccaaggugguccugugaggacuagucccuguucccagagcccacuuuuuuuucuuuuuuugaaauaaaauagccugucuuucagaucucaaaggcucuuuucagagccaccaaaaaaaaaaaaaaaaaaaaaaaaaaaaaaaaaaaaaaaaaaaaaaaaaaaaaaaaaaaaaaaaagaauu

SEQ ID NO: 18416 - RNA, 2033 nt, Artificial Sequence
  mRNA product Design a-2 (hSL-A64-N5) comprising derived and/or modified sequence from LASV(KAK-428;Clade n.d. (VII))__ANH09741__SP-HsPLAT_NP(2-569) (opt1)
aggagaguccgcucagccagguugcagaagcggcuuagcguguguccuaaucuucucucugcguguagguaggccugugccgcaaacaagcuuaccauggacgccaugaagcgcggccugugcugcgugcuccugcugugcggggccgucuucgugagccccagcaacuccaaggaggugaaguccuuccuguggacccagagccuccgccgggagcugagcggcuacugcaccaacaucaagcugcaggucgugaaggacgcccaggcccuccugcacgggcuggacuucuccgaggugagcaacguccagcgccucaugcggaagcagaagcgcgacgacaacgaccugaagcggcugcgcgaccucaaccaggcggugaacaaccugguggagcugaaguccguccagcagaaguccgugcucaaggugggcacgcugaacagcgacgaccugcucacccuggccgccgaccuggagaagcucaagagcaaggucgugcggaccgagcgcccccuguccagcgggguguacaugggcaaccuguccagccagcagcucgaccagcggcgcgcccugcugaacaugaucgggauggccggcggcucccaggggaaccagccgagccgggacggcgucgugcgcgugugggacgucaagaacgcggaccuccugaacaaccaguucgggaccaugcccucccugacgcucgccugccugaccaagcagggccagguggaccugaacgacgugguccucgcccugaccgaccuggggcucaucuacaccgccaaguaccccaacagcuccgaccuggaccggcugagccagaaccaccccgugcucaacaugaucgacgugaacaagagcucccugaacaucagcggcuacaacuucucccugggcgcggccgucaaggccggggccugcaugcucgacggcgggaacaugcuggagacgaucaagaucagcccgcagaccguggacggcauccugaaguccauccucaaggugaagcgcgcccugggcauguucgucagcgacacccccggggagcggaaccccuacgagaacauccuguacaaggugugccucuccggcaacggguggcccuacaucgcgagccgcaccuccaucgucggccgggccugggagaacacggugguggaccuggagagcaacaagaaccagccgaaggucgggaacaacggcuccaacaagaugcugcagagcuccggcuucgccaccgggcucaccuacagccagcugaugacccugcgcgacuccaugcugcagcucgaccccacggccaagaccuggaucgacaucgagggccggcccgaggaccccguggagcuggcccuguuccagccgagcuccgggugcuacauccacuucuuccgcgagcccaccgaccucaagcaguucaagcaggacgcgaaguacagccacggcaucgacgugaacgaccuguucuccgcccagcccgggcugaccagcgccguccucgaggcccugccccggaacauggugcugacgugccagggcagcgacgacauccgcaagcuccuggacucccaggaccgcaaggacaucaagcugaucgacaucagccucuccaaggccgacgcgcggaaguucgagaacgacgugugggaccaguucaaggaccugugccacaugcacaccggcaucgucguggagaagaagaagaagggcgggaagcaggagaugaccccgcacugcgcccugcucgacugcaucauguucgacgccgccgugagcgggggccugaacguccccacccugcgcgccgugcuccccacggacaugguguuccggaccaucaccaccaaggucgugcugugaggacuagucccuguucccagagcccacuuuuuuuucuuuuuuugaaauaaaauagccugucuuucagaucucaaaggcucuuuucagagccaccaaaaaaaaaaaaaaaaaaaaaaaaaaaaaaaaaaaaaaaaaaaaaaaaaaaaaaaaaaaaaaaaagaauu

SEQ ID NO: 18417 - RNA, 2033 nt, Artificial Sequence; identical to SEQ ID NO: 18411
  mRNA product Design a-2 (hSL-A64-N5) comprising derived and/or modified sequence from LASV(Pinneo-NIG-1969;Clade I)__AIT17837__SP-HsPLAT_NP(2-569) (opt1)

SEQ ID NO: 18418 - RNA, 2033 nt, Artificial Sequence
  mRNA product Design a-2 (hSL-A64-N5) comprising derived and/or modified sequence from LASV(ISTH0009-NIG-2011;Clade II)__AIT17405__SP-HsPLAT_NP(2-569) (opt1)
aggagaguccgcucagccagguugcagaagcggcuuagcguguguccuaaucuucucucugcguguagguaggccugugccgcaaacaagcuuaccauggacgccaugaagcgcggccugugcugcgugcuccugcugugcggggccgucuucgugagccccagcguguccaaggaggucaagagcuuccuguggacccagucccuccgccgggagcugagcggcuacugcuccaacaucaagcuccagguggugaaggacgcccaggcccugcugcacgggcuggacuucagcgaggucuccaacgugcagcgccucaugcggaagcagaagcgcgacgacagcgaccugaagcggcugcgcgaccucaaccaggcggugaacaaccuggucgagcugaaguccacccagcagaaguccauccuccgggugggcacccugaccagcgacgaccugcucacccuggccgccgaccuggagaagcucaagagcaaggugauccgcaccgagcggccccuguccagcggggucuacaugggcaaccuguccacgcagcagcucgagcagcgccgggcccugcugaacaugaucgggauggugggcggcgcccaggggacccagccgggccgcgacggggugguccgggugugggacgugaagaaccccgaccuccugaacaaccaguucggcaccaugcccagccugacccucgcgugccugacgaagcaggggcaggucgaccugaacgacgccgugcucgcccugaccgaccugggccucaucuacaccgccaaguaccccaacuccagcgaccuggaccgccugucccagagccacccgauccucaacaugguggacaucaagaaguccagccugaacaucagcggcuacaacuucucccugggggcggccgucaaggccggcgccugcaugcucgacgggggcaacaugcuggagaccaucaaggugacgccccagaccauggacggcauccucaagagcauccugaaggugaagcggucccuggggauguucgucagcgacacccccggcgagcgcaaccccuacgagaacauccuguacaagaucugccucuccggggacggcuggccguacaucgccagccggaccuccaucguggggcgcgcgugggagaacacgaccguggaccuggagagcgacggcaagccccagaaggucggcuccgccgggagcaacaagucccugcagagcgccggcuuccccaccgggcucaccuacucccagcugaugacgcugaaggacagcaugaugcagcuggaccccuccgccaagaccuggaucgacaucgagggccggccggaggaccccguggagaucgcccucuaccagcccaugagcgggugcuacauccacuucuuccgcgagcccaccgaccugaagcaguucaagcaggacgcgaaguacucccacggcaucgacgucgccgaccuguucccggcccagcccggccucaccagcgccgugaucgaggcccugccccggaacauggugcugacgugccaggggagcgacgacaucaagcgccuccuggacucccagggccgccgggacaucaagcugaucgacaucgcgcucagcaaggccgacucccgccgguucgagaacgccgucugggaccagugcaaggaccugugccacaugcacaccggggugguggucgagaagaagaagcgcggcgggaaggaggagaucacgccccacugcgcccugauggacugcaucauguacgacgccgcggugagcggcggccucaacaucccggugcugcgggccguccugccccgcgacaugguguuccggaccuccagccccaaggugguccucugaggacuagucccuguucccagagcccacuuuuuuuucuuuuuuugaaauaaaauagccugucuuucagaucucaaaggcucuuuucagagccaccaaaaaaaaaaaaaaaaaaaaaaaaaaaaaaaaaaaaaaaaaaaaaaaaaaaaaaaaaaaaaaaaagaauu

SEQ ID NO: 18419 - RNA, 2033 nt, Artificial Sequence
  mRNA product Design a-2 (hSL-A64-N5) comprising derived and/or modified sequence from LASV(ISTH2010-NIG-2012;Clade II)__AIT17483__SP-HsPLAT_NP(2-569) (opt1)
aggagaguccgcucagccagguugcagaagcggcuuagcguguguccuaaucuucucucugcguguagguaggccugugccgcaaacaagcuuaccauggacgccaugaagcgcggccugugcugcgugcuccugcugugcggggccgucuucgugagccccagcgccuccaaggaggugaaguccuuccuguggacccagagccuccgccgggagcugagcggcuacugcuccaacaucaagcugcaggucgugaaggacgcccaggcgcuccugcacgggcuggacuucagcgagguguccaacguccagcgccucaugcggaagcagaagcgcgacgacagcgaccugaagcggcugcgcgaccucaaccaggccgugaacaaccugguggagcugaaguccacccagcagaaguccauccuccgggucggcacgcugaccagcgacgaccugcucacccuggccgccgaccuggagaagcucaagagcaaggugauccgcaccgagcggccccuguccagcgggguguacaugggcaaccuguccacgcagcagcucgagcagcgccgggcccugcugaaccucaucgggauggucggcggcgcgcaggggacccagccgggccgcgacgggguggugcgggucugggacgugaagaaccccgaccugcugaacaaccaguucggcaccaugcccagccucacccuggccugccugacgaagcagggccagguggaccucaacgacgccguccuggcccugaccgaccucgggcugaucuacaccgcgaaguaccccaacuccagcgaccuggaccgccucucccagagccacccgauccugaacaugguggacaccaagaaguccagccugaacaucagcggcuucaacuucucccucggggccgccgugaaggccggcgccugcaugcuggacgggggcaacaugcuggagacgaucaaggucacgccccagaccauggacggcauccucaagagcauccugaaggugaagaagucccuggggauguucgugagcgacacccccggcgagcggaaccccuacgagaacauccucuacaagaucugccuguccggggacggcuggccguacaucgcgagccgcaccuccaucgucgggcgggccugggagaacaccaccguggaccuggagagcgacggcaagccccacaaggugggcaccgccggguccaacaagagccuccaguccgccggcuuccccacggggcugaccuacagccagcugaugacccugaaggacuccaugaugcagcucgaccccagcgccaagaccuggaucgacaucgagggccgcccggaggaccccgucgagaucgcgcuguaccagcccauguccgggugcuacauccacuucuuccgggagcccacggaccugaagcaguucaagcaggacgccaaguacagccacggcaucgacguggccgaccucuucccggcccagcccggccugaccuccgccgucaucgaggcgcugccccgcaacauggugcugaccugccaggggagcgacgacaucaagcggcuccuggacagccagggccgccgcgacaucaagcucaucgacaucgcccuguccaaggccgacagccggcgcuucgagaacgccgugugggaccagugcaaggaccugugccacaugcacaccggggucgugguggagaagaagaagcggggcgggaaggaggagaucacgccccacugcgcccucauggacugcaucauguacgacgcggccgucuccggcggccugaacaucccggugcugcgcgccgugcucccccgggacauggucuuccgcaccagcucccccaagguggugcugugaggacuagucccuguucccagagcccacuuuuuuuucuuuuuuugaaauaaaauagccugucuuucagaucucaaaggcucuuuucagagccaccaaaaaaaaaaaaaaaaaaaaaaaaaaaaaaaaaaaaaaaaaaaaaaaaaaaaaaaaaaaaaaaaagaauu

SEQ ID NO: 18420 - RNA, 2033 nt, Artificial Sequence
  mRNA product Design a-2 (hSL-A64-N5) comprising derived and/or modified sequence from LASV(Lassa virus/H.sapiens-wt/NGA/2015/ISTH_0543;Clade II)__AVO03640__SP-HsPLAT_NP(2-569) (opt1)
aggagaguccgcucagccagguugcagaagcggcuuagcguguguccuaaucuucucucugcguguagguaggccugugccgcaaacaagcuuaccauggacgccaugaagcgcggccugugcugcgugcuccugcugugcggggccgucuucgugagccccagcgccuccaaggaggugaaguccuuccuguggacccagagccuccgccgggagcugagcggcuacugcuccaacaucaagcugcaggucgugaaggacgcccaggcgcuccugcacgggcuggacuucagcgagguguccaacguccagcgccucaugcggaagcagaagcgcgacgacagcgaccugaagcggcugcgcgaccucaaccaggccgugaacaaccugguggagcugaaguccacccagcagaaguccauccuccgggucggcacgcugaccagcgacgaccugcucacccuggccgccgaccuggagaagcucaagagcaaggugauccgcaccgagcggccccuguccagcgggguguacaugggcaaccuguccacgcagcagcucgagcagcgccgggcccugcugaacaugaucgggauggucggcggcgcgcaggggacccagccgggccgcgacgggguggugcgggucugggacgugaagaaccccgaccuccugaacaaccaguucggcaccaugcccagccugacccucgccugccugacgaagcagggccagguggaccugaacgacgccguccucgcccugaccgaccuggggcucaucuacaccgcgaaguaccccaacuccagcgaccuggaccgccugucccagagccacccgauccucaacaugguggacaccaagaaguccagccugaacaucagcggcuacaacuucucccugggggccgccgugaaggccggcgccugcaugcucgacgggggcaacaugcuggagacgaucaaggucacgccccagaccauggacggcauccucaagagcauccugaaggugaagaagucccuggggauguucgugagcgacacccccggcgagcggaaccccuacgagaacauccuguacaagaucugccucuccggggacggcuggccguacaucgcgagccgcaccuccaucgucgggcgggccugggagaacaccaccguggaccuggagagcgacggcaagccccagaaggugggcuccgccgggagcaacaagucccugcagagcgccggcuuccccaccgggcucacguacucccagcugaugacccugaaggacagcaugaugcagcuggaccccuccgccaagaccuggaucgacaucgagggccgcccggaggaccccgucgagaucgcgcucuaccagcccaugagcgggugcuacauccacuucuuccgggagcccaccgaccugaagcaguucaagcaggacgccaaguacucccacggcaucgacguggccgaccuguucccggcccagcccggccucacgagcgccgucaucgaggcgcugccccgcaacauggugcugaccugccaggggagcgacgacaucaagcggcuccuggacucccagggccgcaaggacaucaagcugaucgacaucgcccucagcaaggccgacucccgccgguucgagaacgccgugugggaccagugcaaggaccugugccacaugcacaccggggucgugguggagaagaagaagcgcggcgggaaggaggagaucacgccccacugcgcccugauggacugcaucauguacgacgcggccgucagcggcggccucaacaucccggugcugcgggccgugcugccccgcgacauggucuuccggaccuccagccccaagguggugcucugaggacuagucccuguucccagagcccacuuuuuuuucuuuuuuugaaauaaaauagccugucuuucagaucucaaaggcucuuuucagagccaccaaaaaaaaaaaaaaaaaaaaaaaaaaaaaaaaaaaaaaaaaaaaaaaaaaaaaaaaaaaaaaaaagaauu

SEQ ID NO: 18421 - RNA, 2033 nt, Artificial Sequence
  mRNA product Design a-2 (hSL-A64-N5) comprising derived and/or modified sequence from LASV(Lassa virus/H.sapiens-wt/NGA/2016/ISTH_0009;Clade II)__AVO03572__SP-HsPLAT_NP(2-569) (opt1)
aggagaguccgcucagccagguugcagaagcggcuuagcguguguccuaaucuucucucugcguguagguaggccugugccgcaaacaagcuuaccauggacgccaugaagcgcggccugugcugcgugcuccugcugugcggggccgucuucgugagccccagcgccuccaaggaggugaaguccuuccuguggacccagagccuccgccgggagcugagcggcuacugcuccaacaucaagcugcaggucgugaaggacgcccaggcgcuccugcacgggcuggacuucagcgagguguccaacguccagcgccucaugcggaagcagaagcgcgacgacagcgaccugaagcggcugcgcgaccucaaccaggccgugaacaaccugguggagcugaaguccacccagcagaaguccauccuccgggucggcacgcugaccagcgacgaccugcucacccuggccgccgaccuggagaagcucaagagcaaggugauccgcaccgagcggccccuguccagcgggguguacaugggcaaccuguccacgcagcagcucgagcagcgccgggcccugcugaacaugaucgggauggucggcggcgcgcaggggacccagccgggccgcgacgggguggugcgggucugggacgugaagaaccccgaccuccugaacaaccaguucggcaccaugcccagccugacccucgccugccugacgaagcagggccagguggaccugaacgacgccguccucgcccugaccgaccuggggcucaucuacaccgcgaaguaccccaacuccagcgaccuggaccgccugucccagagccacccgauccucaacaugguggacaccaagaaguccagccugaacaucagcggcuacaacuucucccugggggccgccgugaaggccggcgccugcaugcucgacgggggcaacaugcuggagacgaucaaggucacgccccagaccauggacggcauccucaagagcauccugaaggugaagaagucccuggggauguucgugagcgacacccccggcgagcggaaccccuacgagaacauccuguacaagaucugccucuccggggacggcuggccguacaucgcgagccgcaccuccaucgucgggcgggccugggagaacaccaccguggaccuggagagcgacggcaagccccagaaggugggcuccgccgggagcaacaagucccugcagagcgccggcuuccccaccgggcucacguacucccagcugaugacccugaaggacagcaugaugcagcuggaccccuccgccaagaccuggaucgacaucgagggccgcccggaggaccccgucgagaucgcgcucuaccagcccaugagcgggugcuacauccacuucuuccgggagcccaccgaccugaagcaguucaagcaggacgccaaguacucccacggcaucgacguggccgaccuguucccggcccagcccggccucacgagcgccgucaucgaggcgcugccccgcaacauggugcugaccugccaggggagcgacgacaucaagcggcuccuggacucccagggccgccgcgacaucaagcugaucgacaucgcccucagcaaggccgacucccggcgcuucgagaacgccgugugggaccagugcaaggaccugugccacaugcacaccggggucgugguggagaagaagaagcggggcgggaaggaggagaucacgccccacugcgcccugauggacugcaucauguacgacgcggccgucagcggcggccucaacaucccggugcugcgcgccgugcugccccgggacauggucuuccgcaccuccagccccaagguggugcucugaggacuagucccuguucccagagcccacuuuuuuuucuuuuuuugaaauaaaauagccugucuuucagaucucaaaggcucuuuucagagccaccaaaaaaaaaaaaaaaaaaaaaaaaaaaaaaaaaaaaaaaaaaaaaaaaaaaaaaaaaaaaaaaaagaauu

SEQ ID NO: 18422 - RNA, 2033 nt, Artificial Sequence
  mRNA product Design a-2 (hSL-A64-N5) comprising derived and/or modified sequence from LASV(Lassa virus/H.sapiens-wt/NGA/2016/ISTH_0017;Clade II)__AVO03568__SP-HsPLAT_NP(2-569) (opt1)
aggagaguccgcucagccagguugcagaagcggcuuagcguguguccuaaucuucucucugcguguagguaggccugugccgcaaacaagcuuaccauggacgccaugaagcgcggccugugcugcgugcuccugcugugcggggccgucuucgugagccccagcgccuccaaggaggugaaguccuuccuguggacccagagccuccgccgggagcugagcggcuacugcuccagcaucaagcugcaggucgugaaggacgcccaggcgcuccugcacgggcuggacuucuccgaggugagcaacguccagcgccucaugcggaagcagaagcgcgacgacuccgaccugaagcggcugcgcgaccucaaccaggccgugaacaaccugguggagcucaagagcacccagcagaaguccauccugcgggucggcacgcugaccagcgacgaccugcucacccuggccgccgaccuggagaagcucaaguccaaggugauccgcaccgagcggccccugagcuccgggguguacaugggcaaccugagcacgcagcagcucgagcagcgccgggcccugcugaacaugaucgggauggcgggcggcgcccaggggacccagccgggccgcgacggggucgugcgggugugggacgucaagaaccccgaccuccugaacaaccaguucggcaccaugcccucccugacccucgccugccugacgaagcagggccagguggaccugaacgacgccgugcucgcgcugaccgaccuggggcucaucuacaccgccaaguaccccaacagcuccgaccuggaccgccugagccagagccacccgauccucaacauggucgacaccaagaaguccagccugaacaucuccggcuacaacuucagccugggggccgccgugaaggccggcgcgugcaugcucgacgggggcaacaugcuggagacgaucaaggugacgccccagaccauggacggcauccugaaguccauccucaaggucaagcggagccuggggauguucguguccgacgcccccggcgagcgcaaccccuacgagaacauccuguacaagaucugccucagcggggacggcuggccguacaucgccucccggaccagcaucguggggcgcgccugggagaacaccaccgucgaccuggaguccgacggcaagccccagaaggugggcgccaccgggagcaacaagucccugcagagcgcgggcuuccccaccgggcucacguacucccagcugaugacccugaaggacagcaugaugcagcuggaccccuccgccaagaccuggaucgacaucgagggccggccggaggaccccguggaggucgcccucuaccagcccgugagcgggugcuacauccacuucuuccgcgagcccaccgaccugaagcaguucaagcaggacgccaaguacucccacggcaucgacgucgccgaccuguucccggcgcagcccggccucacgagcgccgugaucgaggcccugccccggaacauggugcugaccugccaggggagcgacgacaucaagaagcuccuggacucccagggccgcaaggacaucaagcugaucgacaucgcccucagcaaggccgacucccgccgguucgagaacgcggucugggaccagugcaaggaccugugccacaugcacaccggggugguggucgagaagaagaagcgcggcgggaaggaggagaucacgccccacugcgcccugauggacugcaucauguacgacgccgccgugagcggcggccucaacaucccggugcugcgggcgguccugccccgcgacaugguguuccggaccuccagccccaaggugguccucugaggacuagucccuguucccagagcccacuuuuuuuucuuuuuuugaaauaaaauagccugucuuucagaucucaaaggcucuuuucagagccaccaaaaaaaaaaaaaaaaaaaaaaaaaaaaaaaaaaaaaaaaaaaaaaaaaaaaaaaaaaaaaaaaagaauu

SEQ ID NO: 18423 - RNA, 2033 nt, Artificial Sequence
  mRNA product Design a-2 (hSL-A64-N5) comprising derived and/or modified sequence from LASV(Lassa virus/H.sapiens-wt/NGA/2018/ISTH_0959;Clade II)__AVV65100__SP-HsPLAT_NP(2-569) (opt1)
aggagaguccgcucagccagguugcagaagcggcuuagcguguguccuaaucuucucucugcguguagguaggccugugccgcaaacaagcuuaccauggacgccaugaagcgcggccugugcugcgugcuccugcugugcggggccgucuucgugagccccagcgccuccaaggaggugaaguccuuccuguggacccagagccuccgccgggagcugagcggcuacugcuccaacaucaagcugcaggucgugaaggacgcccaggcgcuccugcacgggcuggacuucagcgagguguccaacguccagcgccucaugcggaagcagaagcgcgacgacagcgaccugaagcggcugcgcgaccucaaccaggccgugaacaaccugguggagcugaaguccacccagcagaaguccauccuccgggucggcacccugaccagcgacgaccugcucacccuggccgccgaccuggagaagcucaagagcaaggugauccgcaccgagcggccccuguccagcgggguguacaugggcaaccuguccacgcagcagcucgagcagcgccgggcccugcugaaccucaucgggauggucggcggcgcgcaggggacccagccgggccgcgacgggguggugcgggucugggacgugaagaaccccgaccugcugaacaaccaguucggcaccaugcccagccucacccuggccugccugacgaagcagggccagguggaccucaacgacgucgugcuggcccugaccgaccucgggcugaucuacaccgccaaguaccccaacuccagcgaccuggaccgccucucccagagccacccgauccugaacaugguggacaccaagaaguccagccugaacaucagcggcuucaacuucucccucggggcggccgucaaggccggcgccugcaugcuggacgggggcaacaugcuggagacgaucaaggugacgccccagaccauggacggcauccucaagagcauccugaaggugaagaagucccuggggauguucgucagcgacacccccggcgagcggaaccccuacgagaacauccucuacaagaucugccuguccggggacggcuggccguacaucgccagccgcaccuccaucguggggcgggcgugggagaacaccaccguggaccuggagagcgacggcaagccccacaaggucggcaccgccggguccaacaagagccuccaguccgccggcuuccccacggggcugaccuacagccagcugaugacccugaaggacuccaugaugcagcucgaccccagcgccaagaccuggaucgacaucgagggccgcccggaggaccccguggagaucgcccuguaccagcccauguccgggugcuacauccacuucuuccgggagcccacggaccugaagcaguucaagcaggacgcgaaguacagccacggcaucgacgucgccgaccucuucccggcccagcccggccugaccuccgccgugaucgaggcccugccccgcaacauggugcugaccugccaggggagcgacgacaucaagcggcuccuggacagccagggccgcaaggacaucaagcucaucgacaucgcgcuguccaagaccgacagccgccgguucgagaacgccgucugggaccagugcaaggaccugugccacaugcacacgggggugguggucgagaagaagaagcgcggcgggaaggaggagaucacgccccacugcgcccucauggacugcaucauguacgacgccgccguguccggcggccugaacaucccggugcugcgggcgguccucccccgcgacaugguguuccggaccagcucccccaaggugguccugugaggacuagucccuguucccagagcccacuuuuuuuucuuuuuuugaaauaaaauagccugucuuucagaucucaaaggcucuuuucagagccaccaaaaaaaaaaaaaaaaaaaaaaaaaaaaaaaaaaaaaaaaaaaaaaaaaaaaaaaaaaaaaaaaagaauu

SEQ ID NO: 18424 - RNA, 2033 nt, Artificial Sequence
  mRNA product Design a-2 (hSL-A64-N5) comprising derived and/or modified sequence from LASV(LASV003-NIG-2008;Clade II)__AIT17581__SP-HsPLAT_NP(2-569) (opt1)
aggagaguccgcucagccagguugcagaagcggcuuagcguguguccuaaucuucucucugcguguagguaggccugugccgcaaacaagcuuaccauggacgccaugaagcgcggccugugcugcgugcuccugcugugcggggccgucuucgugagccccagcgccuccaaggaggugaaguccuuccuguggacccagagccuccgccgggagcugagcggcuacugcuccagcaucaagcugcaggucgugaaggacgcccaggcgcuccugcacgggcuggacuucuccgaggugagcaacguccagcgccucaugcggaagcagaagcgcgacgacuccgaccugaagcggcugcgcgaccucaaccaggccgugaacaaccugguggagcucaagagcacccagcagaaguccguccugcgggugggcacccugaccagcgacgaccugcucacccuggccgccgaccuggagaagcucaaguccaaggugauccgcaccgagcggccccugagcuccggggucuacaugggcaaccugagcgcccagcagcucgagcagcgccggacgcugcugaacaugaucgggauggugggcggcgcgcaggggacccagccgggccgcgacggggugguccgggugugggacgugaagaaccccgaccuccugaacaaccaguucggcaccaugcccucccugacccucgccugccugacgaagcaggggcaggucgaccugaacgacguggugcucgcccugaccgaccugggccucaucuacaccgccaaguaccccaacagcuccgaccuggaccgccugagccagagccacccgauccucuccauggucgacaccaagaaguccagccugaacaucagcggcuacaacuucucccugggggcggccgugaaggccggcgccugcaugcucgacgggggcaacaugcuggagacgaucaaggugacgccccagaccauggacggcauccucaagagcauccugaaggucaagaagucccuggggauguucgugagcgacacccccggcgagcggaaccccuacgagaacauccuguacaagaucugccucuccggggacggcuggccguacaucgccagccgcaccuccaucguggggcgggcgugggagaacaccaccgucgaccuggagagcgacggcaagccccagaaggugggcaccgccggguccaacaagagccugcaguccgccggcuuccccacggggcucaccuacagccagcugaugacccugaaggacuccaugaugcagcuggaccccagcgccaagaccuggaucgacaucgagggccgcccggaggaccccgucgagaucgcccucuaccagcccauguccgggugcuacauccacuucuuccgggagcccacggaccugaagcaguucaagcaggacgcgaaguacagccacggcaucgacgugaccgaccuguucccggcccagcccggccucaccagcgccgugaucgaggcccugccccgcaacaugguccugaccugccagggguccgacgacaucaagcggcuccuggacagccagggccgccgcgacaucaagcugaucgacaucgcccucuccaaggcggacagccggcgcuucgagaacgccgugugggaccagugcaaggaccugugccacaugcacacggggguggucguggagaagaagaagcggggcgggaaggaggagaucacgccccacugcgcccugauggacugcaucauguacgacgccgccguguccggcggccucaacaucccgguccugcgcgcggugcugccccgggacaugguguuccgcaccagcucccccaaggucgugcucugaggacuagucccuguucccagagcccacuuuuuuuucuuuuuuugaaauaaaauagccugucuuucagaucucaaaggcucuuuucagagccaccaaaaaaaaaaaaaaaaaaaaaaaaaaaaaaaaaaaaaaaaaaaaaaaaaaaaaaaaaaaaaaaaagaauu

SEQ ID NO: 18425 - RNA, 2033 nt, Artificial Sequence
  mRNA product Design a-2 (hSL-A64-N5) comprising derived and/or modified sequence from LASV(LASV035-NIG-2009;Clade II)__AIT17589__SP-HsPLAT_NP(2-569) (opt1)
aggagaguccgcucagccagguugcagaagcggcuuagcguguguccuaaucuucucucugcguguagguaggccugugccgcaaacaagcuuaccauggacgccaugaagcgcggccugugcugcgugcuccugcugugcggggccgucuucgugagccccagcgccuccaaggaggugaaguccuuccuguggacccagagccuccgccgggagcugagcggcuacugcuccagcaucaagcugcaggucgugaaggacgcccaggcgcuccugcacgggcuggacuucuccgaggugagcaacguccagcgccucaugcggaagcagaagcgcgacgacuccgaccugaagcggcugcgcgaccucaaccaggccgugaacaaccugguggagcucaagagcacccagcagaaguccauccugcgggucggcacgcugaccagcgacgaccugcucacccuggccgccgaccuggagaagcucaaguccaaggugauccgcaccgagcggccccugagcuccgggguguacaugggcaaccugagcgcccagcagcucgagcagcgccgggcgcugcugaacaugaucgggauggucggcggcgcccaggggacgcagccgggccgcgacgggguggugcgggucugggacgugaagaaccccgaccuccugaacaaccaguucggcaccaugcccucccugacccucgccugccugaccaagcagggccagguggaccugaacgacgccguccucgcgcugacggaccuggggcucaucuacaccgccaaguaccccaacagcuccgaccuggaccgccugagccagagccacccgauccucaacaugguggacaccaagaaguccagccugaacaucuccggcuacaacuucagccugggggccgccgugaaggccggcgcgugcaugcucgacgggggcaacaugcuggagaccaucaaggucacgccccagaccauggacggcauccugaaguccauccucaaggugaagcggagccuggggauguucguguccgacacccccggcgagcgcaaccccuacgagaacauccuguacaagaucugccucagcggggacggcuggccguacaucgccucccggaccagcaucgucgggcgcgccugggagaacacgaccguggaccuggaguccgacggcaagccccagaaggugggcaccaccgggagcaacaagucccugcagagcgccggcuuccccacggggcucaccuacucccagcugaugacccugaaggacagcaugaugcagcuggaccccuccgccaagaccuggaucgacaucgagggccggccggaggaccccgucgagaucgcgcucuaccagcccaugagcgggugcuacauccacuucuuccgcgagcccacggaccugaagcaguucaagcaggacgccaaguacucccacggcaucgacguggccgaccuguucccggcccagcccggccucaccagcgccgucaucgaggcgcugccccggaacauggugcugaccugccaggggagcgacgacaucaagaagcuccuggacucccagggccgccgcgacaucaagcugaucgacaucgcccucagcaaggccgacucccggaaguucgagaacgccgugugggaccagugcaaggaccugugccacaugcacaccggggucgugguggagaagaagaagcgcggcgggaaggaggagaucacgccccacugcgcccugauggacugcaucauguacgacgcggccgucagcggcggccucaacaucccggugcugcgggccgugcugccccgcgacauggucuuccggaccuccagccccaagguggugcucugaggacuagucccuguucccagagcccacuuuuuuuucuuuuuuugaaauaaaauagccugucuuucagaucucaaaggcucuuuucagagccaccaaaaaaaaaaaaaaaaaaaaaaaaaaaaaaaaaaaaaaaaaaaaaaaaaaaaaaaaaaaaaaaaagaauu

SEQ ID NO: 18426 - RNA, 2033 nt, Artificial Sequence
  mRNA product Design a-2 (hSL-A64-N5) comprising derived and/or modified sequence from LASV(LASV1000-NIG-2009;Clade II)__AIT17783__SP-HsPLAT_NP(2-569) (opt1)
aggagaguccgcucagccagguugcagaagcggcuuagcguguguccuaaucuucucucugcguguagguaggccugugccgcaaacaagcuuaccauggacgccaugaagcgcggccugugcugcgugcuccugcugugcggggccgucuucgugagccccagcgccuccaaggaggugaaguccuuccuguggacccagagccuccgccgggagcugagcggcuacugcuccaacaucaagcugcaggucgugaaggacgcccaggcgcuccugcacgggcuggacuucagcgagguguccaacguccagcgccucaugcggaagcagaagcgcgacgacagcgaccugaagcggcugcgcgaccucaaccaggccgugaacaaccugguggagcugaaguccacccagcagaaguccauccuccgggucggcacgcugaccagcgacgaccugcucacccuggccgccgaccuggagaagcucaagagcaaggugauccgcaccgagcggccccuguccagcgggguguacaugggcaaccuguccacgcagcagcucgagcagcgccgggcccugcugaacaugaucgggauggucggcggcgcgcaggggacccagccgggccgcgacgggguggugcgggucugggacgugaagaaccccgaccuccugaacaaccaguucggcaccaugcccagccugacccucgccugccugacgaagcagggccagguggaccugaacgacgucgugcucgcccugaccgaccuggggcucaucuacaccgccaaguaccccaacuccagcgaccuggaccgccugucccagagccacccgauccucaacaugguggacaccaagaaguccagccugaacaucagcggcuacaacuucucccugggggcggccgucaaggccggcgccugcaugcucgacgggggcaacaugcuggagacgaucaaggugacgccccagaccauggacggcauccucaagagcauccugaaggugaagaagucccuggggauguucgucagcgacacccccggcgagcggaaccccuacgagaacauccuguacaagaucugccucuccggggacggcuggccguacaucgccagccgcaccuccaucguggggcgggcgugggagaacaccaccguggaccuggagagcgacggcaagccccagaaggucggcaccgccggguccaacaagagccugcaguccgccggcuuccccacggggcucaccuacagccagcugaugacccugaaggacuccaugaugcagcuggaccccagcgccaagaccuggaucgacaucgagggccgcccggaggaccccguggagaucgcccucuaccagcccgucuccgggugcuacauccacuucuuccgggagcccacggaccugaagcaguucaagcaggacgcgaaguacagccacggcaucgacguggccgaccuguucccggcccagcccggccucaccuccgccgugaucgaggcccugccccgcaacaugguccugaccugccaggggagcgacgacaucaagcggcuccuggacagccagggccgccgcgacaucaagcugaucgacaucgcgcucuccaaggccgacagccggcgcuucgagaacgccgugugggaccagugcaaggaccugugccacaugcacaccgggguggucguggagaagaagaagcggggcgggaaggaggagaucacgccccacugcgcccugauggacugcaucauguacgacgccgcgguguccggcggccucaacaucccgguccugcgcgccgugcugccccgggacaugguguuccgcaccagcucccccaaggucgugcucugaggacuagucccuguucccagagcccacuuuuuuuucuuuuuuugaaauaaaauagccugucuuucagaucucaaaggcucuuuucagagccaccaaaaaaaaaaaaaaaaaaaaaaaaaaaaaaaaaaaaaaaaaaaaaaaaaaaaaaaaaaaaaaaaagaauu

SEQ ID NO: 18427 - RNA, 2033 nt, Artificial Sequence
  mRNA product Design a-2 (hSL-A64-N5) comprising derived and/or modified sequence from LASV(LASV221-NIG-2010;Clade II)__AIT17625__SP-HsPLAT_NP(2-569) (opt1)
aggagaguccgcucagccagguugcagaagcggcuuagcguguguccuaaucuucucucugcguguagguaggccugugccgcaaacaagcuuaccauggacgccaugaagcgcggccugugcugcgugcuccugcugugcggggccgucuucgugagccccagcgccuccaaggaggugaaguccuuccuguggacccagagccuccgccgggagcugagcggcuacugcuccagcaucaagcugcaggucgugaaggacgcccaggcgcuccugcacgggcuggacuucuccgaggugagcaacguccagcgccucaugcggaagcagcgccgggacgacuccgaccugaagcgccugcgggaccucaaccaggccgugaacaaccugguggagcucaagagcacccagcagaaguccauccugcgcgucggcacgcugaccagcgacgaccugcucacccuggccgccgaccuggagaagcucaaguccaaggugauccggaccgagcgcccccugagcuccgggguguacaugggcaaccugagcacgcagcagcucgagcagcggcgcgcccugcugaacaugaucgggauggucggcggcgcgcaggggacccagccgggccgggacgggguggugcgcgucugggacgugaagaaccccgaccuccugaacaaccaguucggcaccaugcccucccugacccucgccugccugacgaagcagggccagguggaccugaacgacgccguccucgcccugaccgaccuggggcucaucuacaccgcgaaguaccccaacagcuccgaccuggaccggcugagccagagccacccgauccucaacaugguggacaccaagaaguccagccugaacaucuccggcuacaacuucagccugggggccgccgugaaggccggcgccugcaugcucgacgggggcaacaugcuggagacgaucaaggucacgccccagaccguggacggcauccugaaguccauccucaaggugaagcgcagccuggggauguucgucuccgacacccccggcgagcggaaccccuacgagaacauccuguacaagaucugccucagcggggacggcuggccguacaucgcgucccgcaccagcaucguggggcgggccugggagaacaccaccguggaccuggaguccgacggcaagccccagaaggucggcaccgccgggagcaacaagucccugcagagcgccggcuuccccacggggcucaccuacucccagcugaugacccugaaggacagcaugaugcagcuggaccccuccgccaagaccuggaucgacaucgagggccgcccggaggaccccguggagaucgcgcucuaccagcccaugagcgggugcuacauccacuucuuccgggagcccacggaccugaagcaguucaagcaggacgccaaguacucccacggcaucgacgucgccgaccuguucccggcccagcccggccucaccagcgccgugaucgaggcgcugccccgcaacauggugcugaccugccaggggagcgacgacaucaagcgccuccuggacucccagggccggcgcgacaucaagcugaucgacaucgcccucagcaaggccgacucccggaaguucgagaacgccgucugggaccagugcaaggaccugugccacaugcacaccggggugguggucgagaagaagaagcgcggcgggaaggaggagaucacgccccacugcgcccugauggacugcaucauguacgacgcggccgugagcggcggccucaacaucccggugcugcgggccguccugccccgcgacaugguguuccggaccuccagccccaaggugguccucugaggacuagucccuguucccagagcccacuuuuuuuucuuuuuuugaaauaaaauagccugucuuucagaucucaaaggcucuuuucagagccaccaaaaaaaaaaaaaaaaaaaaaaaaaaaaaaaaaaaaaaaaaaaaaaaaaaaaaaaaaaaaaaaaagaauu

SEQ ID NO: 18428 - RNA, 2033 nt, Artificial Sequence
  mRNA product Design a-2 (hSL-A64-N5) comprising derived and/or modified sequence from LASV(LASV237-NIG-2010;Clade II)__AIT17639__SP-HsPLAT_NP(2-569) (opt1)
aggagaguccgcucagccagguugcagaagcggcuuagcguguguccuaaucuucucucugcguguagguaggccugugccgcaaacaagcuuaccauggacgccaugaagcgcggccugugcugcgugcuccugcugugcggggccgucuucgugagccccagcgccuccaaggaggugaaguccuuccuguggacccagagccuccgccgggagcugagcggcuacugcuccaacaucaagcugcaggucgugaaggacgcccaggcgcuccugcacgggcuggacuucagcgagguguccaacguccagcgccucaugcggaagcagaagcgcgacgacagcgaccugaagcggcugcgcgaccucaaccaggccgugaacaaccugguggagcugaaguccacccagcagaaguccauccuccgggucggcacccugaccagcgacgaccugcucacccuggccgccgaccuggagaagcucaagagcaaggugauccgcaccgagcggccccuguccagcgggguguacaugggcaaccuguccacgcagcagcucgagcagcgccgggcccugcugaacaugaucgggauggucggcggcgcgcaggggacccagccgggccgcgacgggguggugcgggucugggacgugaagaaccccgaccuccugaacaaccaguucggcaccaugcccagccugacccucgccugccugacgaagcagggccagguggaccugaacgacgccguccucgcccugaccgaccuggggcucaucuacaccgcgaaguaccccaacuccagcgaccuggaccgccugucccagagccacccgauccucaacaugguggacaucaagaaguccagccugaacaucagcggcuacaacuucucccugggggccgccgugaaggccggcgccugcaugcucgacgggggcaacaugcuggagaccaucaaggucacgccccagaccauggacggcauccucaagagcauccugaaggugaagcggucccuggggauguucgugagcgacacccccggcgagcgcaaccccuacgagaacauccuguacaagaucugccucuccggggacggcuggccguacaucgcgagccggaccuccaucgucgggcgcgccugggagaacacgaccguggaccuggagagcgacggcaagccccagaaggugggcuccgccgggagcaacaagucccugcagagcgccggcuuccccaccgggcucaccuacucccagcugaugacgcugaaggacagcaugaugcagcuggaccccuccgccaagaccuggaucgacaucgagggccggccggaggaccccgucgagaucgcgcucuaccagcccaugagcgggugcuacauccacuucuuccgcgagcccaccgaccugaagcaguucaagcaggacgccaaguacucccacggcaucgacguggccgaccuguucccggcccagcccggccucaccagcgccgucaucgaggcgcugccccggaacauggugcugacgugccaggggagcgacgacaucaagcgccuccuggacucccagggccgccgggacaucaagcugaucgacaucgcccucagcaaggccgacucccgccgguucgagaacgccgugugggaccagugcaaggaccugugccacaugcacaccggggucgugguggagaagaagaagcgcggcgggaaggaggagaucacgccccacugcgcccugauggacugcaucauguacgacgcggccgucagcggcggccucaacaucccggugcugcgggccgugcugccccgcgacauggucuuccggaccuccagccccaagguggugcucugaggacuagucccuguucccagagcccacuuuuuuuucuuuuuuugaaauaaaauagccugucuuucagaucucaaaggcucuuuucagagccaccaaaaaaaaaaaaaaaaaaaaaaaaaaaaaaaaaaaaaaaaaaaaaaaaaaaaaaaaaaaaaaaaagaauu

SEQ ID NO: 18429 - RNA, 2033 nt, Artificial Sequence
  mRNA product Design a-2 (hSL-A64-N5) comprising derived and/or modified sequence from LASV(LASV253-NIG-2011;Clade II)__AIT17671__SP-HsPLAT_NP(2-569) (opt1)
aggagaguccgcucagccagguugcagaagcggcuuagcguguguccuaaucuucucucugcguguagguaggccugugccgcaaacaagcuuaccauggacgccaugaagcgcggccugugcugcgugcuccugcugugcggggccgucuucgugagccccagcgccuccaaggaggugaaguccuuccuguggacccagagccuccgccgggagcugagcggcuacugcuccagcaucaagcugcaggucgugaaggacgcccaggcgcuccugcacgggcuggacuucuccgaggugagcaacguccagcgccucaugcggaagcagaagcgcgacgacuccgaccugaagcggcugcgcgaccucaaccaggccgugaacaaccugguggagcucaagagcacccagcagaaguccguccugcgggugggcacccugaccagcgacgaccugcucacccuggccgccgaccuggagaagcucaaguccaaggugauccgcaccgagcggccccugagcuccggggucuacaugggcaaccugagcacgcagcagcucgagcagcgccgggcccugcugaacaugaucgggauggugggcggcgcgcaggggacccagccgggccgcgacggggugguccgggugugggacgugaagaaccccgaccuccugaacaaccaguucggcaccaugcccucccugacccucgccugccugacgaagcaggggcaggucgaccugaacgacguggugcucgcccugaccgaccugggccucaucuacaccgccaaguaccccaacagcuccgaccuggaccgccugagccagagccacccgauccucaacauggucgacaccaagaaguccagccugaacaucuccggcuacaacuucagccugggggcggccgugaaggccggcgccugcaugcucgacgggggcaacaugcuggagacgaucaaggugacgccccagaccauggacggcauccugaaguccauccucaaggucaagaagucccuggggauguucgugagcgacacccccggcgagcggaaccccuacgagaacauccuguacaagaucugccucagcggggacggcuggccguacaucgccucccgcaccagcaucguggggcgggcgugggagaacaccaccgucgaccuggaguccgacggcaagccccagaaggugggcaccgccgggagcaacaagucccugcagagcgccggcuuccccacggggcucaccuacucccagcugaugacccugaaggacagcaugaugcagcuggaccccuccgccaagaccuggaucgacaucgagggccgcccggaggaccccgucgagaucgcccucuaccagcccaugagcgggugcuacauccacuucuuccgggagcccacggaccugaagcaguucaagcaggacgcgaaguacucccacggcaucgacgugaccgaccuguucccggcccagcccggccucaccagcgccgugaucgaggcccugccccgcaacaugguccugaccugccaggggagcgacgacaucaagcggcuccuggacucccagggccgccgcgacaucaagcugaucgacaucgcccucagcaaggcggacucccggcgcuucgagaacgccgugugggaccagugcaaggaccugugccacaugcacacggggguggucguggagaagaagaagcggggcgggaaggaggagaucacgccccacugcgcccugauggacugcaucauguacgacgccgccgugagcggcggccucaacaucccgguccugcgcgcggugcugccccgggacaugguguuccgcaccuccagccccaaggucgugcucugaggacuagucccuguucccagagcccacuuuuuuuucuuuuuuugaaauaaaauagccugucuuucagaucucaaaggcucuuuucagagccaccaaaaaaaaaaaaaaaaaaaaaaaaaaaaaaaaaaaaaaaaaaaaaaaaaaaaaaaaaaaaaaaaagaauu

SEQ ID NO: 18430 - RNA, 2033 nt, Artificial Sequence
  mRNA product Design a-2 (hSL-A64-N5) comprising derived and/or modified sequence from LASV(LASV254-NIG-2011;Clade II)__AIT17675__SP-HsPLAT_NP(2-569) (opt1)
aggagaguccgcucagccagguugcagaagcggcuuagcguguguccuaaucuucucucugcguguagguaggccugugccgcaaacaagcuuaccauggacgccaugaagcgcggccugugcugcgugcuccugcugugcggggccgucuucgugagccccagcgccuccaaggaggugaaguccuuccuguggacccagagccuccgccgggagcugagcggcuacugcuccagcaucaagcugcaggucgugaaggacgcccaggcgcuccugcacgggcuggacuucuccgaggugagcaacguccagcgccucaugcggaagcagaagcgcgacgacuccgaccugaagcggcugcgcgaccucaaccaggccgugaacaaccugguggagcucaagagcacccagcagaaguccguccugcgggugggcacgcugaccagcgacgaccugcucacccuggccgccgaccuggagaagcucaaguccaaggugauccgcaccgagcggccccugagcuccggggucuacaugggcaaccugagcacgcagcagcucgagcagcgccgggcccugcugaacaugaucgggauggugggcggcgcgcaggggacccagccgggccgcgacggggugguccgggugugggacgugaagaaccccgaccuccugaacaaccaguucggcaccaugcccucccugacccucgccugccugacgaagcaggggcaggucgaccugaacgacgccgugcucgcccugaccgaccugggccucaucuacaccgcgaaguaccccaacagcuccgaccuggaccgccugagccagagccacccgauccucaacaugguggacaccaagaaguccagccugaacaucuccggcuacaacuucagccugggggccgccgucaaggccggcgccugcaugcucgacgggggcaacaugcuggagacgaucaaggugacgccccagaccauggacggcauccugaaguccauccucaaggugaagaagucccuggggauguucgucagcgacacccccggcgagcggaaccccuacgagaacauccuguacaagaucugccucagcggggacggcuggccguacaucgcgucccgcaccagcaucguggggcgggccugggagaacaccaucguggaccuggaguccgacggcaagccccagaaggucggcaccgccgggagcaacaagucccugcagagcgccggcuuccccaccgggcucacguacucccagcugaugacccugaaggacagcaugaugcagcuggaccccuccgccaagaccuggaucgacaucgagggccgcccggaggaccccguggagaucgcgcucuaccagcccaugagcgggugcuacauccacuucuuccgggagcccaccgaccugaagcaguucaagcaggacgccaaguacucccacggcaucgacgucgccgaccuguucccggcccagcccggccucacgagcgccgugaucgaggcgcugccccgcaacauggugcugaccugccaggggagcgacgacaucaagcggcuccuggacucccagggccgccgcgacaucaagcugaucgacaucgcccucagcaaggccgacucccggcgcuucgagaacgccgucugggaccagugcaaggaccugugccacaugcacaccggggugguggucgagaagaagaagcggggcgggaaggaggagaucacgccccacugcgcccugauggacugcaucauguacgacgcggccgugagcggcggccucaacaucccggugcugcgcgccguccugccccgggacaugguguuccgcaccuccagccccaaggugguccucugaggacuagucccuguucccagagcccacuuuuuuuucuuuuuuugaaauaaaauagccugucuuucagaucucaaaggcucuuuucagagccaccaaaaaaaaaaaaaaaaaaaaaaaaaaaaaaaaaaaaaaaaaaaaaaaaaaaaaaaaaaaaaaaaagaauu

SEQ ID NO: 18431 - RNA, 2033 nt, Artificial Sequence
  mRNA product Design a-2 (hSL-A64-N5) comprising derived and/or modified sequence from LASV(Nig08-04;Clade II)__ADU56611__SP-HsPLAT_NP(2-569) (opt1)
aggagaguccgcucagccagguugcagaagcggcuuagcguguguccuaaucuucucucugcguguagguaggccugugccgcaaacaagcuuaccauggacgccaugaagcgcggccugugcugcgugcuccugcugugcggggccgucuucgugagccccagcgccuccaaggaggugaaguccuuccuguggacccagagccuccgccgggagcugagcggcuacugcuccaacaucaagcugcaggucgugaaggacgcccaggcgcuccugcacgggcuggacuucagcgagguguccaacguccagcgccucaugcggaagcagaagcgcgacgacggcgaccugaagcggcugcgcgaccucaaccaggccgugaacaaccugguggagcucaagagcacccagcagaaguccguccugcggguggggacccugaccagcgacgaccugcucacccuggccgccgaccuggagaagcucaaguccaaggugauccgcaccgagcggccccugagcuccggcgucuacauggggaaccugagcacgcagcagcucgagcagcgcaaggcccugcuguccaugaucggcauggugggcggggcgcagggcacccagccggggcgggacggcgugguccgcgugugggacgugaagaaccccgaccuccugaacaaccaguucgggaccaugcccagccugacccucgccugccugacgaagcagggccaggucgaccugaacgacgccgugcucgcccugaccgaccugggccucaucuacaccgcgaaguaccccaacuccagcgaccuggaccggcugucccagagccacccgauccucaacaugguggacaccaagaaguccagccugaacaucagcggguacaacuucucccugggcgccgccgucaaggccggggccugcaugcucgacggcggcaacaugcuggagacgaucaaggugacgccccagaccauggacgggauccucaagagcauccugaaggugaagcgcucccugggcauguucgucagcgacacccccggggagcggaaccccuacgagaacauccuguacaagaucugccucuccggcgacggguggccguacaucgcgagccgcaccuccaucgugggccgggccugggagaacaccaccguggaccuggagagcgacggcaagccccagaaggucgggaccgccggcuccaacaagagccugcaguccgccggguuccccacgggccucaccuacagccagcugaugacccugaaggacuccaugaugcagcuggaccccagcgccaagaccuggaucgacaucgaggggcgcccggaggaccccguggagaucgcgcucuaccagcccauguccggcugcuacauccacuucuuccgggagcccacggaccugaagcaguucaagcaggacgccaaguacagccacggcaucgacgucaccgaccuguucuccgcccagccggggcucaccagcgccgugaucgaggcccugccccgcaacauggugcugaccugccagggcagcgacgacaucaagaagcuccuggacucccaggggcggcgcgacaucaagcugaucgacaucagccucaacaaggcggacucccgccgguucgagaacgccgucugggaccagugcaaggaccugugccacaugcacacgggcgugguggucgagaagaagaagcgcgggggcaaggaggagaucacgccccacugcgcccugauggacugcaucauguucgacgccgccgugagcggcgggcucaacauccccauccugcgggcggugcugccgcgcgacauggucuuccggaccuccagccccaagguggugcucugaggacuagucccuguucccagagcccacuuuuuuuucuuuuuuugaaauaaaauagccugucuuucagaucucaaaggcucuuuucagagccaccaaaaaaaaaaaaaaaaaaaaaaaaaaaaaaaaaaaaaaaaaaaaaaaaaaaaaaaaaaaaaaaaagaauu

SEQ ID NO: 18432 - RNA, 2036 nt, Artificial Sequence
  mRNA product Design a-2 (hSL-A64-N5) comprising derived and/or modified sequence from LASV(GA391;Clade III)__AAA46284__SP-HsPLAT_NP(2-570) (opt1)
aggagaguccgcucagccagguugcagaagcggcuuagcguguguccuaaucuucucucugcguguagguaggccugugccgcaaacaagcuuaccauggacgccaugaagcgcggccugugcugcgugcuccugcugugcggggccgucuucgugagccccagcgccuccaaggaggugcgcagcugccuguggacccagucccuccggcgcgagcugagcggcuacugcuccaacaucaagcugcaggucgugaaggacgcccaggcgcuccugcacgggcuggacuucagcgagguguccaacguccagcggcucaugcgcaagcagaagcgggacgacggcgaccugaagcgccugcgggaccucaaccaggccgugaacaaccugguggagcugaaguccacccagcagaaguccguccuccgcguggggacgcugagcuccgacgaccugcucauccuggccgccgaccuggagaagcucaagagcaaggugacccggaccgagcgcccccuguccagcggcgucuacauggggaaccuguccagccagcagcucgaccagcggcgcgcccugcugaacaugaucggcaugaccggcguguccgggggcgggaagggcgcgagcaacgggaucgugcgggucugggacgugaagaacgccgagcuccugaacaaccaguucggcacgaugccgucccugacccucgccugccugaccaagcagggccagguggaccugaacgacgccguccaggcgcucaccgaccuggggcugaucuacacggccaaguaccccaacagcagcgaccucgaccgccugucccagagccaccccauccugaacaugaucgacaccaagaaguccagccucaacaucuccggcuacaacuucagccugggggccgccgugaaggccggcgcgugcaugcuggacggcgggaacaugcucgagaccaucaaggugagcccccagaccauggacggcauccucaagagcauccugaaggucaagaagucccuggggauguucgugagcgacacgccgggcgagcggaaccccuacgagaacauccuguacaagaucugccuguccggggacggcuggagcuacaucgccucccgcaccagcaucgugggccgggccugggagaacaccgucguggaccucgagcaggacaacaagccccagaagaucgggaacggcggguccaacaagagccugcaguccgccggcuucgccgcggggcugaucuacagccagcucaugacccugaaggacuucaagugcuucaaccugauccccaacgccaagacguggauggacaucgagggccgcccggaggaccccguggagaucgcccuguaccagcccuccagcggcugcuacguccacuucuuccgggagcccaccgaccucaagcaguucaagcaggacgccaaguacagccacgggcgcgacgugaccgaccuguucgccgcgcagccgggccugaccuccgccgucaucgaggcccucccccggaacauggugaucacgugccaggggagcgaggacauccgcaagcugcuggagucccagggccgccgggacaucaagcucaucgacaucacccugagcaaggccgacucccgcaaguucgagaacgccgugugggaccaguucaaggaccugugccacaugcacaccggggucgugguggagaagaagaagcggggcggcaaggaggagaucacgccccacugcgcgcucauggacugcaucauguucgacgccgccgucagcgggggccuggacgccaaggugcugcgcgugguccucccccgggacaugguguuccgcaccuccaccccgaaggugguccugugaggacuagucccuguucccagagcccacuuuuuuuucuuuuuuugaaauaaaauagccugucuuucagaucucaaaggcucuuuucagagccaccaaaaaaaaaaaaaaaaaaaaaaaaaaaaaaaaaaaaaaaaaaaaaaaaaaaaaaaaaaaaaaaaagaauu

SEQ ID NO: 18433 - RNA, 2033 nt, Artificial Sequence
  mRNA product Design a-2 (hSL-A64-N5) comprising derived and/or modified sequence from LASV(Nig08-A19;Clade III)__ADU56619__SP-HsPLAT_NP(2-569) (opt1)
aggagaguccgcucagccagguugcagaagcggcuuagcguguguccuaaucuucucucugcguguagguaggccugugccgcaaacaagcuuaccauggacgccaugaagcgcggccugugcugcgugcuccugcugugcggggccgucuucgugagccccagcgccuccaaggaggugaaguccuuccuguggacccagucccuccgccgggagcugagcggcuacugcuccaacaucaagcugcaggucgugaaggacgcccaggcgcuccugcacgggcuggacuucagcgagguguccaacguccagcgccucaugcggaagcagaagcgcgacgacggcgaccugaagcggcugcgcgaccucaaccaggccgugaacaaccugguggagcucaagagcacccagcagaaguccguccugcggguggggacccugagcuccgacgaccugcucgugcuggccgccgaccuggagaagcucaagagcaaggucgugcgcaccgagcggccccuguccagcggcaucuacauggggaaccuguccagccagcagcucgaccagcgcaaggcccugcugaacaugaucggcaugaccggcgggaacggcgggcggaacaccacguccgacggcaucgugcgcgucugggacgugaagaacgcggagcuccugaacaaccaguucgggaccaugccgagccugacccucgccugccugaccaagcagggccagguggaccugaacgacgccguccaggcccucacggaccugggccugaucuacaccgcgaaguaccccaacuccagcgaccucgaccggcuggcccagagccaccccauccugaacaugaucgacaccaagaaguccagccucaacaucuccggguacaacuucagccugggcgccgccgugaaggccggggcgugcaugcuggacggcggcaacaugcucgagaccaucaaggugagcccccagacgauggacgggauccucaagagcauccugaaggucaagcgcucccugggcauguucaucagcgacaccccgggggagcggaaccccuacgagaacauccuguacaagaucugccuguccggcgacggguggcccuacaucgccagccgcaccuccaucgugggccgggccugggagaacaccguggucgaccucgagagcgacaacaagccccagaagacgggcaacgggggcuccaacaagagccugcaguccgccggguucgccgcgggccugaccuacagccagcucaugacccugaaggacuccaugcugcagcuggacccgaacgccaagaccuggauggacaucgaggggcgccccgaggaccccguggagaucgcccucuaccagcccagcuccggcugcuacauccacuucuuccgggagccgacggaccugaagcaguucaagcaggacgccaaguacagccacggcaucgacgugaccgaccuguucgccgcgcagcccgggcucaccagcgccgucaucgaggcccugccccgcaacauggugaucacgugccagggcuccgaggacauccggaagcugcucgagagccaggggcgccgcgacaucaagcugaucgacaucucccugagcaaggucgacucccggaaguucgagaacgccgugugggaccaguucaaggaccucugccacaugcacaccggcaucguggucgagaagaagaagcgcgggggcaaggaggagaucacgccccacugcgcccugauggacugcaucauguucgacgcggccgugagcggcgggguggacgccaagguccugcgggccgugcucccgcgcgacaugguguuccggaccuccacccccaaggucgugcugugaggacuagucccuguucccagagcccacuuuuuuuucuuuuuuugaaauaaaauagccugucuuucagaucucaaaggcucuuuucagagccaccaaaaaaaaaaaaaaaaaaaaaaaaaaaaaaaaaaaaaaaaaaaaaaaaaaaaaaaaaaaaaaaaagaauu

SEQ ID NO: 18434 - RNA, 2033 nt, Artificial Sequence
  mRNA product Design a-2 (hSL-A64-N5) comprising derived and/or modified sequence from LASV(G1180-SLE-2010;Clade IV)__AIT17169__SP-HsPLAT_NP(2-569) (opt1)
aggagaguccgcucagccagguugcagaagcggcuuagcguguguccuaaucuucucucugcguguagguaggccugugccgcaaacaagcuuaccauggacgccaugaagcgcggccugugcugcgugcuccugcugugcggggccgucuucgugagccccagcgccuccaaggagaucaagagcuuccuguggacccagucccuccgccgggagcugagcggcuacugcuccaacaucaagcuccagguggucaaggacgcccaggcgcugcugcacgggcuggacuucagcgagguguccaacgugcagcgccucaugcggaaggagcgccgggacgacaacgaccugaagcgccugcgggaccucaaccaggccgucaacaaccugguggagcucaagagcacccagcagaaguccauccugcgcgugggcacccugaccagcgacgaccugcucauccuggccgccgaccuggagaagcucaaguccaaggucauccggaccgagcgcccccugagcgccgggguguacaugggcaaccuguccagccagcagcucgaccagcggcgcgcgcugcuguccaugaucgggaugagcuccggcaaccagcgggcccaggccggccgcgacggggugguccgggugugggacgugaagaacgucgagcuccugaacaaccaguucggcaccaugccgagccugacgcucgccugccugaccaagcagggccagguggaccugaacgacgcggugcaggcccucaccgaccuggggcugaucuacaccgccaaguaccccaacacguccgaccucgaccgccugacccagagccaccccauccugaacaugaucgacaccaagaaguccagccucaacaucagcggguacaacuucucccugggcgccgccgucaaggcgggcgccugcaugcuggacgggggcaacaugcucgagaccaucaaggugagcccccagacgauggacgggauccugaaguccauccugaaggugaagaaggcccucggcauguucaucagcgacaccccgggcgagcggaaccccuacgagaacauccuguacaagaucugccuguccggggacggcuggcccuacaucgccagccgcaccuccaucaccgggcgggccugggagaacacggucguggaccucgagagcgacggcaagccccagaaggcgggguccaacaacagcaacaagucccugcagagcgugggcuucaccgccggccugaccuacucccagcucaugacccugaaggacgccaugcugcagcuggacccgaacgccaagacguggauggacaucgaggggcgccccgaggaccccgucgagaucgcccucuaccagcccagcuccggcugcuacauccacuucuuccgggagccgaccgaccugaagcaguucaagcaggacgcgaaguacagccacgggaucgacgugaccgaccuguucgccgcccagcccggccucaccuccgccgugaucgacgcccugccccgcaacauggucaucacgugccaggggagcgacgacauccgcaagcugcucgagagccagggccggaaggacaucaagcugaucgacaucgcgcuguccaagaccgacagccgcaaguacgagaacgccgugugggaccaguacaaggaccucugccacaugcacaccggcgucgugguggagaagaagaagcgcgggggcaaggaggagaucacgccccacugcgcccugauggacugcaucauguucgacgccgcggucuccgggggccugaacaccagcgugcuccgggccgugcugccgcgggacauggucuuccgcaccuccacgccccggguggugcugugaggacuagucccuguucccagagcccacuuuuuuuucuuuuuuugaaauaaaauagccugucuuucagaucucaaaggcucuuuucagagccaccaaaaaaaaaaaaaaaaaaaaaaaaaaaaaaaaaaaaaaaaaaaaaaaaaaaaaaaaaaaaaaaaagaauu

SEQ ID NO: 18435 - RNA, 2033 nt, Artificial Sequence
  mRNA product Design a-2 (hSL-A64-N5) comprising derived and/or modified sequence from LASV(G1442-SLE-2011;Clade IV)__AIT17181__SP-HsPLAT_NP(2-569) (opt1)
aggagaguccgcucagccagguugcagaagcggcuuagcguguguccuaaucuucucucugcguguagguaggccugugccgcaaacaagcuuaccauggacgccaugaagcgcggccugugcugcgugcuccugcugugcggggccgucuucgugagccccagcgccuccaaggaggugaaguccuuccuguggacccagagccuccgccgggagcugagcggcuacugcuccaacaucaagcugcaggucgugaaggacgcccaggcgcuccugcacgggcuggacuucagcgagguguccaacguccagcgccucaugcggaagcagcgccgggacgacaacgaccugaagcgccugcgggaccucaaccaggccgugaacaaccugguggagcucaagagcacccagcagaaguccguccugcgcgugggcacccugaccagcgacgaccugcucgugcuggccgccgaccuggagaagcucaaguccaaggucauccggaccgagcgcccccugagcgccgggguguacaugggcaaccuguccagccagcagcucgaccagcggcgcgcgcugcugaacaugaucgggauguccggcggcauccaggggacccggacgggccgcgacggggugguccgggugugggacgugaagaacgccgaccuccugaacaaccaguucggcaccaugccgagccugacccucgccugccugaccaagcaggggcaggucgaccugaacgacguggugcaggcccucacggaccugggccugaucuacaccgcgaaguaccccaacgccuccgaccucgaccgccugacccagagccaccccauccugaacaugaucgacaccaagaaguccagccucaacaucagcggcuacaacuucucccugggggccgccgucaaggccggcgcgugcaugcuggacgggggcaacaugcucgagacgaucaaggugagcccccagaccauggacggcauccugaaguccauccugaaggugaagaagacccucgggauguucaucagcgacaccccgggcgagcggaaccccuacgagaacauccuguacaagaucugccuguccggggacggcuggcccuacaucgccagccgcacguccaucaccgggcgggccugggagaacaccgucguggaccucgagagcgacggcaagccccagaaggccggcuccaacaacagcaacaagucccugcagagcgccggguucgcggccggccugaccuacucccagcucaugacgcugaaggacgccaugcugcagcuggacccgaacgccaagaccuggauggacaucgaggggcgccccgaggaccccguggagaucgcccucuaccagcccagcuccggcugcuacauccacuucuuccgggagccgaccgaccugaagcaguucaagcaggacgcgaaguacagccacgggaucgacgucaccgaccuguucgccgcccagcccggccucacguccgccgugaucgaggcccugccccgcaacauggucaucacgugccagggcagcgacgacaucaagaagcugcucgagucccaggggcgcaaggacaucaagcugaucgacaucgcgcugagcaagaccgacagccggaaguacgagaacgccgugugggaccaguacaaggaccucugccacaugcacaccggcguggucguggagaagaagaagcgcgggggcaaggaggagaucaccccgcacugcgcccugauggacugcaucauguucgacgccgcgguguccgggggccugaacacccucguccugcgggccgugcugccccgcgacaugguguuccggaccagcacgccccgcgucgugcucugaggacuagucccuguucccagagcccacuuuuuuuucuuuuuuugaaauaaaauagccugucuuucagaucucaaaggcucuuuucagagccaccaaaaaaaaaaaaaaaaaaaaaaaaaaaaaaaaaaaaaaaaaaaaaaaaaaaaaaaaaaaaaaaaagaauu

SEQ ID NO: 18436 - RNA, 2033 nt, Artificial Sequence
  mRNA product Design a-2 (hSL-A64-N5) comprising derived and/or modified sequence from LASV(G3010-SLE-2013;Clade IV)__AIT17345__SP-HsPLAT_NP(2-569) (opt1)
aggagaguccgcucagccagguugcagaagcggcuuagcguguguccuaaucuucucucugcguguagguaggccugugccgcaaacaagcuuaccauggacgccaugaagcgcggccugugcugcgugcuccugcugugcggggccgucuucgugagccccagcgccuccaaggagaucaagagcuuccuguggacccagucccuccgccgggagcugagcggcuacugcuccaacaucaagcuccagguggucaaggacgcccaggcgcugcugcacgggcuggacuucagcgagguguccaacgugcagcgccucaugcggaaggagcgccgggacgacaacgaccugaagcgccugcgggaccucaaccaggccgucaacaaccugguggagcucaagagcacccagcagaaguccauccugcgcgugggcacccugaccagcgacgaccugcucauccuggccgccgaccuggagaagcucaaguccaaggucacccggaccgagcgcccccugagcgccgggguguacaugggcaaccuguccagccagcagcucgaccagcggcgcgcgcugcuguccaugaucgggaugagcuccggcgugcagggcgcccgggccgggcgcgacggcgucgugcgggugugggacgucaagaacgccgagcuccugaacaaccaguucgggacgaugccgagccugacccucgcgugccugaccaagcagggccagguggaccugaacgacgugguccaggcccucaccgaccuggggcugaucuacacggccaaguaccccaacaccuccgaccucgaccgccugacccagagccaccccauccugaacaugaucgacaccaagaaguccagccucaacaucagcggcuacaacuucucccugggcgccgccgugaaggcgggggccugcaugcuggacggcgggaacaugcucgagacgaucaaggugagcccccagaccauggacggcauccugaaguccauccugaaggucaagaaggcccucggcauguucaucagcgagaccccgggggagcggaaccccuacgagaacauccuguacaagaucugccuguccggcgacggguggcccuacaucgccagccgcaccuccaucacgggccgggccugggagaacaccgugguggaccucgagagcgacgggaagccccagaaggcgggcuccaacaacagcaacaagucccugcagagcgccggcuucaccgccgggcugaccuacucccagcucaugacgcugaaggacgccaugcugcagcuggacccgaacgccaagaccuggauggacaucgagggccgccccgaggaccccgucgagguggcgcucuaccagcccagcuccgggugcuacauccacuucuuccgggagccgaccgaccugaagcaguucaagcaggacgccaaguacagccacggcaucgacgugaccgaccuguucgccgcccagcccgggcucacguccgccgucaucgacgcgcugccccgcaacauggugaucacgugccagggcagcgacgacaucaagaagcugcucgagagccagggccgcaaggacaucaagcugaucgacaucgcccuguccaagaccgacagccggaaguacgagaacgccgucugggaccaguacaaggaccucugccacaugcacaccggggugguggucgagaagaagaagcgcggcgggaaggaggagaucaccccgcacugcgcccugauggacugcaucauguucgacgcggccguguccggcgggcugaacaccagcgugcuccgggccguccugccccgcgacaugguguuccggaccuccacgccccgcgugguccugugaggacuagucccuguucccagagcccacuuuuuuuucuuuuuuugaaauaaaauagccugucuuucagaucucaaaggcucuuuucagagccaccaaaaaaaaaaaaaaaaaaaaaaaaaaaaaaaaaaaaaaaaaaaaaaaaaaaaaaaaaaaaaaaaagaauu

SEQ ID NO: 18437 - RNA, 2033 nt, Artificial Sequence
  mRNA product Design a-2 (hSL-A64-N5) comprising derived and/or modified sequence from LASV(G502-SLE-2009;Clade IV)__AIT17127__SP-HsPLAT_NP(2-569) (opt1)
aggagaguccgcucagccagguugcagaagcggcuuagcguguguccuaaucuucucucugcguguagguaggccugugccgcaaacaagcuuaccauggacgccaugaagcgcggccugugcugcgugcuccugcugugcggggccgucuucgugagccccagcgccuccaaggagaucaagagcuuccuguggacccagucccuccgccgggagcugagcggcuacugcuccaacaucaagcuccagguggucaaggacgcccaggcgcugcugcacgggcuggacuucagcgagguguccaacgugcagcgccucaugcggaaggagcgccgggacgacaacgaccugaagcgccugcgggaccucaaccaggccgucaacaaccugguggagcucaagagcacccagcagaaguccauccugcgcgugggcacccugaccagcgacgaccugcucauccuggccgccgaccuggagaagcucaaguccaaggucauccggaccgagcgcccccugagcgccgggguguacaugggcaaccuguccagccagcagcucgaccagcggcgcgcgcugcuguccaugaucgggaugagcggcggcaaccagggggugcgggccggcaaggacggggucgugcgcgugugggacgucaagaacgccgagcuccugaacaaccaguucggcaccaugccgucccugacgcucgccugccugaccaagcagggccagguggaccugaacgacgcggugcaggcccucaccgaccuggggcugaucuacaccgccaaguaccccaacacgagcgaccucgaccggcugacccagucccaccccauccugaacaugaucgacaccaagaaguccagccucaacaucuccggcuacaacuucagccugggggccgccgucaaggcgggcgccugcaugcuggacgggggcaacaugcucgagaccaucaaggugagcccccagacgauggacggcauccucaagagcauccugaaggugaagaaggcccuggggauguucaucuccgacaccccgggcgagcgcaaccccuacgagaacauccuguacaagaucugccugagcggggacggcuggcccuacaucgccucccggaccagcaucaccgggcgcgccugggagaacacggucguggaccucgaguccgacggcaagccccagaaggcgggcagcaacaacuccaacaagagccugcaguccgccggguucaccgccggccugaccuacagccagcucaugacccugaaggacgccaugcugcagcuggacccgaacacgaagaccuggauggacaucgaggggcggcccgaggaccccguggagaucgcccucuaccagcccuccagcggcugcuacauccacuucuuccgcgagccgaccgaccugaagcaguucaagcaggacgcgaaguacucccacgggaucgacgucaccgaccuguucgccgcccagcccggccucacgagcgccgugaucgacgcccugccccggaacauggugaucacgugccagggcuccgacgacauccgcaagcugcucgagagccaggggcgcaaggacaucaagcugaucgacaucgcgcugaacaagaccgacagccggaaguacgagaacgccgucugggaccaguacaaggaccucugccacaugcacaccggcguggucguggagaagaagaagcgcgggggcaaggaggagaucaccccgcacugcgcccugauggacugcaucauguucgacgccgcgguguccgggggccugaacaccagcguccuccgggccgugcugccccgcgacaugguguuccggaccuccacgccccgcgucgugcugugaggacuagucccuguucccagagcccacuuuuuuuucuuuuuuugaaauaaaauagccugucuuucagaucucaaaggcucuuuucagagccaccaaaaaaaaaaaaaaaaaaaaaaaaaaaaaaaaaaaaaaaaaaaaaaaaaaaaaaaaaaaaaaaaagaauu

SEQ ID NO: 18438 - RNA, 2033 nt, Artificial Sequence
  mRNA product Design a-2 (hSL-A64-N5) comprising derived and/or modified sequence from LASV(G733-SLE-2010;Clade IV)__AIT17155__SP-HsPLAT_NP(2-569) (opt1)
aggagaguccgcucagccagguugcagaagcggcuuagcguguguccuaaucuucucucugcguguagguaggccugugccgcaaacaagcuuaccauggacgccaugaagcgcggccugugcugcgugcuccugcugugcggggccgucuucgugagccccagcgccuccaaggagaucaagagcuuccuguggacccagucccuccgccgggagcugagcggcuacugcuccaacaucaagcuccagguggucaaggacgcccaggcgcugcugcacgggcuggacuucagcgagguguccaacgugcagcgccucaugcggaaggagcgccgggacgacaacgaccugaagcgccugcgggaccucaaccaggccgucaacaaccugguggagcucaagagcacccagcagaaguccgugcugcgcgucggcacccugaccagcgacgagcugcucgugcuggccgccgaccuggagaagcucaaguccaaggugauccggaccgagcgcccccugagcgccggggucuacaugggcaaccuguccagccagcagcucgaccagcggcgcgcgcugcuguccaugaucgggaugagcggcggcaaccagggggcccggaccggccgcgacgggguggugcgggucugggacgugaagaacgccgagcuccugaacaaccaguucggcaccaugccgucccugacccucgccugccugaccaagcagggccagguggaccugaacgacgcgguccaggcccucaccgaccuggggcugaucuacacggccaaguaccccaacaccagcgaccucgaccgccugacccagucccaccccauccugaacaugaucgacaccaagaaguccagccucaacaucuccggcuacaacuucagccugggggccgccgugaaggcgggcgccugcaugcuggacgggggcaacaugcucgagacgaucaaggugagcccccagaccauggacggcauccucaagagcauccugaaggucaagaaggcccuggggauguucaucuccgacaccccgggcgagcggaaccccuacgagaacauccuguacaagaucugccugagcggggacggcuggcccuacaucgccucccgcaccagcaucacggggcgggccugggagaacaccgugguggaccucgaguccgacggcaagccccagaaggcgggcagcaacaacuccaacaagagccugcaguccgccggguucaccgccggccugaccuacagccagcucaugacgcugaaggacgccaugcugcagcuggacccgaacgccaagaccuggauggacaucgaggggcgccccgaggaccccgucgagaucgcgcucuaccagcccuccagcggcugcuacauccacuucuuccgggagccgaccgaccugaagcaguucaagcaggacgccaaguacucccacgggaucgacgugaccgaccuguucgccgcccagcccggccucacgagcgccgugaucgacgcgcugccccgcaacauggucaucacgugccagggcuccgacgacauccgcaagcugcucgagagccaggggcggaaggacaucaagcugaucgacaucgcccugagcaagaucgacucccgcaaguacgagaacgccgugugggaccaguacaaggaccucugccacaugcacaccggcgucgugguggagaagaagaagcgcgggggcaaggaggagaucacgccccacugcgcccugauggacugcaucauguucgacgcggccgucagcgggggccugaacucccucgugcugcgggccgugcugccgcgggacauggucuuccgcaccagcacgccccggguggugcucugaggacuagucccuguucccagagcccacuuuuuuuucuuuuuuugaaauaaaauagccugucuuucagaucucaaaggcucuuuucagagccaccaaaaaaaaaaaaaaaaaaaaaaaaaaaaaaaaaaaaaaaaaaaaaaaaaaaaaaaaaaaaaaaaagaauu

SEQ ID NO: 18439 - RNA, 2033 nt, Artificial Sequence
  mRNA product Design a-2 (hSL-A64-N5) comprising derived and/or modified sequence from MOPV/LASV reassortant(IGS-1;Clade IV)__AFY05578__SP-HsPLAT_NP(2-569) (opt1)
aggagaguccgcucagccagguugcagaagcggcuuagcguguguccuaaucuucucucugcguguagguaggccugugccgcaaacaagcuuaccauggacgccaugaagcgcggccugugcugcgugcuccugcugugcggggccgucuucgugagccccagcgccuccaaggagaucaagagcuuccuguggacccagucccuccgccgggagcugagcggcuacugcuccaacaucaagcuccagguggucaaggacgcccaggcgcugcugcacgggcuggacuucagcgagguguccaacgugcagcgccucaugcggaaggagcgccgggacgacaacgaccugaagcgccugcgggaccucaaccaggccgucaacaaccugguggagcucaagagcacccagcagaaguccauccugcgcgugggcacccugaccagcgacgaccugcucauccuggccgccgaccuggagaagcuccgguccaaggucauccgcaccgagcggccccugagcgccgggguguacaugggcaaccuguccagccagcagcucgaccagcgccgggcgcugcugaacaugaucgggauguccggcggcaaccagggggcccgcgccggccgggacggggugguccgcgugugggacgugaagaacgccgagcuccugagcaaccaguucggcaccaugccgucccugacgcucgcgugccugaccaagcaggggcaggucgaccugaacgacgccgugcaggcccucaccgaccugggccugaucuacaccgccaaguaccccaacacgagcgaccucgaccggcugacccagucccaccccauccugaacaugaucgacaccaagaaguccagccucaacaucuccggcuacaacuucagccugggggccgcggugaaggccggcgccugcaugcuggacgggggcaacaugcucgagaccaucaaggucagcccccagacgauggacggcauccucaagagcauccugaaggugaagaaggcccuggggauguucaucuccgacaccccgggcgagcgcaaccccuacgagaacauccuguacaagaucugccugagcggggacggcuggcccuacaucgccucccggaccagcaucaccgggcgcgcgugggagaacacgguggucgaccucgaguccgacggcaagccccagaaggccgacagcaacaacuccagcaagucccugcagagcgccggcuucaccgccgggcugaccuacucccagcucaugacccugaaggacgccaugcugcagcuggacccgaacgcgaagacguggauggacaucgagggccggcccgaggaccccguggagaucgcccucuaccagcccagcuccgggugcuacauccacuucuuccgcgagccgaccgaccugaagcaguucaagcaggacgccaaguacagccacggcaucgacgugaccgaccuguucgccacccagcccgggcucacguccgccgucaucgacgcgcugccccgcaacauggugaucacgugccagggcagcgacgacauccggaagcugcucgagagccagggccgcaaggacaucaagcugaucgacaucgaccuguccaagaccgacagccggaaguacgagaacgccgugugggaccaguacaaggaccucugccacaugcacaccggggucguggucgagaagaagaagcgcggcgggaaggaggagaucaccccgcacugcgcccugauggacugcaucauguucgacgccgcgguguccggcgggcugaacaccagcgugcuccgggccguccugccccgcgacaugguguuccggaccuccacgccccgcgugguccugugaggacuagucccuguucccagagcccacuuuuuuuucuuuuuuugaaauaaaauagccugucuuucagaucucaaaggcucuuuucagagccaccaaaaaaaaaaaaaaaaaaaaaaaaaaaaaaaaaaaaaaaaaaaaaaaaaaaaaaaaaaaaaaaaagaauu

SEQ ID NO: 18440 - RNA, 2033 nt, Artificial Sequence
  mRNA product Design a-2 (hSL-A64-N5) comprising derived and/or modified sequence from LASV(LM765-SLE-2012;Clade IV)__AIT17815__SP-HsPLAT_NP(2-569) (opt1)
aggagaguccgcucagccagguugcagaagcggcuuagcguguguccuaaucuucucucugcguguagguaggccugugccgcaaacaagcuuaccauggacgccaugaagcgcggccugugcugcgugcuccugcugugcggggccgucuucgugagccccagcgccuccaaggagaucaagagcuuccuguggacccagucccuccgccgggagcugagcggcuacugcuccaacaucaagcuccagguggucaaggacgcccaggcgcugcugcacgggcuggacuucagcgagguguccaacgugcagcgccucaugcggaaggagcgccgggacgacaacgaccugaagcgccugcgggaccucaaccaggccgucaacaaccugguggagcucaagagcacccagcagaaguccauccugcgcgugggcacccugaccagcgacgaccugcucauccuggccgccgaccuggagaagcucaaguccaaggucacccggaccgagcgcccccugagcgccgggguguacaugggcaaccuguccagccagcagcucgaccagcggcgcgcgcugcuggacaugaucgggauguccggcagcaaccagggcgcccgggccgggcgcgacggcgugguccgggugugggacgugaagaacgccgagcuccugaacaaccaguucgggacgaugccgucccugacccucgcgugccugaccaagcagggccaggucgaccugaacgacgccgugcaggcccucaccgaccuggggcugaucuacacggccaaguaccccaacaccagcgaccucgaccgccugacccagucccaccccauccugaacaugaucgacaccaagaaguccagccucaacaucuccggcuacaacuucagccugggcgccgcggugaaggccggggccugcaugcuggacggcgggaacaugcucgagacgaucaaggucagcccccagaccauggacggcauccucaagagcauccugaaggugaagaaggcccugggcauguucaucuccgacgccccgggggagcggaaccccuacgagaacauccuguacaagaucugccugagcggcgacggguggcccuacaucgcgucccgcaccagcaucaccggccgggccugggagaacacgguggucgaccucgaguccgacgggaagccccagaaggccggcagcaacggcuccaacaagagccugcaguccgccggguucaccgccggccugaccuacagccagcucaugacccugaaggacgcgaugcugcagcuggacccgaacgccaagacguggauggacaucgaggggcgccccgaggaccccguggagaucgcccucuaccagcccuccagcggcugcuacauccacuucuuccgggagccgaccgaccugaagcaguucaagcaggacgccaaguacucccacgggaucgacgugaccgaccuguucgccgcgcagcccggccucaccagcgccgucaucgacgcccugccccgcaacauggugaucacgugccagggcuccgacgacauccgcaagcuguucgagagccaggggcggaaggacaucaagcucaucgacaucgcccugagcaagaccgacucccgcaaguacgagaacgcggugugggaccaguacaaggaccugugccacaugcacaccggcaucgucguggagaagaagaagcgcgggggcaaggaggagaucacgccccacugcgcccucauggacugcaucauguucgacgccgccgucagcgggggccugaacaccuccgugcugcgggccgugcucccgcgggacauggucuuccgcaccagcacgccccggguggugcugugaggacuagucccuguucccagagcccacuuuuuuuucuuuuuuugaaauaaaauagccugucuuucagaucucaaaggcucuuuucagagccaccaaaaaaaaaaaaaaaaaaaaaaaaaaaaaaaaaaaaaaaaaaaaaaaaaaaaaaaaaaaaaaaaagaauu

SEQ ID NO: 18441 - RNA, 2033 nt, Artificial Sequence
  mRNA product Design a-2 (hSL-A64-N5) comprising derived and/or modified sequence from LASV(LM776-SLE-2012;Clade IV)__AIT17825__SP-HsPLAT_NP(2-569) (opt1)
aggagaguccgcucagccagguugcagaagcggcuuagcguguguccuaaucuucucucugcguguagguaggccugugccgcaaacaagcuuaccauggacgccaugaagcgcggccugugcugcgugcuccugcugugcggggccgucuucgugagccccagcgccuccaaggagaucaagagcuuccuguggacccagucccuccgccgggagcugagcuccuacugcagcaacaucaagcuccagguggucaaggacgcccaggcgcugcugcacggccuggacuucuccgaggugagcaacgugcagcgccucaugcggaaggagcgccgggacgacaacgaccugaagcgccugcgggaccucaaccaggccgucaacaaccugguggagcugaaguccacccagcagaaguccauccuccgcguggggacccugaccuccgacgaccugcucauccuggccgccgaccuggagaagcucaagagcaaggucacccggaccgagcgcccccuguccgccggcguguacauggggaaccugagcucccagcagcucgaccagcggcgcgcgcugcugagcaugaucggcauguccgggagcaaccagggcgcccgggccggccgcgacggggugguccgggugugggacgugaagaacgccgagcuccugaacaaccaguucggcacgaugccgucccugacccucgcgugccugaccaagcaggggcaggucgaccugaacgacgccgugcaggcccucaccgaccugggccugaucuacacggccaaguaccccaacaccagcgaccucgaccgccugacccagagccaccccauccugaacaugaucgacaccaagaaguccagccucaacaucuccggguacaacuucagccugggcgccgcggugaaggccggcgccugcaugcuggacgggggcaacaugcucgagacgaucaaggucagcccccagaccauggacgggauccucaagagcauccugaaggugaagaaggcccugggcauguucaucuccgacaccccgggcgagcggaaccccuacgagaacauccuguacaagaucugccugagcggggacggcuggcccuacaucgccucccgcaccagcaucacggggcgggcgugggagaacaccguggucgaccucgaguccgacggcaagccccagaaggccgggagcaacaacuccaacaagagccugcaguccgccggcuucaccgccggccugaccuacagccagcucaugacgcugaaggacgccaugcugcagcuggacccgaacgcgaagaccuggauggacaucgaggggcgccccgaggaccccguggagguggcccucuaccagcccuccagcggcugcuacauccacuucuuccgggagccgaccgaccugaagcaguucaagcaggacgccaaguacucccacgggaucgacgucaccgaccuguucgccgcccagcccggccucacgagcgcggugaucgacgcccugccccgcaacauggugaucacgugccaggggagcgacgacauccgcaagcugcucgagucccagggccggaaggacaucaagcugaucgacaucgcccugagcaagaccgacucccgcaaguacgagaacgccgucugggaccaguacaaggaccucugccacaugcacaccggcguggucguggagaagaagaagcgcgggggcaaggaggagaucaccccgcacugcgcgcugauggacugcaucauguucgacgccgccgugagcgggggccugaacaccuccguccuccgggccgugcugccccgggacaugguguuccgcaccagcacgccccgggucgugcugugaggacuagucccuguucccagagcccacuuuuuuuucuuuuuuugaaauaaaauagccugucuuucagaucucaaaggcucuuuucagagccaccaaaaaaaaaaaaaaaaaaaaaaaaaaaaaaaaaaaaaaaaaaaaaaaaaaaaaaaaaaaaaaaaagaauu

SEQ ID NO: 18442 - RNA, 2033 nt, Artificial Sequence
  mRNA product Design a-2 (hSL-A64-N5) comprising derived and/or modified sequence from LASV(Mad39;Clade IV)__ANH09723__SP-HsPLAT_NP(2-569) (opt1)
aggagaguccgcucagccagguugcagaagcggcuuagcguguguccuaaucuucucucugcguguagguaggccugugccgcaaacaagcuuaccauggacgccaugaagcgcggccugugcugcgugcuccugcugugcggggccgucuucgugagccccagcgccuccaaggagaucaagagcuuccuguggacccagucccuccgccgggagcugagcggcuacugcuccaacaucaagcuccagguggucaaggacgcccaggcgcugcugcacgggcuggacuucagcgagguguccaacgugcagcgccucaugcggaagcagcgccgggacgacaacgaccugaagcgccugcgggaccucaaccaggccgucaacaaccugguggagcugaaguccacccagcagaaguccgugcuccgcgucggcacgcugaccagcgacgaccugcucacccuggccgccgaccuggagaagcucaaguccaaggugacccggacggagcgcccccugaccgccgggguguacaugggcaaccugagcucccagcagcucgaccagcggcgcgcgcugcugaacaugaucgggaugagcggcggcaaccagggggcccggaccggccgcgacggggucgugcgggugugggacgucaagaacgccgagcuccugaacaaccaguucggcaccaugccgucccugacgcucgccugccugaccaagcagggccagguggaccugaacgacgugguccaggcgcucaccgaccuggggcugaucuacaccgccaaguaccccaacacgagcgaccucgaccgccugacccagucccaccccauccugaacaugaucgacaccaacaagagcucccucaacaucagcggcuacaacuucagccugggggccgccgugaaggccggcgcgugcaugcuggacgggggcaacaugcucgagaccaucaaggugagcccccagacgauggacggcauccucaagagcauccugaaggucaagaagucccuggggauguucaucagcgacaccccgggcgagcggaaccccuacgagaacauccuguacaagaucugccuguccggggacggcuggcccuacaucgccagccgcaccuccaucaccgggcgggccugggagaacacggugguggaccucgagagcggcggcaagccccagaaggccggguccaacaacagcaacaagucccugcagagcgccggcuucgcggccgggcugaccuacucccagcucaugacccugaaggacgccaugcugcagcuggacccgaacgccaagaccuggauggacaucgagggccgccccgaggaccccgucgagaucgcccucuaccagcccaucagcgggugcuacauccacuucuuccgggagccgacggaccugaagcaguucaagcaggacgcgaaguacucccacggcaucgacgugaccgaccuguucgccgcccagcccggccucaccagcgccgugaucgaggcccugccccgcaacauggucaucacgugccagggguccgacgacauccgcaagcuguucgagagccagggccggaaggacaucaagcucaucgacaucgcgcuguccaagaccgacagccgcaaguacgagaacgccgugugggaccaguacaaggaccugugccacaugcacaccggggucgugguggagaagaagaagaagggcgggaaggaggagaucacgccccacugcgcccucauggacugcaucauguucgacgccgcggucagcggcggccugaacacccuggugcuccgggccgugcugccgcgcgacauggucuuccggaccuccacccccaagguggugcugugaggacuagucccuguucccagagcccacuuuuuuuucuuuuuuugaaauaaaauagccugucuuucagaucucaaaggcucuuuucagagccaccaaaaaaaaaaaaaaaaaaaaaaaaaaaaaaaaaaaaaaaaaaaaaaaaaaaaaaaaaaaaaaaaagaauu

SEQ ID NO: 18443 - RNA, 2033 nt, Artificial Sequence
  mRNA product Design a-2 (hSL-A64-N5) comprising derived and/or modified sequence from LASV(Z0947-SLE-2011;Clade IV)__AIT17841__SP-HsPLAT_NP(2-569) (opt1)
aggagaguccgcucagccagguugcagaagcggcuuagcguguguccuaaucuucucucugcguguagguaggccugugccgcaaacaagcuuaccauggacgccaugaagcgcggccugugcugcgugcuccugcugugcggggccgucuucgugagccccagcgccuccaaggagaucaagagcuuccuguggacccagucccuccgccgggagcugagcggcuacugcuccaacaucaagcuccagguggucaaggacgcccaggcgcugcugcacgggcuggacuucagcgagguguccaacgugcagcgccucaugcggaaggagcgccgggacgacaacgaccugaagcgccugcgggaccucaaccaggccgucaacaaccugguggagcucaagagcacccagcagaaguccauccugcgcgugggcacccugaccagcgacgaccugcucauccuggccgccgaccuggagaagcucaaguccaaggucacccggaccgagcgcccccugagcgccgggguguacaugggcaaccuguccagccagcagcucgaccagcggcgcgcgcugcugaacaugaucgggauguccggcagcaaccagggcgcccggacggggcgcgacggcgugguccgggugugggacgugaagaacgccgagcuccugaacaaccaguucgggaccaugccgucccugacccucgccugccugaccaagcagggccaggucgaccugaacgacgcggugcaggcccucacggaccuggggcugaucuacaccgccaaguaccccaacaccagcgaccucgaccgccugacccagucccaccccauccugaacaugaucgacacgaagaaguccagccucaacaucuccggcuacaacuucagccugggcgccgccgugaaggcgggggccugcaugcuggacggcgggaacaugcucgagaccaucaaggucagcccccagaccauggacggcauccucaagagcauccugaaggugaagaaggcccugggcauguucaucuccgacgccccgggggagcggaaccccuacgagaacauccuguacaagaucugccugagcggcgacggguggcccuacaucgccucccgcaccagcaucacgggccgggcgugggagaacaccguggucgaccucgaguccgacgggaagccccagaaggccggcagcaacggcuccaacaagagccugcaguccgccggguucaccgccggccugaccuacagccagcucaugacgcugaaggacgccaugcugcagcuggacccgaacgcgaagaccuggauggacaucgaggggcgccccgaggaccccguggagaucgcccucuaccagcccuccagcggcugcuacauccacuucuuccgggagccgaccgaccugaagcaguucaagcaggacgccaaguacucccacgggaucgacgugaccgaccuguucgccgcccagcccggccucacgagcgcggucaucgacgcccugccccgcaacauggugaucacgugccagggcuccgacgacauccgcaagcuguucgagagccaggggcggaaggacaucaagcucaucgacaucgcccugagcaagaccgacucccgcaaguacgagaacgccgugugggaccaguacaaggaccugugccacaugcacaccggcaucgucguggagaagaagaagcgcgggggcaaggaggagaucaccccgcacugcgcgcucauggacugcaucauguucgacgccgccgucagcgggggccugaacaccuccgugcugcgggccgugcucccccgggacauggucuuccgcaccagcacgccccggguggugcugugaggacuagucccuguucccagagcccacuuuuuuuucuuuuuuugaaauaaaauagccugucuuucagaucucaaaggcucuuuucagagccaccaaaaaaaaaaaaaaaaaaaaaaaaaaaaaaaaaaaaaaaaaaaaaaaaaaaaaaaaaaaaaaaaagaauu

SEQ ID NO: 18444 - RNA, 2033 nt, Artificial Sequence
  mRNA product Design a-2 (hSL-A64-N5) comprising derived and/or modified sequence from LASV(Josiah;Clade IV)__NP_694869__SP-HsPLAT_NP(2-569) (opt4)
aggagaguccgcucagccagguugcagaagcggcuuagcguguguccuaaucuucucucugcguguagguaggccugugccgcaaacaagcuuaccauggacgccaugaagagaggccugugcugcgugcugcugcugugcggcgccguguucgugagccccagcgccagcaaggagaucaagagcuuccuguggacccagagccugagaagagagcugagcggcuacugcagcaacaucaagcugcagguggugaaggacgcccaggcccugcugcacggccuggacuucagcgaggugagcaacgugcagagacugaugagaaaggagagaagagacgacaacgaccugaagagacugagagaccugaaccaggccgugaacaaccugguggagcugaagagcacccagcagaagagcauccugagagugggcacccugaccagcgacgaccugcugauccuggccgccgaccuggagaagcugaagagcaaggugaucagaaccgagagaccccugagcgccggcguguacaugggcaaccugagcagccagcagcuggaccagagaagagcccugcugaacaugaucggcaugagcggcggcaaccagggcgccagagccggcagagacggcguggugagagugugggacgugaagaacgccgagcugcugaacaaccaguucggcaccaugcccagccugacccuggccugccugaccaagcagggccagguggaccugaacgacgccgugcaggcccugaccgaccugggccugaucuacaccgccaaguaccccaacaccagcgaccuggacagacugacccagagccaccccauccugaacaugaucgacaccaagaagagcagccugaacaucagcggcuacaacuucagccugggcgccgccgugaaggccggcgccugcaugcuggacggcggcaacaugcuggagaccaucaaggugagcccccagaccauggacggcauccugaagagcauccugaaggugaagaaggcccugggcauguucaucagcgacacccccggcgagagaaaccccuacgagaacauccuguacaagaucugccugagcggcgacggcuggcccuacaucgccagcagaaccagcaucaccggcagagccugggagaacaccgugguggaccuggagagcgacggcaagccccagaaggccgacagcaacaacagcagcaagagccugcagagcgccggcuucaccgccggccugaccuacagccagcugaugacccugaaggacgccaugcugcagcuggaccccaacgccaagaccuggauggacaucgagggcagacccgaggaccccguggagaucgcccuguaccagcccagcagcggcugcuacauccacuucuucagagagcccaccgaccugaagcaguucaagcaggacgccaaguacagccacggcaucgacgugaccgaccuguucgccacccagcccggccugaccagcgccgugaucgacgcccugcccagaaacauggugaucaccugccagggcagcgacgacaucagaaagcugcuggagagccagggcagaaaggacaucaagcugaucgacaucgcccugagcaagaccgacagcagaaaguacgagaacgccgugugggaccaguacaaggaccugugccacaugcacaccggcguggugguggagaagaagaagagaggcggcaaggaggagaucaccccccacugcgcccugauggacugcaucauguucgacgccgccgugagcggcggccugaacaccagcgugcugagagccgugcugcccagagacaugguguucagaaccagcacccccagaguggugcugugaggacuagucccuguucccagagcccacuuuuuuuucuuuuuuugaaauaaaauagccugucuuucagaucucaaaggcucuuuucagagccaccaaaaaaaaaaaaaaaaaaaaaaaaaaaaaaaaaaaaaaaaaaaaaaaaaaaaaaaaaaaaaaaaagaauu

SEQ ID NO: 18445 - RNA, 2033 nt, Artificial Sequence
  mRNA product Design a-2 (hSL-A64-N5) comprising derived and/or modified sequence from LASV(LP;Clade I)__AAF86702__SP-HsPLAT_NP(2-569) (opt4)
aggagaguccgcucagccagguugcagaagcggcuuagcguguguccuaaucuucucucugcguguagguaggccugugccgcaaacaagcuuaccauggacgccaugaagagaggccugugcugcgugcugcugcugugcggcgccguguucgugagccccagcaacagcaaggagaucaagagcuuccuguggacccagagccugagaagagagcugagcggcuacugcagcaacaucaagcugcagguggugaaggacgcccaggcccugcugcacggccuggacuucagcgaggugagcaacgugcagagacugaugagaaagcagaagagagacgacgccgaccugaagagacugagagaccugaaccaggccgugaacaaccugguggagcugaagagcacccagcagaagaacgugcugagagugggcacccugagcagcgacgaccugaucacccuggccgccgaccuggagaagcugaagagcaaggugaucagaaccgagagaccccugagcagcggcguguacaugggcaaccugagcagccagcagcuggaccagagaagagcccugcugagcaugaucggcaugagcggcggcccccagggcaacagaaccggcggcgacggcguggugagagugugggacgugaagaacgccgagcugcugaacaaccaguucggcaccaugcccagccugacccuggccugccugaccaagcagggccagguggaccugaacgacgccgugcaggcccugaccgaccugggccugaucuacaccgccaaguaccccaacagcagcgaccuggacaugcugacccagagccaccccauccugggcaugguggacaccaagaagagcagccugaacaucagcggcuacaacuucagccugggcgccgccgugaaggccggcgccugcaugcuggacggcggcaacaugcuggagaccaucaaggugagcccccagaccauggacggcauccugaagagcauccugaaggugaagagaagccugggcauguucaucagcgacacccccggcgagagaaaccccuacgagaacauccuguacaagaucugccugagcggcgagggcuggcccuacaucgccagcagaaccagcaucaccggcagagccugggagaacacccugguggaccuggagagcgacaacaagccccccaagcugaacagcgccggcagcaacaagagccugcaggccgccggccugaacgccggccugaccuacagccagcugaugacccugaaggacugcaugcugcagcuggaccccagcagcaagaccuggaucgacaucgagggcagacccgaggaccccguggagaucgcccuguuccagcccagcagcggcugcuacauccacuucuucagagagcccaccgaccugaagcaguucaagcaggacgccaaguacagccacggcaucgacgugaccgaccuguucagcacccagcccggccugaccagcgccgugaucgaggcccugcccagaaacauggugcugaccugccagggcagcgacgacaucaagaagcugcuggagagccagggcagaagagacaucaagcugaucgacaucagccugagcaaggccgacagcagaaaguucgagaacgccgugugggaccaguacaaggaccugugccacaugcacaccggcguggugguggagaagaagaagagaggcggcaaggaggagaucaccccccacugcgcccugcuggacugcaucauguucgacgccgccaccaccggcagccugaacaucaccacccugagagccgugcugcccagagacaugguguucagaaccagcacccccaagguggugcugugaggacuagucccuguucccagagcccacuuuuuuuucuuuuuuugaaauaaaauagccugucuuucagaucucaaaggcucuuuucagagccaccaaaaaaaaaaaaaaaaaaaaaaaaaaaaaaaaaaaaaaaaaaaaaaaaaaaaaaaaaaaaaaaaagaauu

SEQ ID NO: 18446 - RNA, 2033 nt, Artificial Sequence
  mRNA product Design a-2 (hSL-A64-N5) comprising derived and/or modified sequence from LASV(803213;Clade II)__AAF86704__SP-HsPLAT_NP(2-569) (opt4)
aggagaguccgcucagccagguugcagaagcggcuuagcguguguccuaaucuucucucugcguguagguaggccugugccgcaaacaagcuuaccauggacgccaugaagagaggccugugcugcgugcugcugcugugcggcgccguguucgugagccccagcgccagcaaggaggugaagagcuuccuguggacccagagccugagaagagagcugagcggcuacugcagcaacaucaagcugcagguggugaaggacgcccaggcccugcugcacggccuggacuucagcgaggugaacaacgugcagagacugaugagaaagcagaagagagacgacggcgaccugaagagacugagagaccugaaccaggccgugaacaaccugguggagcugaagagcacccagcagaagagcauccugagagugggcacccugaccagcgacgaccugcugacccuggccgccgaccuggagaagcugaagagcaaggugaucagaaccgagagaccccugagcagcggcguguacaugggcaaccugagcacccagcagcuggagcagagaagagcccugcugaacaugaucggcauggugggcggcgcccagggcacccagcccggcagagacggcguggugagagugugggacgugaagaaccccgaccugcugaacaaccaguucggcaccaugcccagccugacccuggccugccugaccaagcagggccagguggaccugaacgacgccgugcuggcccugaccgaccugggccugaucuacaccgccaaguaccccaacagcagcgaccuggacagacugagccagagccaccccauccugaacaugguggacaccaagaagagcagccugaacaucagcggcuacaacuucagccugggcgccgccgugaaggccggcgccugcaugcuggacggcggcaacaugcuggagaccaucaaggugaccccccagaccauggacggcauccugaagagcauccugaaggugaagagaagccugggcauguucgugagcgacacccccggcgagagaaaccccuacgagaacauccuguacaagaucugccugagcggcgacggcuggcccuacaucgccagcagaaccagcaucgugggcagagccugggagaacaccaccguggaccuggagagcgacggcaagccccagaaggugggcaccgccggcagcaacaagagccugcagagcgccggcuuccccaccggccugaccuacagccagcugaugacccugaaggacagcaugaugcagcuggaccccagcgccaagaccuggaucgacaucgagggcagacccgaggaccccguggagaucgcccuguaccagcccaugagcggcugcuacauccacuucuucagagagcccaccgaccugaagcaguucaagcaggacgccaaguacagccacggcaucgacguggccgaccuguuccccgcccagcccggccugaccagcgccgugaucgaggcccugcccagaaacauggugcugaccugccagggcagcgacgacaucaagaagcugcuggacagccagggcagaagagacaucaagcugaucgacaucagccugagcaagguggacagcagaaaguucgagaacgccgugugggaccagugcaaggaccugugccacaugcacaccggcguggugguggagaagaagaagagaggcggcaaggaggagaucaccccccacugcgcccugauggacugcaucauguucgacgccgccgugagcggcggccugaacauccccgugcugagagccgugcugcccagagacaugguguucagaaccagcagccccaagguggugcugugaggacuagucccuguucccagagcccacuuuuuuuucuuuuuuugaaauaaaauagccugucuuucagaucucaaaggcucuuuucagagccaccaaaaaaaaaaaaaaaaaaaaaaaaaaaaaaaaaaaaaaaaaaaaaaaaaaaaaaaaaaaaaaaaagaauu

SEQ ID NO: 18447 - RNA, 2036 nt, Artificial Sequence
  mRNA product Design a-2 (hSL-A64-N5) comprising derived and/or modified sequence from LASV(GA391;Clade III)__CAA36646__SP-HsPLAT_NP(2-570) (opt4)
aggagaguccgcucagccagguugcagaagcggcuuagcguguguccuaaucuucucucugcguguagguaggccugugccgcaaacaagcuuaccauggacgccaugaagagaggccugugcugcgugcugcugcugugcggcgccguguucgugagccccagcgccagcaaggaggugagaagcuuccuguggacccagagccugagaagagagcugagcggcuacugcagcaacaucaagcugcagguggugaaggacgcccaggcccugcugcacggccuggacuucagcgaggugagcaacgugcagagacugaugagaaagcagaagagagacgacggcgaccugaagagacugagagaccugaaccaggccgugaacaaccugguggagcugaagagcacccagcagaagagcgugcugagagugggcacccugagcagcgacgaccugcugauccuggccgccgaccuggagaagcugaagagcaaggugaccagaaccgagagaccccugagcagcggcguguacaugggcaaccugagcagccagcagcuggaccagagaagagcccugcugaacaugaucggcaugaccggcgugagcggcggcggcaagggcgccagcgacggcaucgugagagugugggacgugaagaacgccgagcugcugaacaaccaguucggcaccaugcccagccugacccuggccugccugaccaagcagggccagguggaccugaacgacgccgugcaggcccugaccgaccugggccugaucuacaccgccaaguaccccaacagcagcgaccuggacagacugagccagagccaccccauccugaacaugaucgacaccaagaagagcagccugaacaucagcggcuacaacuucagccugggcgccgccgugaaggccggcgccugcaugcuggacggcggcaacaugcuggagaccaucaaggugagcccccagaccauggacggcauccugaagagcauccugaaggugaagaagagccugggcauguucgugagcgacacccccggcgagagaaaccccuacgagaacauccuguacaagaucugccugagcggcgacggcuggcccuacaucgccagcagaaccagcaucgugggcagagccugggagaacaccgugguggaccuggagcaggacaacaagccccagaagaucggcaacggcggcagcaacaagagccugcagagcgccggcuucgccgccggccugaccuacagccagcugaugacccugaaggacuucaagugcuucaaccugauccccaacgccaagaccuggauggacaucgagggcagacccgaggaccccguggagaucgcccuguaccagcccagcagcggcugcuacgugcacuucuucagagagcccaccgaccugaagcaguucaagcaggacgccaaguacagccacggcaucgacgugaccgaccuguucgccgcccagcccggccugaccagcgccgugaucgaggcccugcccagaaacauggugaucaccugccagggcagcgaggacaucagaaagcugcuggagagccagggcagaagagacaucaagcugaucgacaucacccugagcaaggccgacagcagaaaguucgagaacgccgugugggaccaguucaaggaccugugccacaugcacaccggcguggugguggagaagaagaagagaggcggcaaggaggagaucaccccccacugcgcccugauggacugcaucauguucgacgccgccgugagcggcggccuggacgccaaggugcugagaguggugcugcccagagacaugguguucagaaccagcacccccaagguggugcugugaggacuagucccuguucccagagcccacuuuuuuuucuuuuuuugaaauaaaauagccugucuuucagaucucaaaggcucuuuucagagccaccaaaaaaaaaaaaaaaaaaaaaaaaaaaaaaaaaaaaaaaaaaaaaaaaaaaaaaaaaaaaaaaaagaauu

SEQ ID NO: 18448 - RNA, 2033 nt, Artificial Sequence
  mRNA product Design a-2 (hSL-A64-N5) comprising derived and/or modified sequence from LASV(AV;Clade V)__CCA30315__SP-HsPLAT_NP(2-569) (opt4)
aggagaguccgcucagccagguugcagaagcggcuuagcguguguccuaaucuucucucugcguguagguaggccugugccgcaaacaagcuuaccauggacgccaugaagagaggccugugcugcgugcugcugcugugcggcgccguguucgugagccccagcgccagcaaggaggugaagagcuuccuguggacccagagccugagaagagagcugagcggcuacugcagcaacaucaagcugcagguggugaaggacgcccaggcccugcugcacggccuggacuucagcgaggugagcaacgugcagagacugaugagaaagcagagaagagacgacagcgaccugaagagacugagagaccugaaccaggccgugaacaaccugguggagcugaagagcacccagcagaagagcgugcugagagugggcacccugagcagcgacgaccugcugacccuggccgccgaccuggagaagcugaagagcaaggugaccagaaccgagagaccccugagcagcggcguguacaugggcaaccugagcagccagcagcuggaccagagaagagcccugcugaaccugaucggcaugaccaacggcagccagggcagccaggccggcagagacggcguggugagagugugggacgugaagaacgccgagcugcugaacaaccaguucggcaccaugcccagccugacccuggccugccugaccaagcagggccagguggaccugaacgacguggugcaggcccugaccgaccugggccugaucuacaccgccaaguaccccaacaccagcgaccuggacagacugacccagagccaccccauccugaacaugaucgacaccaagaagagcagccugaacaucagcggcuacaacuucagccugggcgccgccgugaaggccggcgccugcaugcuggacggcggcaacaugcuggagaccaucaaggugagcccccagagcauggacggcauccugaagagcauccugaaggugaagagagcccugggcauguucgugagcgacacccccggcgagagaaaccccuacgagaacauccuguacaagaucugccugagcggcgacggcuggcccuacaucgccagcagaaccagcaucgugggcagagccugggagaacaccgugguggaccuggagaccgacggcaagccccagaagaucggcagcggcaacagcaacaagagccugcagagcgccggcuucagcgccggccugaccuacagccagcugaugacccugaaggacgccaugcugcagcuggaccccaacgccaagaccuggauggacaucgagggcagacccgaggaccccguggagguggcccuguaccagcccaucagcggcugcuacauccacuucuucagagagcccaccgaccugaagcaguucaagcaggacgccaaguacagccacggcaucgacaucgccgaccuguucgccgcccagcccggccugaccagcgccgugaucgaggcccugcccagaaacauggugaucaccugccagggcagcgaggacaucaagaagcugcuggagagccagggcagaaaggacaucaagcugaucgacaucgcccugagcaagaucgacagcagaaaguucgagaacgccgugugggaccaguacaaggaccugugccacaugcacaccggcguggugguggagaagaagaagagaggcggcaaggaggagaucaccccccacugcgcccugauggacugcaucauguucgacgccgccgugagcggcggccugaacacccuggugcugagagccgugcugcccagagacaugguguucagaaccagcacccccagaguggugcugugaggacuagucccuguucccagagcccacuuuuuuuucuuuuuuugaaauaaaauagccugucuuucagaucucaaaggcucuuuucagagccaccaaaaaaaaaaaaaaaaaaaaaaaaaaaaaaaaaaaaaaaaaaaaaaaaaaaaaaaaaaaaaaaaagaauu

SEQ ID NO: 18449 - RNA, 2033 nt, Artificial Sequence
  mRNA product Design a-2 (hSL-A64-N5) comprising derived and/or modified sequence from LASV(Togo/2016/7082;Clade VI)__AMR44578__SP-HsPLAT_NP(2-569) (opt4)
aggagaguccgcucagccagguugcagaagcggcuuagcguguguccuaaucuucucucugcguguagguaggccugugccgcaaacaagcuuaccauggacgccaugaagagaggccugugcugcgugcugcugcugugcggcgccguguucgugagccccagcaacagcaaggaggugaagagcuuccuguggacccagagccugagaagagagcugagcggcuacugcagcaacaucaagcugcagguggugaaggacgcccaggcccugcugcacggccuggacuucagcgaggugagcaacgugcagagacugaugagaaagcagaagagagacgacggcgaccugaagagacugagagaccugaaccaggccgugaacaaccugguggagcugaagagcgugcagcagaagagcauccugagagugggcacccugaccagcgacgaccugcugacccuggccgccgaccuggagaagcugaagagcaaggugaccagaaccgagagaccccugagcagcggcguguacaugggcaaccugagcagccagcagcuggaccagagaagagcccugcugagcaugaucggcaugagcggcggcaaccagaacagccagcccaagggcgacggcguggugagagugugggacgugaagaacgccgaccugcugaacaaccaguucggcaccaugcccagccugacccuggccugccugaccaagcagggccagguggaccugaacgacgccgugcaggcccugaccgaccugggccugaucuacaccgccaaguaccccaacagcagcgaccuggacagacugagccagagccaccccauccugaacaugaucgacaccaagaagagcagccugaacaucagcggcuacaacuucagccugggcgccgccaucaagaccggcgccugcaugcuggacggcggcaacaugcuggagaccaucaaggugaccccccagaccauggacggcauccugaagagcauccugaaggugaagagaagccugggcauguucaucagcgacacccccggcgagagaaaccccuacgagaacauccuguacaagaucugccugagcggcgacggcuggcccuacaucgccagcagaaccgccaucaucggcagagccugggagaacaccgugguggaccuggagagcgacagcaagccccagaagaucggcagcaacggcagcaacaagagccugcagagcgccggcuucgcccccggccugaccuacagccagcugaugacccugaaggacagcaugcugcagcuggaccccaacgccaagaccuggaucgacaucgagggcagacccgaggaccccguggagguggcccuguuccagcccaucagcggcugcuacauccacuucuucagagagcccaccgaccugaagcaguucaagcaggacgccaaguacagccacggcaucgacgugaccgaccuguucgccgcccagcccggccugaccagcgccgugaucgaggcccugcccagaaacauggugcugaccugccagggcagcgacgacaucaagaagcugcuggacagccagggcagaagagacaucaagcugaucgacgugagccugaacaagaucgacagcagaaaguucgagaacgccgugugggaccaguacaaggaccugugccacaugcacaccggcguggugguggagaagaagaagaagggcggcaaggaggagaucaccccccacugcgcccugcuggacugcaucauguucgacgccgccgugagcggcggccugaacgccaccgugcugagagccgugcugcccagagacaugguguucagaaccagcagccccaagguggugcugugaggacuagucccuguucccagagcccacuuuuuuuucuuuuuuugaaauaaaauagccugucuuucagaucucaaaggcucuuuucagagccaccaaaaaaaaaaaaaaaaaaaaaaaaaaaaaaaaaaaaaaaaaaaaaaaaaaaaaaaaaaaaaaaaagaauu

SEQ ID NO: 18450 - RNA, 2033 nt, Artificial Sequence
  mRNA product Design a-2 (hSL-A64-N5) comprising derived and/or modified sequence from LASV(KAK-428;Clade n.d. (VII))__ANH09741__SP-HsPLAT_NP(2-569) (opt4)
aggagaguccgcucagccagguugcagaagcggcuuagcguguguccuaaucuucucucugcguguagguaggccugugccgcaaacaagcuuaccauggacgccaugaagagaggccugugcugcgugcugcugcugugcggcgccguguucgugagccccagcaacagcaaggaggugaagagcuuccuguggacccagagccugagaagagagcugagcggcuacugcaccaacaucaagcugcagguggugaaggacgcccaggcccugcugcacggccuggacuucagcgaggugagcaacgugcagagacugaugagaaagcagaagagagacgacaacgaccugaagagacugagagaccugaaccaggccgugaacaaccugguggagcugaagagcgugcagcagaagagcgugcugaaggugggcacccugaacagcgacgaccugcugacccuggccgccgaccuggagaagcugaagagcaagguggugagaaccgagagaccccugagcagcggcguguacaugggcaaccugagcagccagcagcuggaccagagaagagcccugcugaacaugaucggcauggccggcggcagccagggcaaccagcccagcagagacggcguggugagagugugggacgugaagaacgccgaccugcugaacaaccaguucggcaccaugcccagccugacccuggccugccugaccaagcagggccagguggaccugaacgacguggugcuggcccugaccgaccugggccugaucuacaccgccaaguaccccaacagcagcgaccuggacagacugagccagaaccaccccgugcugaacaugaucgacgugaacaagagcagccugaacaucagcggcuacaacuucagccugggcgccgccgugaaggccggcgccugcaugcuggacggcggcaacaugcuggagaccaucaagaucagcccccagaccguggacggcauccugaagagcauccugaaggugaagagagcccugggcauguucgugagcgacacccccggcgagagaaaccccuacgagaacauccuguacaaggugugccugagcggcaacggcuggcccuacaucgccagcagaaccagcaucgugggcagagccugggagaacaccgugguggaccuggagagcaacaagaaccagcccaaggugggcaacaacggcagcaacaagaugcugcagagcagcggcuucgccaccggccugaccuacagccagcugaugacccugagagacagcaugcugcagcuggaccccaccgccaagaccuggaucgacaucgagggcagacccgaggaccccguggagcuggcccuguuccagcccagcagcggcugcuacauccacuucuucagagagcccaccgaccugaagcaguucaagcaggacgccaaguacagccacggcaucgacgugaacgaccuguucagcgcccagcccggccugaccagcgccgugcuggaggcccugcccagaaacauggugcugaccugccagggcagcgacgacaucagaaagcugcuggacagccaggacagaaaggacaucaagcugaucgacaucagccugagcaaggccgacgccagaaaguucgagaacgacgugugggaccaguucaaggaccugugccacaugcacaccggcaucgugguggagaagaagaagaagggcggcaagcaggagaugaccccccacugcgcccugcuggacugcaucauguucgacgccgccgugagcggcggccugaacgugcccacccugagagccgugcugcccaccgacaugguguucagaaccaucaccaccaagguggugcugugaggacuagucccuguucccagagcccacuuuuuuuucuuuuuuugaaauaaaauagccugucuuucagaucucaaaggcucuuuucagagccaccaaaaaaaaaaaaaaaaaaaaaaaaaaaaaaaaaaaaaaaaaaaaaaaaaaaaaaaaaaaaaaaaagaauu

SEQ ID NO: 18451 - RNA, 2033 nt, Artificial Sequence; identical to SEQ ID NO: 18445
  mRNA product Design a-2 (hSL-A64-N5) comprising derived and/or modified sequence from LASV(Pinneo-NIG-1969;Clade I)__AIT17837__SP-HsPLAT_NP(2-569) (opt4)

SEQ ID NO: 18452 - RNA, 2033 nt, Artificial Sequence
  mRNA product Design a-2 (hSL-A64-N5) comprising derived and/or modified sequence from LASV(ISTH0009-NIG-2011;Clade II)__AIT17405__SP-HsPLAT_NP(2-569) (opt4)
aggagaguccgcucagccagguugcagaagcggcuuagcguguguccuaaucuucucucugcguguagguaggccugugccgcaaacaagcuuaccauggacgccaugaagagaggccugugcugcgugcugcugcugugcggcgccguguucgugagccccagcgugagcaaggaggugaagagcuuccuguggacccagagccugagaagagagcugagcggcuacugcagcaacaucaagcugcagguggugaaggacgcccaggcccugcugcacggccuggacuucagcgaggugagcaacgugcagagacugaugagaaagcagaagagagacgacagcgaccugaagagacugagagaccugaaccaggccgugaacaaccugguggagcugaagagcacccagcagaagagcauccugagagugggcacccugaccagcgacgaccugcugacccuggccgccgaccuggagaagcugaagagcaaggugaucagaaccgagagaccccugagcagcggcguguacaugggcaaccugagcacccagcagcuggagcagagaagagcccugcugaacaugaucggcauggugggcggcgcccagggcacccagcccggcagagacggcguggugagagugugggacgugaagaaccccgaccugcugaacaaccaguucggcaccaugcccagccugacccuggccugccugaccaagcagggccagguggaccugaacgacgccgugcuggcccugaccgaccugggccugaucuacaccgccaaguaccccaacagcagcgaccuggacagacugagccagagccaccccauccugaacaugguggacaucaagaagagcagccugaacaucagcggcuacaacuucagccugggcgccgccgugaaggccggcgccugcaugcuggacggcggcaacaugcuggagaccaucaaggugaccccccagaccauggacggcauccugaagagcauccugaaggugaagagaagccugggcauguucgugagcgacacccccggcgagagaaaccccuacgagaacauccuguacaagaucugccugagcggcgacggcuggcccuacaucgccagcagaaccagcaucgugggcagagccugggagaacaccaccguggaccuggagagcgacggcaagccccagaaggugggcagcgccggcagcaacaagagccugcagagcgccggcuuccccaccggccugaccuacagccagcugaugacccugaaggacagcaugaugcagcuggaccccagcgccaagaccuggaucgacaucgagggcagacccgaggaccccguggagaucgcccuguaccagcccaugagcggcugcuacauccacuucuucagagagcccaccgaccugaagcaguucaagcaggacgccaaguacagccacggcaucgacguggccgaccuguuccccgcccagcccggccugaccagcgccgugaucgaggcccugcccagaaacauggugcugaccugccagggcagcgacgacaucaagagacugcuggacagccagggcagaagagacaucaagcugaucgacaucgcccugagcaaggccgacagcagaagauucgagaacgccgugugggaccagugcaaggaccugugccacaugcacaccggcguggugguggagaagaagaagagaggcggcaaggaggagaucaccccccacugcgcccugauggacugcaucauguacgacgccgccgugagcggcggccugaacauccccgugcugagagccgugcugcccagagacaugguguucagaaccagcagccccaagguggugcugugaggacuagucccuguucccagagcccacuuuuuuuucuuuuuuugaaauaaaauagccugucuuucagaucucaaaggcucuuuucagagccaccaaaaaaaaaaaaaaaaaaaaaaaaaaaaaaaaaaaaaaaaaaaaaaaaaaaaaaaaaaaaaaaaagaauu

SEQ ID NO: 18453 - RNA, 2033 nt, Artificial Sequence
  mRNA product Design a-2 (hSL-A64-N5) comprising derived and/or modified sequence from LASV(ISTH2010-NIG-2012;Clade II)__AIT17483__SP-HsPLAT_NP(2-569) (opt4)
aggagaguccgcucagccagguugcagaagcggcuuagcguguguccuaaucuucucucugcguguagguaggccugugccgcaaacaagcuuaccauggacgccaugaagagaggccugugcugcgugcugcugcugugcggcgccguguucgugagccccagcgccagcaaggaggugaagagcuuccuguggacccagagccugagaagagagcugagcggcuacugcagcaacaucaagcugcagguggugaaggacgcccaggcccugcugcacggccuggacuucagcgaggugagcaacgugcagagacugaugagaaagcagaagagagacgacagcgaccugaagagacugagagaccugaaccaggccgugaacaaccugguggagcugaagagcacccagcagaagagcauccugagagugggcacccugaccagcgacgaccugcugacccuggccgccgaccuggagaagcugaagagcaaggugaucagaaccgagagaccccugagcagcggcguguacaugggcaaccugagcacccagcagcuggagcagagaagagcccugcugaaccugaucggcauggugggcggcgcccagggcacccagcccggcagagacggcguggugagagugugggacgugaagaaccccgaccugcugaacaaccaguucggcaccaugcccagccugacccuggccugccugaccaagcagggccagguggaccugaacgacgccgugcuggcccugaccgaccugggccugaucuacaccgccaaguaccccaacagcagcgaccuggacagacugagccagagccaccccauccugaacaugguggacaccaagaagagcagccugaacaucagcggcuucaacuucagccugggcgccgccgugaaggccggcgccugcaugcuggacggcggcaacaugcuggagaccaucaaggugaccccccagaccauggacggcauccugaagagcauccugaaggugaagaagagccugggcauguucgugagcgacacccccggcgagagaaaccccuacgagaacauccuguacaagaucugccugagcggcgacggcuggcccuacaucgccagcagaaccagcaucgugggcagagccugggagaacaccaccguggaccuggagagcgacggcaagccccacaaggugggcaccgccggcagcaacaagagccugcagagcgccggcuuccccaccggccugaccuacagccagcugaugacccugaaggacagcaugaugcagcuggaccccagcgccaagaccuggaucgacaucgagggcagacccgaggaccccguggagaucgcccuguaccagcccaugagcggcugcuacauccacuucuucagagagcccaccgaccugaagcaguucaagcaggacgccaaguacagccacggcaucgacguggccgaccuguuccccgcccagcccggccugaccagcgccgugaucgaggcccugcccagaaacauggugcugaccugccagggcagcgacgacaucaagagacugcuggacagccagggcagaagagacaucaagcugaucgacaucgcccugagcaaggccgacagcagaagauucgagaacgccgugugggaccagugcaaggaccugugccacaugcacaccggcguggugguggagaagaagaagagaggcggcaaggaggagaucaccccccacugcgcccugauggacugcaucauguacgacgccgccgugagcggcggccugaacauccccgugcugagagccgugcugcccagagacaugguguucagaaccagcagccccaagguggugcugugaggacuagucccuguucccagagcccacuuuuuuuucuuuuuuugaaauaaaauagccugucuuucagaucucaaaggcucuuuucagagccaccaaaaaaaaaaaaaaaaaaaaaaaaaaaaaaaaaaaaaaaaaaaaaaaaaaaaaaaaaaaaaaaaagaauu

SEQ ID NO: 18454 - RNA, 2033 nt, Artificial Sequence
  mRNA product Design a-2 (hSL-A64-N5) comprising derived and/or modified sequence from LASV(Lassa virus/H.sapiens-wt/NGA/2015/ISTH_0543;Clade II)__AVO03640__SP-HsPLAT_NP(2-569) (opt4)
aggagaguccgcucagccagguugcagaagcggcuuagcguguguccuaaucuucucucugcguguagguaggccugugccgcaaacaagcuuaccauggacgccaugaagagaggccugugcugcgugcugcugcugugcggcgccguguucgugagccccagcgccagcaaggaggugaagagcuuccuguggacccagagccugagaagagagcugagcggcuacugcagcaacaucaagcugcagguggugaaggacgcccaggcccugcugcacggccuggacuucagcgaggugagcaacgugcagagacugaugagaaagcagaagagagacgacagcgaccugaagagacugagagaccugaaccaggccgugaacaaccugguggagcugaagagcacccagcagaagagcauccugagagugggcacccugaccagcgacgaccugcugacccuggccgccgaccuggagaagcugaagagcaaggugaucagaaccgagagaccccugagcagcggcguguacaugggcaaccugagcacccagcagcuggagcagagaagagcccugcugaacaugaucggcauggugggcggcgcccagggcacccagcccggcagagacggcguggugagagugugggacgugaagaaccccgaccugcugaacaaccaguucggcaccaugcccagccugacccuggccugccugaccaagcagggccagguggaccugaacgacgccgugcuggcccugaccgaccugggccugaucuacaccgccaaguaccccaacagcagcgaccuggacagacugagccagagccaccccauccugaacaugguggacaccaagaagagcagccugaacaucagcggcuacaacuucagccugggcgccgccgugaaggccggcgccugcaugcuggacggcggcaacaugcuggagaccaucaaggugaccccccagaccauggacggcauccugaagagcauccugaaggugaagaagagccugggcauguucgugagcgacacccccggcgagagaaaccccuacgagaacauccuguacaagaucugccugagcggcgacggcuggcccuacaucgccagcagaaccagcaucgugggcagagccugggagaacaccaccguggaccuggagagcgacggcaagccccagaaggugggcagcgccggcagcaacaagagccugcagagcgccggcuuccccaccggccugaccuacagccagcugaugacccugaaggacagcaugaugcagcuggaccccagcgccaagaccuggaucgacaucgagggcagacccgaggaccccguggagaucgcccuguaccagcccaugagcggcugcuacauccacuucuucagagagcccaccgaccugaagcaguucaagcaggacgccaaguacagccacggcaucgacguggccgaccuguuccccgcccagcccggccugaccagcgccgugaucgaggcccugcccagaaacauggugcugaccugccagggcagcgacgacaucaagagacugcuggacagccagggcagaaaggacaucaagcugaucgacaucgcccugagcaaggccgacagcagaagauucgagaacgccgugugggaccagugcaaggaccugugccacaugcacaccggcguggugguggagaagaagaagagaggcggcaaggaggagaucaccccccacugcgcccugauggacugcaucauguacgacgccgccgugagcggcggccugaacauccccgugcugagagccgugcugcccagagacaugguguucagaaccagcagccccaagguggugcugugaggacuagucccuguucccagagcccacuuuuuuuucuuuuuuugaaauaaaauagccugucuuucagaucucaaaggcucuuuucagagccaccaaaaaaaaaaaaaaaaaaaaaaaaaaaaaaaaaaaaaaaaaaaaaaaaaaaaaaaaaaaaaaaaagaauu

SEQ ID NO: 18455 - RNA, 2033 nt, Artificial Sequence
  mRNA product Design a-2 (hSL-A64-N5) comprising derived and/or modified sequence from LASV(Lassa virus/H.sapiens-wt/NGA/2016/ISTH_0009;Clade II)__AVO03572__SP-HsPLAT_NP(2-569) (opt4)
aggagaguccgcucagccagguugcagaagcggcuuagcguguguccuaaucuucucucugcguguagguaggccugugccgcaaacaagcuuaccauggacgccaugaagagaggccugugcugcgugcugcugcugugcggcgccguguucgugagccccagcgccagcaaggaggugaagagcuuccuguggacccagagccugagaagagagcugagcggcuacugcagcaacaucaagcugcagguggugaaggacgcccaggcccugcugcacggccuggacuucagcgaggugagcaacgugcagagacugaugagaaagcagaagagagacgacagcgaccugaagagacugagagaccugaaccaggccgugaacaaccugguggagcugaagagcacccagcagaagagcauccugagagugggcacccugaccagcgacgaccugcugacccuggccgccgaccuggagaagcugaagagcaaggugaucagaaccgagagaccccugagcagcggcguguacaugggcaaccugagcacccagcagcuggagcagagaagagcccugcugaacaugaucggcauggugggcggcgcccagggcacccagcccggcagagacggcguggugagagugugggacgugaagaaccccgaccugcugaacaaccaguucggcaccaugcccagccugacccuggccugccugaccaagcagggccagguggaccugaacgacgccgugcuggcccugaccgaccugggccugaucuacaccgccaaguaccccaacagcagcgaccuggacagacugagccagagccaccccauccugaacaugguggacaccaagaagagcagccugaacaucagcggcuacaacuucagccugggcgccgccgugaaggccggcgccugcaugcuggacggcggcaacaugcuggagaccaucaaggugaccccccagaccauggacggcauccugaagagcauccugaaggugaagaagagccugggcauguucgugagcgacacccccggcgagagaaaccccuacgagaacauccuguacaagaucugccugagcggcgacggcuggcccuacaucgccagcagaaccagcaucgugggcagagccugggagaacaccaccguggaccuggagagcgacggcaagccccagaaggugggcagcgccggcagcaacaagagccugcagagcgccggcuuccccaccggccugaccuacagccagcugaugacccugaaggacagcaugaugcagcuggaccccagcgccaagaccuggaucgacaucgagggcagacccgaggaccccguggagaucgcccuguaccagcccaugagcggcugcuacauccacuucuucagagagcccaccgaccugaagcaguucaagcaggacgccaaguacagccacggcaucgacguggccgaccuguuccccgcccagcccggccugaccagcgccgugaucgaggcccugcccagaaacauggugcugaccugccagggcagcgacgacaucaagagacugcuggacagccagggcagaagagacaucaagcugaucgacaucgcccugagcaaggccgacagcagaagauucgagaacgccgugugggaccagugcaaggaccugugccacaugcacaccggcguggugguggagaagaagaagagaggcggcaaggaggagaucaccccccacugcgcccugauggacugcaucauguacgacgccgccgugagcggcggccugaacauccccgugcugagagccgugcugcccagagacaugguguucagaaccagcagccccaagguggugcugugaggacuagucccuguucccagagcccacuuuuuuuucuuuuuuugaaauaaaauagccugucuuucagaucucaaaggcucuuuucagagccaccaaaaaaaaaaaaaaaaaaaaaaaaaaaaaaaaaaaaaaaaaaaaaaaaaaaaaaaaaaaaaaaaagaauu

SEQ ID NO: 18456 - RNA, 2033 nt, Artificial Sequence
  mRNA product Design a-2 (hSL-A64-N5) comprising derived and/or modified sequence from LASV(Lassa virus/H.sapiens-wt/NGA/2016/ISTH_0017;Clade II)__AVO03568__SP-HsPLAT_NP(2-569) (opt4)
aggagaguccgcucagccagguugcagaagcggcuuagcguguguccuaaucuucucucugcguguagguaggccugugccgcaaacaagcuuaccauggacgccaugaagagaggccugugcugcgugcugcugcugugcggcgccguguucgugagccccagcgccagcaaggaggugaagagcuuccuguggacccagagccugagaagagagcugagcggcuacugcagcagcaucaagcugcagguggugaaggacgcccaggcccugcugcacggccuggacuucagcgaggugagcaacgugcagagacugaugagaaagcagaagagagacgacagcgaccugaagagacugagagaccugaaccaggccgugaacaaccugguggagcugaagagcacccagcagaagagcauccugagagugggcacccugaccagcgacgaccugcugacccuggccgccgaccuggagaagcugaagagcaaggugaucagaaccgagagaccccugagcagcggcguguacaugggcaaccugagcacccagcagcuggagcagagaagagcccugcugaacaugaucggcauggccggcggcgcccagggcacccagcccggcagagacggcguggugagagugugggacgugaagaaccccgaccugcugaacaaccaguucggcaccaugcccagccugacccuggccugccugaccaagcagggccagguggaccugaacgacgccgugcuggcccugaccgaccugggccugaucuacaccgccaaguaccccaacagcagcgaccuggacagacugagccagagccaccccauccugaacaugguggacaccaagaagagcagccugaacaucagcggcuacaacuucagccugggcgccgccgugaaggccggcgccugcaugcuggacggcggcaacaugcuggagaccaucaaggugaccccccagaccauggacggcauccugaagagcauccugaaggugaagagaagccugggcauguucgugagcgacgcccccggcgagagaaaccccuacgagaacauccuguacaagaucugccugagcggcgacggcuggcccuacaucgccagcagaaccagcaucgugggcagagccugggagaacaccaccguggaccuggagagcgacggcaagccccagaaggugggcgccaccggcagcaacaagagccugcagagcgccggcuuccccaccggccugaccuacagccagcugaugacccugaaggacagcaugaugcagcuggaccccagcgccaagaccuggaucgacaucgagggcagacccgaggaccccguggagguggcccuguaccagcccgugagcggcugcuacauccacuucuucagagagcccaccgaccugaagcaguucaagcaggacgccaaguacagccacggcaucgacguggccgaccuguuccccgcccagcccggccugaccagcgccgugaucgaggcccugcccagaaacauggugcugaccugccagggcagcgacgacaucaagaagcugcuggacagccagggcagaaaggacaucaagcugaucgacaucgcccugagcaaggccgacagcagaagauucgagaacgccgugugggaccagugcaaggaccugugccacaugcacaccggcguggugguggagaagaagaagagaggcggcaaggaggagaucaccccccacugcgcccugauggacugcaucauguacgacgccgccgugagcggcggccugaacauccccgugcugagagccgugcugcccagagacaugguguucagaaccagcagccccaagguggugcugugaggacuagucccuguucccagagcccacuuuuuuuucuuuuuuugaaauaaaauagccugucuuucagaucucaaaggcucuuuucagagccaccaaaaaaaaaaaaaaaaaaaaaaaaaaaaaaaaaaaaaaaaaaaaaaaaaaaaaaaaaaaaaaaaagaauu

SEQ ID NO: 18457 - RNA, 2033 nt, Artificial Sequence
  mRNA product Design a-2 (hSL-A64-N5) comprising derived and/or modified sequence from LASV(Lassa virus/H.sapiens-wt/NGA/2018/ISTH_0959;Clade II)__AVV65100__SP-HsPLAT_NP(2-569) (opt4)
aggagaguccgcucagccagguugcagaagcggcuuagcguguguccuaaucuucucucugcguguagguaggccugugccgcaaacaagcuuaccauggacgccaugaagagaggccugugcugcgugcugcugcugugcggcgccguguucgugagccccagcgccagcaaggaggugaagagcuuccuguggacccagagccugagaagagagcugagcggcuacugcagcaacaucaagcugcagguggugaaggacgcccaggcccugcugcacggccuggacuucagcgaggugagcaacgugcagagacugaugagaaagcagaagagagacgacagcgaccugaagagacugagagaccugaaccaggccgugaacaaccugguggagcugaagagcacccagcagaagagcauccugagagugggcacccugaccagcgacgaccugcugacccuggccgccgaccuggagaagcugaagagcaaggugaucagaaccgagagaccccugagcagcggcguguacaugggcaaccugagcacccagcagcuggagcagagaagagcccugcugaaccugaucggcauggugggcggcgcccagggcacccagcccggcagagacggcguggugagagugugggacgugaagaaccccgaccugcugaacaaccaguucggcaccaugcccagccugacccuggccugccugaccaagcagggccagguggaccugaacgacguggugcuggcccugaccgaccugggccugaucuacaccgccaaguaccccaacagcagcgaccuggacagacugagccagagccaccccauccugaacaugguggacaccaagaagagcagccugaacaucagcggcuucaacuucagccugggcgccgccgugaaggccggcgccugcaugcuggacggcggcaacaugcuggagaccaucaaggugaccccccagaccauggacggcauccugaagagcauccugaaggugaagaagagccugggcauguucgugagcgacacccccggcgagagaaaccccuacgagaacauccuguacaagaucugccugagcggcgacggcuggcccuacaucgccagcagaaccagcaucgugggcagagccugggagaacaccaccguggaccuggagagcgacggcaagccccacaaggugggcaccgccggcagcaacaagagccugcagagcgccggcuuccccaccggccugaccuacagccagcugaugacccugaaggacagcaugaugcagcuggaccccagcgccaagaccuggaucgacaucgagggcagacccgaggaccccguggagaucgcccuguaccagcccaugagcggcugcuacauccacuucuucagagagcccaccgaccugaagcaguucaagcaggacgccaaguacagccacggcaucgacguggccgaccuguuccccgcccagcccggccugaccagcgccgugaucgaggcccugcccagaaacauggugcugaccugccagggcagcgacgacaucaagagacugcuggacagccagggcagaaaggacaucaagcugaucgacaucgcccugagcaagaccgacagcagaagauucgagaacgccgugugggaccagugcaaggaccugugccacaugcacaccggcguggugguggagaagaagaagagaggcggcaaggaggagaucaccccccacugcgcccugauggacugcaucauguacgacgccgccgugagcggcggccugaacauccccgugcugagagccgugcugcccagagacaugguguucagaaccagcagccccaagguggugcugugaggacuagucccuguucccagagcccacuuuuuuuucuuuuuuugaaauaaaauagccugucuuucagaucucaaaggcucuuuucagagccaccaaaaaaaaaaaaaaaaaaaaaaaaaaaaaaaaaaaaaaaaaaaaaaaaaaaaaaaaaaaaaaaaagaauu

SEQ ID NO: 18458 - RNA, 2033 nt, Artificial Sequence
  mRNA product Design a-2 (hSL-A64-N5) comprising derived and/or modified sequence from LASV(LASV003-NIG-2008;Clade II)__AIT17581__SP-HsPLAT_NP(2-569) (opt4)
aggagaguccgcucagccagguugcagaagcggcuuagcguguguccuaaucuucucucugcguguagguaggccugugccgcaaacaagcuuaccauggacgccaugaagagaggccugugcugcgugcugcugcugugcggcgccguguucgugagccccagcgccagcaaggaggugaagagcuuccuguggacccagagccugagaagagagcugagcggcuacugcagcagcaucaagcugcagguggugaaggacgcccaggcccugcugcacggccuggacuucagcgaggugagcaacgugcagagacugaugagaaagcagaagagagacgacagcgaccugaagagacugagagaccugaaccaggccgugaacaaccugguggagcugaagagcacccagcagaagagcgugcugagagugggcacccugaccagcgacgaccugcugacccuggccgccgaccuggagaagcugaagagcaaggugaucagaaccgagagaccccugagcagcggcguguacaugggcaaccugagcgcccagcagcuggagcagagaagaacccugcugaacaugaucggcauggugggcggcgcccagggcacccagcccggcagagacggcguggugagagugugggacgugaagaaccccgaccugcugaacaaccaguucggcaccaugcccagccugacccuggccugccugaccaagcagggccagguggaccugaacgacguggugcuggcccugaccgaccugggccugaucuacaccgccaaguaccccaacagcagcgaccuggacagacugagccagagccaccccauccugagcaugguggacaccaagaagagcagccugaacaucagcggcuacaacuucagccugggcgccgccgugaaggccggcgccugcaugcuggacggcggcaacaugcuggagaccaucaaggugaccccccagaccauggacggcauccugaagagcauccugaaggugaagaagagccugggcauguucgugagcgacacccccggcgagagaaaccccuacgagaacauccuguacaagaucugccugagcggcgacggcuggcccuacaucgccagcagaaccagcaucgugggcagagccugggagaacaccaccguggaccuggagagcgacggcaagccccagaaggugggcaccgccggcagcaacaagagccugcagagcgccggcuuccccaccggccugaccuacagccagcugaugacccugaaggacagcaugaugcagcuggaccccagcgccaagaccuggaucgacaucgagggcagacccgaggaccccguggagaucgcccuguaccagcccaugagcggcugcuacauccacuucuucagagagcccaccgaccugaagcaguucaagcaggacgccaaguacagccacggcaucgacgugaccgaccuguuccccgcccagcccggccugaccagcgccgugaucgaggcccugcccagaaacauggugcugaccugccagggcagcgacgacaucaagagacugcuggacagccagggcagaagagacaucaagcugaucgacaucgcccugagcaaggccgacagcagaagauucgagaacgccgugugggaccagugcaaggaccugugccacaugcacaccggcguggugguggagaagaagaagagaggcggcaaggaggagaucaccccccacugcgcccugauggacugcaucauguacgacgccgccgugagcggcggccugaacauccccgugcugagagccgugcugcccagagacaugguguucagaaccagcagccccaagguggugcugugaggacuagucccuguucccagagcccacuuuuuuuucuuuuuuugaaauaaaauagccugucuuucagaucucaaaggcucuuuucagagccaccaaaaaaaaaaaaaaaaaaaaaaaaaaaaaaaaaaaaaaaaaaaaaaaaaaaaaaaaaaaaaaaaagaauu

SEQ ID NO: 18459 - RNA, 2033 nt, Artificial Sequence
  mRNA product Design a-2 (hSL-A64-N5) comprising derived and/or modified sequence from LASV(LASV035-NIG-2009;Clade II)__AIT17589__SP-HsPLAT_NP(2-569) (opt4)
aggagaguccgcucagccagguugcagaagcggcuuagcguguguccuaaucuucucucugcguguagguaggccugugccgcaaacaagcuuaccauggacgccaugaagagaggccugugcugcgugcugcugcugugcggcgccguguucgugagccccagcgccagcaaggaggugaagagcuuccuguggacccagagccugagaagagagcugagcggcuacugcagcagcaucaagcugcagguggugaaggacgcccaggcccugcugcacggccuggacuucagcgaggugagcaacgugcagagacugaugagaaagcagaagagagacgacagcgaccugaagagacugagagaccugaaccaggccgugaacaaccugguggagcugaagagcacccagcagaagagcauccugagagugggcacccugaccagcgacgaccugcugacccuggccgccgaccuggagaagcugaagagcaaggugaucagaaccgagagaccccugagcagcggcguguacaugggcaaccugagcgcccagcagcuggagcagagaagagcccugcugaacaugaucggcauggugggcggcgcccagggcacccagcccggcagagacggcguggugagagugugggacgugaagaaccccgaccugcugaacaaccaguucggcaccaugcccagccugacccuggccugccugaccaagcagggccagguggaccugaacgacgccgugcuggcccugaccgaccugggccugaucuacaccgccaaguaccccaacagcagcgaccuggacagacugagccagagccaccccauccugaacaugguggacaccaagaagagcagccugaacaucagcggcuacaacuucagccugggcgccgccgugaaggccggcgccugcaugcuggacggcggcaacaugcuggagaccaucaaggugaccccccagaccauggacggcauccugaagagcauccugaaggugaagagaagccugggcauguucgugagcgacacccccggcgagagaaaccccuacgagaacauccuguacaagaucugccugagcggcgacggcuggcccuacaucgccagcagaaccagcaucgugggcagagccugggagaacaccaccguggaccuggagagcgacggcaagccccagaaggugggcaccaccggcagcaacaagagccugcagagcgccggcuuccccaccggccugaccuacagccagcugaugacccugaaggacagcaugaugcagcuggaccccagcgccaagaccuggaucgacaucgagggcagacccgaggaccccguggagaucgcccuguaccagcccaugagcggcugcuacauccacuucuucagagagcccaccgaccugaagcaguucaagcaggacgccaaguacagccacggcaucgacguggccgaccuguuccccgcccagcccggccugaccagcgccgugaucgaggcccugcccagaaacauggugcugaccugccagggcagcgacgacaucaagaagcugcuggacagccagggcagaagagacaucaagcugaucgacaucgcccugagcaaggccgacagcagaaaguucgagaacgccgugugggaccagugcaaggaccugugccacaugcacaccggcguggugguggagaagaagaagagaggcggcaaggaggagaucaccccccacugcgcccugauggacugcaucauguacgacgccgccgugagcggcggccugaacauccccgugcugagagccgugcugcccagagacaugguguucagaaccagcagccccaagguggugcugugaggacuagucccuguucccagagcccacuuuuuuuucuuuuuuugaaauaaaauagccugucuuucagaucucaaaggcucuuuucagagccaccaaaaaaaaaaaaaaaaaaaaaaaaaaaaaaaaaaaaaaaaaaaaaaaaaaaaaaaaaaaaaaaaagaauu

SEQ ID NO: 18460 - RNA, 2033 nt, Artificial Sequence
  mRNA product Design a-2 (hSL-A64-N5) comprising derived and/or modified sequence from LASV(LASV1000-NIG-2009;Clade II)__AIT17783__SP-HsPLAT_NP(2-569) (opt4)
aggagaguccgcucagccagguugcagaagcggcuuagcguguguccuaaucuucucucugcguguagguaggccugugccgcaaacaagcuuaccauggacgccaugaagagaggccugugcugcgugcugcugcugugcggcgccguguucgugagccccagcgccagcaaggaggugaagagcuuccuguggacccagagccugagaagagagcugagcggcuacugcagcaacaucaagcugcagguggugaaggacgcccaggcccugcugcacggccuggacuucagcgaggugagcaacgugcagagacugaugagaaagcagaagagagacgacagcgaccugaagagacugagagaccugaaccaggccgugaacaaccugguggagcugaagagcacccagcagaagagcauccugagagugggcacccugaccagcgacgaccugcugacccuggccgccgaccuggagaagcugaagagcaaggugaucagaaccgagagaccccugagcagcggcguguacaugggcaaccugagcacccagcagcuggagcagagaagagcccugcugaacaugaucggcauggugggcggcgcccagggcacccagcccggcagagacggcguggugagagugugggacgugaagaaccccgaccugcugaacaaccaguucggcaccaugcccagccugacccuggccugccugaccaagcagggccagguggaccugaacgacguggugcuggcccugaccgaccugggccugaucuacaccgccaaguaccccaacagcagcgaccuggacagacugagccagagccaccccauccugaacaugguggacaccaagaagagcagccugaacaucagcggcuacaacuucagccugggcgccgccgugaaggccggcgccugcaugcuggacggcggcaacaugcuggagaccaucaaggugaccccccagaccauggacggcauccugaagagcauccugaaggugaagaagagccugggcauguucgugagcgacacccccggcgagagaaaccccuacgagaacauccuguacaagaucugccugagcggcgacggcuggcccuacaucgccagcagaaccagcaucgugggcagagccugggagaacaccaccguggaccuggagagcgacggcaagccccagaaggugggcaccgccggcagcaacaagagccugcagagcgccggcuuccccaccggccugaccuacagccagcugaugacccugaaggacagcaugaugcagcuggaccccagcgccaagaccuggaucgacaucgagggcagacccgaggaccccguggagaucgcccuguaccagcccgugagcggcugcuacauccacuucuucagagagcccaccgaccugaagcaguucaagcaggacgccaaguacagccacggcaucgacguggccgaccuguuccccgcccagcccggccugaccagcgccgugaucgaggcccugcccagaaacauggugcugaccugccagggcagcgacgacaucaagagacugcuggacagccagggcagaagagacaucaagcugaucgacaucgcccugagcaaggccgacagcagaagauucgagaacgccgugugggaccagugcaaggaccugugccacaugcacaccggcguggugguggagaagaagaagagaggcggcaaggaggagaucaccccccacugcgcccugauggacugcaucauguacgacgccgccgugagcggcggccugaacauccccgugcugagagccgugcugcccagagacaugguguucagaaccagcagccccaagguggugcugugaggacuagucccuguucccagagcccacuuuuuuuucuuuuuuugaaauaaaauagccugucuuucagaucucaaaggcucuuuucagagccaccaaaaaaaaaaaaaaaaaaaaaaaaaaaaaaaaaaaaaaaaaaaaaaaaaaaaaaaaaaaaaaaaagaauu

SEQ ID NO: 18461 - RNA, 2033 nt, Artificial Sequence
  mRNA product Design a-2 (hSL-A64-N5) comprising derived and/or modified sequence from LASV(LASV221-NIG-2010;Clade II)__AIT17625__SP-HsPLAT_NP(2-569) (opt4)
aggagaguccgcucagccagguugcagaagcggcuuagcguguguccuaaucuucucucugcguguagguaggccugugccgcaaacaagcuuaccauggacgccaugaagagaggccugugcugcgugcugcugcugugcggcgccguguucgugagccccagcgccagcaaggaggugaagagcuuccuguggacccagagccugagaagagagcugagcggcuacugcagcagcaucaagcugcagguggugaaggacgcccaggcccugcugcacggccuggacuucagcgaggugagcaacgugcagagacugaugagaaagcagagaagagacgacagcgaccugaagagacugagagaccugaaccaggccgugaacaaccugguggagcugaagagcacccagcagaagagcauccugagagugggcacccugaccagcgacgaccugcugacccuggccgccgaccuggagaagcugaagagcaaggugaucagaaccgagagaccccugagcagcggcguguacaugggcaaccugagcacccagcagcuggagcagagaagagcccugcugaacaugaucggcauggugggcggcgcccagggcacccagcccggcagagacggcguggugagagugugggacgugaagaaccccgaccugcugaacaaccaguucggcaccaugcccagccugacccuggccugccugaccaagcagggccagguggaccugaacgacgccgugcuggcccugaccgaccugggccugaucuacaccgccaaguaccccaacagcagcgaccuggacagacugagccagagccaccccauccugaacaugguggacaccaagaagagcagccugaacaucagcggcuacaacuucagccugggcgccgccgugaaggccggcgccugcaugcuggacggcggcaacaugcuggagaccaucaaggugaccccccagaccguggacggcauccugaagagcauccugaaggugaagagaagccugggcauguucgugagcgacacccccggcgagagaaaccccuacgagaacauccuguacaagaucugccugagcggcgacggcuggcccuacaucgccagcagaaccagcaucgugggcagagccugggagaacaccaccguggaccuggagagcgacggcaagccccagaaggugggcaccgccggcagcaacaagagccugcagagcgccggcuuccccaccggccugaccuacagccagcugaugacccugaaggacagcaugaugcagcuggaccccagcgccaagaccuggaucgacaucgagggcagacccgaggaccccguggagaucgcccuguaccagcccaugagcggcugcuacauccacuucuucagagagcccaccgaccugaagcaguucaagcaggacgccaaguacagccacggcaucgacguggccgaccuguuccccgcccagcccggccugaccagcgccgugaucgaggcccugcccagaaacauggugcugaccugccagggcagcgacgacaucaagagacugcuggacagccagggcagaagagacaucaagcugaucgacaucgcccugagcaaggccgacagcagaaaguucgagaacgccgugugggaccagugcaaggaccugugccacaugcacaccggcguggugguggagaagaagaagagaggcggcaaggaggagaucaccccccacugcgcccugauggacugcaucauguacgacgccgccgugagcggcggccugaacauccccgugcugagagccgugcugcccagagacaugguguucagaaccagcagccccaagguggugcugugaggacuagucccuguucccagagcccacuuuuuuuucuuuuuuugaaauaaaauagccugucuuucagaucucaaaggcucuuuucagagccaccaaaaaaaaaaaaaaaaaaaaaaaaaaaaaaaaaaaaaaaaaaaaaaaaaaaaaaaaaaaaaaaaagaauu

SEQ ID NO: 18462 - RNA, 2033 nt, Artificial Sequence
  mRNA product Design a-2 (hSL-A64-N5) comprising derived and/or modified sequence from LASV(LASV237-NIG-2010;Clade II)__AIT17639__SP-HsPLAT_NP(2-569) (opt4)
aggagaguccgcucagccagguugcagaagcggcuuagcguguguccuaaucuucucucugcguguagguaggccugugccgcaaacaagcuuaccauggacgccaugaagagaggccugugcugcgugcugcugcugugcggcgccguguucgugagccccagcgccagcaaggaggugaagagcuuccuguggacccagagccugagaagagagcugagcggcuacugcagcaacaucaagcugcagguggugaaggacgcccaggcccugcugcacggccuggacuucagcgaggugagcaacgugcagagacugaugagaaagcagaagagagacgacagcgaccugaagagacugagagaccugaaccaggccgugaacaaccugguggagcugaagagcacccagcagaagagcauccugagagugggcacccugaccagcgacgaccugcugacccuggccgccgaccuggagaagcugaagagcaaggugaucagaaccgagagaccccugagcagcggcguguacaugggcaaccugagcacccagcagcuggagcagagaagagcccugcugaacaugaucggcauggugggcggcgcccagggcacccagcccggcagagacggcguggugagagugugggacgugaagaaccccgaccugcugaacaaccaguucggcaccaugcccagccugacccuggccugccugaccaagcagggccagguggaccugaacgacgccgugcuggcccugaccgaccugggccugaucuacaccgccaaguaccccaacagcagcgaccuggacagacugagccagagccaccccauccugaacaugguggacaucaagaagagcagccugaacaucagcggcuacaacuucagccugggcgccgccgugaaggccggcgccugcaugcuggacggcggcaacaugcuggagaccaucaaggugaccccccagaccauggacggcauccugaagagcauccugaaggugaagagaagccugggcauguucgugagcgacacccccggcgagagaaaccccuacgagaacauccuguacaagaucugccugagcggcgacggcuggcccuacaucgccagcagaaccagcaucgugggcagagccugggagaacaccaccguggaccuggagagcgacggcaagccccagaaggugggcagcgccggcagcaacaagagccugcagagcgccggcuuccccaccggccugaccuacagccagcugaugacccugaaggacagcaugaugcagcuggaccccagcgccaagaccuggaucgacaucgagggcagacccgaggaccccguggagaucgcccuguaccagcccaugagcggcugcuacauccacuucuucagagagcccaccgaccugaagcaguucaagcaggacgccaaguacagccacggcaucgacguggccgaccuguuccccgcccagcccggccugaccagcgccgugaucgaggcccugcccagaaacauggugcugaccugccagggcagcgacgacaucaagagacugcuggacagccagggcagaagagacaucaagcugaucgacaucgcccugagcaaggccgacagcagaagauucgagaacgccgugugggaccagugcaaggaccugugccacaugcacaccggcguggugguggagaagaagaagagaggcggcaaggaggagaucaccccccacugcgcccugauggacugcaucauguacgacgccgccgugagcggcggccugaacauccccgugcugagagccgugcugcccagagacaugguguucagaaccagcagccccaagguggugcugugaggacuagucccuguucccagagcccacuuuuuuuucuuuuuuugaaauaaaauagccugucuuucagaucucaaaggcucuuuucagagccaccaaaaaaaaaaaaaaaaaaaaaaaaaaaaaaaaaaaaaaaaaaaaaaaaaaaaaaaaaaaaaaaaagaauu

SEQ ID NO: 18463 - RNA, 2033 nt, Artificial Sequence
  mRNA product Design a-2 (hSL-A64-N5) comprising derived and/or modified sequence from LASV(LASV253-NIG-2011;Clade II)__AIT17671__SP-HsPLAT_NP(2-569) (opt4)
aggagaguccgcucagccagguugcagaagcggcuuagcguguguccuaaucuucucucugcguguagguaggccugugccgcaaacaagcuuaccauggacgccaugaagagaggccugugcugcgugcugcugcugugcggcgccguguucgugagccccagcgccagcaaggaggugaagagcuuccuguggacccagagccugagaagagagcugagcggcuacugcagcagcaucaagcugcagguggugaaggacgcccaggcccugcugcacggccuggacuucagcgaggugagcaacgugcagagacugaugagaaagcagaagagagacgacagcgaccugaagagacugagagaccugaaccaggccgugaacaaccugguggagcugaagagcacccagcagaagagcgugcugagagugggcacccugaccagcgacgaccugcugacccuggccgccgaccuggagaagcugaagagcaaggugaucagaaccgagagaccccugagcagcggcguguacaugggcaaccugagcacccagcagcuggagcagagaagagcccugcugaacaugaucggcauggugggcggcgcccagggcacccagcccggcagagacggcguggugagagugugggacgugaagaaccccgaccugcugaacaaccaguucggcaccaugcccagccugacccuggccugccugaccaagcagggccagguggaccugaacgacguggugcuggcccugaccgaccugggccugaucuacaccgccaaguaccccaacagcagcgaccuggacagacugagccagagccaccccauccugaacaugguggacaccaagaagagcagccugaacaucagcggcuacaacuucagccugggcgccgccgugaaggccggcgccugcaugcuggacggcggcaacaugcuggagaccaucaaggugaccccccagaccauggacggcauccugaagagcauccugaaggugaagaagagccugggcauguucgugagcgacacccccggcgagagaaaccccuacgagaacauccuguacaagaucugccugagcggcgacggcuggcccuacaucgccagcagaaccagcaucgugggcagagccugggagaacaccaccguggaccuggagagcgacggcaagccccagaaggugggcaccgccggcagcaacaagagccugcagagcgccggcuuccccaccggccugaccuacagccagcugaugacccugaaggacagcaugaugcagcuggaccccagcgccaagaccuggaucgacaucgagggcagacccgaggaccccguggagaucgcccuguaccagcccaugagcggcugcuacauccacuucuucagagagcccaccgaccugaagcaguucaagcaggacgccaaguacagccacggcaucgacgugaccgaccuguuccccgcccagcccggccugaccagcgccgugaucgaggcccugcccagaaacauggugcugaccugccagggcagcgacgacaucaagagacugcuggacagccagggcagaagagacaucaagcugaucgacaucgcccugagcaaggccgacagcagaagauucgagaacgccgugugggaccagugcaaggaccugugccacaugcacaccggcguggugguggagaagaagaagagaggcggcaaggaggagaucaccccccacugcgcccugauggacugcaucauguacgacgccgccgugagcggcggccugaacauccccgugcugagagccgugcugcccagagacaugguguucagaaccagcagccccaagguggugcugugaggacuagucccuguucccagagcccacuuuuuuuucuuuuuuugaaauaaaauagccugucuuucagaucucaaaggcucuuuucagagccaccaaaaaaaaaaaaaaaaaaaaaaaaaaaaaaaaaaaaaaaaaaaaaaaaaaaaaaaaaaaaaaaaagaauu

SEQ ID NO: 18464 - RNA, 2033 nt, Artificial Sequence
  mRNA product Design a-2 (hSL-A64-N5) comprising derived and/or modified sequence from LASV(LASV254-NIG-2011;Clade II)__AIT17675__SP-HsPLAT_NP(2-569) (opt4)
aggagaguccgcucagccagguugcagaagcggcuuagcguguguccuaaucuucucucugcguguagguaggccugugccgcaaacaagcuuaccauggacgccaugaagagaggccugugcugcgugcugcugcugugcggcgccguguucgugagccccagcgccagcaaggaggugaagagcuuccuguggacccagagccugagaagagagcugagcggcuacugcagcagcaucaagcugcagguggugaaggacgcccaggcccugcugcacggccuggacuucagcgaggugagcaacgugcagagacugaugagaaagcagaagagagacgacagcgaccugaagagacugagagaccugaaccaggccgugaacaaccugguggagcugaagagcacccagcagaagagcgugcugagagugggcacccugaccagcgacgaccugcugacccuggccgccgaccuggagaagcugaagagcaaggugaucagaaccgagagaccccugagcagcggcguguacaugggcaaccugagcacccagcagcuggagcagagaagagcccugcugaacaugaucggcauggugggcggcgcccagggcacccagcccggcagagacggcguggugagagugugggacgugaagaaccccgaccugcugaacaaccaguucggcaccaugcccagccugacccuggccugccugaccaagcagggccagguggaccugaacgacgccgugcuggcccugaccgaccugggccugaucuacaccgccaaguaccccaacagcagcgaccuggacagacugagccagagccaccccauccugaacaugguggacaccaagaagagcagccugaacaucagcggcuacaacuucagccugggcgccgccgugaaggccggcgccugcaugcuggacggcggcaacaugcuggagaccaucaaggugaccccccagaccauggacggcauccugaagagcauccugaaggugaagaagagccugggcauguucgugagcgacacccccggcgagagaaaccccuacgagaacauccuguacaagaucugccugagcggcgacggcuggcccuacaucgccagcagaaccagcaucgugggcagagccugggagaacaccaucguggaccuggagagcgacggcaagccccagaaggugggcaccgccggcagcaacaagagccugcagagcgccggcuuccccaccggccugaccuacagccagcugaugacccugaaggacagcaugaugcagcuggaccccagcgccaagaccuggaucgacaucgagggcagacccgaggaccccguggagaucgcccuguaccagcccaugagcggcugcuacauccacuucuucagagagcccaccgaccugaagcaguucaagcaggacgccaaguacagccacggcaucgacguggccgaccuguuccccgcccagcccggccugaccagcgccgugaucgaggcccugcccagaaacauggugcugaccugccagggcagcgacgacaucaagagacugcuggacagccagggcagaagagacaucaagcugaucgacaucgcccugagcaaggccgacagcagaagauucgagaacgccgugugggaccagugcaaggaccugugccacaugcacaccggcguggugguggagaagaagaagagaggcggcaaggaggagaucaccccccacugcgcccugauggacugcaucauguacgacgccgccgugagcggcggccugaacauccccgugcugagagccgugcugcccagagacaugguguucagaaccagcagccccaagguggugcugugaggacuagucccuguucccagagcccacuuuuuuuucuuuuuuugaaauaaaauagccugucuuucagaucucaaaggcucuuuucagagccaccaaaaaaaaaaaaaaaaaaaaaaaaaaaaaaaaaaaaaaaaaaaaaaaaaaaaaaaaaaaaaaaaagaauu

SEQ ID NO: 18465 - RNA, 2033 nt, Artificial Sequence
  mRNA product Design a-2 (hSL-A64-N5) comprising derived and/or modified sequence from LASV(Nig08-04;Clade II)__ADU56611__SP-HsPLAT_NP(2-569) (opt4)
aggagaguccgcucagccagguugcagaagcggcuuagcguguguccuaaucuucucucugcguguagguaggccugugccgcaaacaagcuuaccauggacgccaugaagagaggccugugcugcgugcugcugcugugcggcgccguguucgugagccccagcgccagcaaggaggugaagagcuuccuguggacccagagccugagaagagagcugagcggcuacugcagcaacaucaagcugcagguggugaaggacgcccaggcccugcugcacggccuggacuucagcgaggugagcaacgugcagagacugaugagaaagcagaagagagacgacggcgaccugaagagacugagagaccugaaccaggccgugaacaaccugguggagcugaagagcacccagcagaagagcgugcugagagugggcacccugaccagcgacgaccugcugacccuggccgccgaccuggagaagcugaagagcaaggugaucagaaccgagagaccccugagcagcggcguguacaugggcaaccugagcacccagcagcuggagcagagaaaggcccugcugagcaugaucggcauggugggcggcgcccagggcacccagcccggcagagacggcguggugagagugugggacgugaagaaccccgaccugcugaacaaccaguucggcaccaugcccagccugacccuggccugccugaccaagcagggccagguggaccugaacgacgccgugcuggcccugaccgaccugggccugaucuacaccgccaaguaccccaacagcagcgaccuggacagacugagccagagccaccccauccugaacaugguggacaccaagaagagcagccugaacaucagcggcuacaacuucagccugggcgccgccgugaaggccggcgccugcaugcuggacggcggcaacaugcuggagaccaucaaggugaccccccagaccauggacggcauccugaagagcauccugaaggugaagagaagccugggcauguucgugagcgacacccccggcgagagaaaccccuacgagaacauccuguacaagaucugccugagcggcgacggcuggcccuacaucgccagcagaaccagcaucgugggcagagccugggagaacaccaccguggaccuggagagcgacggcaagccccagaaggugggcaccgccggcagcaacaagagccugcagagcgccggcuuccccaccggccugaccuacagccagcugaugacccugaaggacagcaugaugcagcuggaccccagcgccaagaccuggaucgacaucgagggcagacccgaggaccccguggagaucgcccuguaccagcccaugagcggcugcuacauccacuucuucagagagcccaccgaccugaagcaguucaagcaggacgccaaguacagccacggcaucgacgugaccgaccuguucagcgcccagcccggccugaccagcgccgugaucgaggcccugcccagaaacauggugcugaccugccagggcagcgacgacaucaagaagcugcuggacagccagggcagaagagacaucaagcugaucgacaucagccugaacaaggccgacagcagaagauucgagaacgccgugugggaccagugcaaggaccugugccacaugcacaccggcguggugguggagaagaagaagagaggcggcaaggaggagaucaccccccacugcgcccugauggacugcaucauguucgacgccgccgugagcggcggccugaacauccccauccugagagccgugcugcccagagacaugguguucagaaccagcagccccaagguggugcugugaggacuagucccuguucccagagcccacuuuuuuuucuuuuuuugaaauaaaauagccugucuuucagaucucaaaggcucuuuucagagccaccaaaaaaaaaaaaaaaaaaaaaaaaaaaaaaaaaaaaaaaaaaaaaaaaaaaaaaaaaaaaaaaaagaauu

SEQ ID NO: 18466 - RNA, 2036 nt, Artificial Sequence
  mRNA product Design a-2 (hSL-A64-N5) comprising derived and/or modified sequence from LASV(GA391;Clade III)__AAA46284__SP-HsPLAT_NP(2-570) (opt4)
aggagaguccgcucagccagguugcagaagcggcuuagcguguguccuaaucuucucucugcguguagguaggccugugccgcaaacaagcuuaccauggacgccaugaagagaggccugugcugcgugcugcugcugugcggcgccguguucgugagccccagcgccagcaaggaggugagaagcugccuguggacccagagccugagaagagagcugagcggcuacugcagcaacaucaagcugcagguggugaaggacgcccaggcccugcugcacggccuggacuucagcgaggugagcaacgugcagagacugaugagaaagcagaagagagacgacggcgaccugaagagacugagagaccugaaccaggccgugaacaaccugguggagcugaagagcacccagcagaagagcgugcugagagugggcacccugagcagcgacgaccugcugauccuggccgccgaccuggagaagcugaagagcaaggugaccagaaccgagagaccccugagcagcggcguguacaugggcaaccugagcagccagcagcuggaccagagaagagcccugcugaacaugaucggcaugaccggcgugagcggcggcggcaagggcgccagcaacggcaucgugagagugugggacgugaagaacgccgagcugcugaacaaccaguucggcaccaugcccagccugacccuggccugccugaccaagcagggccagguggaccugaacgacgccgugcaggcccugaccgaccugggccugaucuacaccgccaaguaccccaacagcagcgaccuggacagacugagccagagccaccccauccugaacaugaucgacaccaagaagagcagccugaacaucagcggcuacaacuucagccugggcgccgccgugaaggccggcgccugcaugcuggacggcggcaacaugcuggagaccaucaaggugagcccccagaccauggacggcauccugaagagcauccugaaggugaagaagagccugggcauguucgugagcgacacccccggcgagagaaaccccuacgagaacauccuguacaagaucugccugagcggcgacggcuggagcuacaucgccagcagaaccagcaucgugggcagagccugggagaacaccgugguggaccuggagcaggacaacaagccccagaagaucggcaacggcggcagcaacaagagccugcagagcgccggcuucgccgccggccugaucuacagccagcugaugacccugaaggacuucaagugcuucaaccugauccccaacgccaagaccuggauggacaucgagggcagacccgaggaccccguggagaucgcccuguaccagcccagcagcggcugcuacgugcacuucuucagagagcccaccgaccugaagcaguucaagcaggacgccaaguacagccacggcagagacgugaccgaccuguucgccgcccagcccggccugaccagcgccgugaucgaggcccugcccagaaacauggugaucaccugccagggcagcgaggacaucagaaagcugcuggagagccagggcagaagagacaucaagcugaucgacaucacccugagcaaggccgacagcagaaaguucgagaacgccgugugggaccaguucaaggaccugugccacaugcacaccggcguggugguggagaagaagaagagaggcggcaaggaggagaucaccccccacugcgcccugauggacugcaucauguucgacgccgccgugagcggcggccuggacgccaaggugcugagaguggugcugcccagagacaugguguucagaaccagcacccccaagguggugcugugaggacuagucccuguucccagagcccacuuuuuuuucuuuuuuugaaauaaaauagccugucuuucagaucucaaaggcucuuuucagagccaccaaaaaaaaaaaaaaaaaaaaaaaaaaaaaaaaaaaaaaaaaaaaaaaaaaaaaaaaaaaaaaaaagaauu

SEQ ID NO: 18467 - RNA, 2033 nt, Artificial Sequence
  mRNA product Design a-2 (hSL-A64-N5) comprising derived and/or modified sequence from LASV(Nig08-A19;Clade III)__ADU56619__SP-HsPLAT_NP(2-569) (opt4)
aggagaguccgcucagccagguugcagaagcggcuuagcguguguccuaaucuucucucugcguguagguaggccugugccgcaaacaagcuuaccauggacgccaugaagagaggccugugcugcgugcugcugcugugcggcgccguguucgugagccccagcgccagcaaggaggugaagagcuuccuguggacccagagccugagaagagagcugagcggcuacugcagcaacaucaagcugcagguggugaaggacgcccaggcccugcugcacggccuggacuucagcgaggugagcaacgugcagagacugaugagaaagcagaagagagacgacggcgaccugaagagacugagagaccugaaccaggccgugaacaaccugguggagcugaagagcacccagcagaagagcgugcugagagugggcacccugagcagcgacgaccugcuggugcuggccgccgaccuggagaagcugaagagcaagguggugagaaccgagagaccccugagcagcggcaucuacaugggcaaccugagcagccagcagcuggaccagagaaaggcccugcugaacaugaucggcaugaccggcggcaacggcggcagaaacaccaccagcgacggcaucgugagagugugggacgugaagaacgccgagcugcugaacaaccaguucggcaccaugcccagccugacccuggccugccugaccaagcagggccagguggaccugaacgacgccgugcaggcccugaccgaccugggccugaucuacaccgccaaguaccccaacagcagcgaccuggacagacuggcccagagccaccccauccugaacaugaucgacaccaagaagagcagccugaacaucagcggcuacaacuucagccugggcgccgccgugaaggccggcgccugcaugcuggacggcggcaacaugcuggagaccaucaaggugagcccccagaccauggacggcauccugaagagcauccugaaggugaagagaagccugggcauguucaucagcgacacccccggcgagagaaaccccuacgagaacauccuguacaagaucugccugagcggcgacggcuggcccuacaucgccagcagaaccagcaucgugggcagagccugggagaacaccgugguggaccuggagagcgacaacaagccccagaagaccggcaacggcggcagcaacaagagccugcagagcgccggcuucgccgccggccugaccuacagccagcugaugacccugaaggacagcaugcugcagcuggaccccaacgccaagaccuggauggacaucgagggcagacccgaggaccccguggagaucgcccuguaccagcccagcagcggcugcuacauccacuucuucagagagcccaccgaccugaagcaguucaagcaggacgccaaguacagccacggcaucgacgugaccgaccuguucgccgcccagcccggccugaccagcgccgugaucgaggcccugcccagaaacauggugaucaccugccagggcagcgaggacaucagaaagcugcuggagagccagggcagaagagacaucaagcugaucgacaucagccugagcaagguggacagcagaaaguucgagaacgccgugugggaccaguucaaggaccugugccacaugcacaccggcaucgugguggagaagaagaagagaggcggcaaggaggagaucaccccccacugcgcccugauggacugcaucauguucgacgccgccgugagcggcggcguggacgccaaggugcugagagccgugcugcccagagacaugguguucagaaccagcacccccaagguggugcugugaggacuagucccuguucccagagcccacuuuuuuuucuuuuuuugaaauaaaauagccugucuuucagaucucaaaggcucuuuucagagccaccaaaaaaaaaaaaaaaaaaaaaaaaaaaaaaaaaaaaaaaaaaaaaaaaaaaaaaaaaaaaaaaaagaauu

SEQ ID NO: 18468 - RNA, 2033 nt, Artificial Sequence
  mRNA product Design a-2 (hSL-A64-N5) comprising derived and/or modified sequence from LASV(G1180-SLE-2010;Clade IV)__AIT17169__SP-HsPLAT_NP(2-569) (opt4)
aggagaguccgcucagccagguugcagaagcggcuuagcguguguccuaaucuucucucugcguguagguaggccugugccgcaaacaagcuuaccauggacgccaugaagagaggccugugcugcgugcugcugcugugcggcgccguguucgugagccccagcgccagcaaggagaucaagagcuuccuguggacccagagccugagaagagagcugagcggcuacugcagcaacaucaagcugcagguggugaaggacgcccaggcccugcugcacggccuggacuucagcgaggugagcaacgugcagagacugaugagaaaggagagaagagacgacaacgaccugaagagacugagagaccugaaccaggccgugaacaaccugguggagcugaagagcacccagcagaagagcauccugagagugggcacccugaccagcgacgaccugcugauccuggccgccgaccuggagaagcugaagagcaaggugaucagaaccgagagaccccugagcgccggcguguacaugggcaaccugagcagccagcagcuggaccagagaagagcccugcugagcaugaucggcaugagcagcggcaaccagagagcccaggccggcagagacggcguggugagagugugggacgugaagaacguggagcugcugaacaaccaguucggcaccaugcccagccugacccuggccugccugaccaagcagggccagguggaccugaacgacgccgugcaggcccugaccgaccugggccugaucuacaccgccaaguaccccaacaccagcgaccuggacagacugacccagagccaccccauccugaacaugaucgacaccaagaagagcagccugaacaucagcggcuacaacuucagccugggcgccgccgugaaggccggcgccugcaugcuggacggcggcaacaugcuggagaccaucaaggugagcccccagaccauggacggcauccugaagagcauccugaaggugaagaaggcccugggcauguucaucagcgacacccccggcgagagaaaccccuacgagaacauccuguacaagaucugccugagcggcgacggcuggcccuacaucgccagcagaaccagcaucaccggcagagccugggagaacaccgugguggaccuggagagcgacggcaagccccagaaggccggcagcaacaacagcaacaagagccugcagagcgugggcuucaccgccggccugaccuacagccagcugaugacccugaaggacgccaugcugcagcuggaccccaacgccaagaccuggauggacaucgagggcagacccgaggaccccguggagaucgcccuguaccagcccagcagcggcugcuacauccacuucuucagagagcccaccgaccugaagcaguucaagcaggacgccaaguacagccacggcaucgacgugaccgaccuguucgccgcccagcccggccugaccagcgccgugaucgacgcccugcccagaaacauggugaucaccugccagggcagcgacgacaucagaaagcugcuggagagccagggcagaaaggacaucaagcugaucgacaucgcccugagcaagaccgacagcagaaaguacgagaacgccgugugggaccaguacaaggaccugugccacaugcacaccggcguggugguggagaagaagaagagaggcggcaaggaggagaucaccccccacugcgcccugauggacugcaucauguucgacgccgccgugagcggcggccugaacaccagcgugcugagagccgugcugcccagagacaugguguucagaaccagcacccccagaguggugcugugaggacuagucccuguucccagagcccacuuuuuuuucuuuuuuugaaauaaaauagccugucuuucagaucucaaaggcucuuuucagagccaccaaaaaaaaaaaaaaaaaaaaaaaaaaaaaaaaaaaaaaaaaaaaaaaaaaaaaaaaaaaaaaaaagaauu

SEQ ID NO: 18469 - RNA, 2033 nt, Artificial Sequence
  mRNA product Design a-2 (hSL-A64-N5) comprising derived and/or modified sequence from LASV(G1442-SLE-2011;Clade IV)__AIT17181__SP-HsPLAT_NP(2-569) (opt4)
aggagaguccgcucagccagguugcagaagcggcuuagcguguguccuaaucuucucucugcguguagguaggccugugccgcaaacaagcuuaccauggacgccaugaagagaggccugugcugcgugcugcugcugugcggcgccguguucgugagccccagcgccagcaaggaggugaagagcuuccuguggacccagagccugagaagagagcugagcggcuacugcagcaacaucaagcugcagguggugaaggacgcccaggcccugcugcacggccuggacuucagcgaggugagcaacgugcagagacugaugagaaagcagagaagagacgacaacgaccugaagagacugagagaccugaaccaggccgugaacaaccugguggagcugaagagcacccagcagaagagcgugcugagagugggcacccugaccagcgacgaccugcuggugcuggccgccgaccuggagaagcugaagagcaaggugaucagaaccgagagaccccugagcgccggcguguacaugggcaaccugagcagccagcagcuggaccagagaagagcccugcugaacaugaucggcaugagcggcggcauccagggcaccagaaccggcagagacggcguggugagagugugggacgugaagaacgccgaccugcugaacaaccaguucggcaccaugcccagccugacccuggccugccugaccaagcagggccagguggaccugaacgacguggugcaggcccugaccgaccugggccugaucuacaccgccaaguaccccaacgccagcgaccuggacagacugacccagagccaccccauccugaacaugaucgacaccaagaagagcagccugaacaucagcggcuacaacuucagccugggcgccgccgugaaggccggcgccugcaugcuggacggcggcaacaugcuggagaccaucaaggugagcccccagaccauggacggcauccugaagagcauccugaaggugaagaagacccugggcauguucaucagcgacacccccggcgagagaaaccccuacgagaacauccuguacaagaucugccugagcggcgacggcuggcccuacaucgccagcagaaccagcaucaccggcagagccugggagaacaccgugguggaccuggagagcgacggcaagccccagaaggccggcagcaacaacagcaacaagagccugcagagcgccggcuucgccgccggccugaccuacagccagcugaugacccugaaggacgccaugcugcagcuggaccccaacgccaagaccuggauggacaucgagggcagacccgaggaccccguggagaucgcccuguaccagcccagcagcggcugcuacauccacuucuucagagagcccaccgaccugaagcaguucaagcaggacgccaaguacagccacggcaucgacgugaccgaccuguucgccgcccagcccggccugaccagcgccgugaucgaggcccugcccagaaacauggugaucaccugccagggcagcgacgacaucaagaagcugcuggagagccagggcagaaaggacaucaagcugaucgacaucgcccugagcaagaccgacagcagaaaguacgagaacgccgugugggaccaguacaaggaccugugccacaugcacaccggcguggugguggagaagaagaagagaggcggcaaggaggagaucaccccccacugcgcccugauggacugcaucauguucgacgccgccgugagcggcggccugaacacccuggugcugagagccgugcugcccagagacaugguguucagaaccagcacccccagaguggugcugugaggacuagucccuguucccagagcccacuuuuuuuucuuuuuuugaaauaaaauagccugucuuucagaucucaaaggcucuuuucagagccaccaaaaaaaaaaaaaaaaaaaaaaaaaaaaaaaaaaaaaaaaaaaaaaaaaaaaaaaaaaaaaaaaagaauu

SEQ ID NO: 18470 - RNA, 2033 nt, Artificial Sequence
  mRNA product Design a-2 (hSL-A64-N5) comprising derived and/or modified sequence from LASV(G3010-SLE-2013;Clade IV)__AIT17345__SP-HsPLAT_NP(2-569) (opt4)
aggagaguccgcucagccagguugcagaagcggcuuagcguguguccuaaucuucucucugcguguagguaggccugugccgcaaacaagcuuaccauggacgccaugaagagaggccugugcugcgugcugcugcugugcggcgccguguucgugagccccagcgccagcaaggagaucaagagcuuccuguggacccagagccugagaagagagcugagcggcuacugcagcaacaucaagcugcagguggugaaggacgcccaggcccugcugcacggccuggacuucagcgaggugagcaacgugcagagacugaugagaaaggagagaagagacgacaacgaccugaagagacugagagaccugaaccaggccgugaacaaccugguggagcugaagagcacccagcagaagagcauccugagagugggcacccugaccagcgacgaccugcugauccuggccgccgaccuggagaagcugaagagcaaggugaccagaaccgagagaccccugagcgccggcguguacaugggcaaccugagcagccagcagcuggaccagagaagagcccugcugagcaugaucggcaugagcagcggcgugcagggcgccagagccggcagagacggcguggugagagugugggacgugaagaacgccgagcugcugaacaaccaguucggcaccaugcccagccugacccuggccugccugaccaagcagggccagguggaccugaacgacguggugcaggcccugaccgaccugggccugaucuacaccgccaaguaccccaacaccagcgaccuggacagacugacccagagccaccccauccugaacaugaucgacaccaagaagagcagccugaacaucagcggcuacaacuucagccugggcgccgccgugaaggccggcgccugcaugcuggacggcggcaacaugcuggagaccaucaaggugagcccccagaccauggacggcauccugaagagcauccugaaggugaagaaggcccugggcauguucaucagcgagacccccggcgagagaaaccccuacgagaacauccuguacaagaucugccugagcggcgacggcuggcccuacaucgccagcagaaccagcaucaccggcagagccugggagaacaccgugguggaccuggagagcgacggcaagccccagaaggccggcagcaacaacagcaacaagagccugcagagcgccggcuucaccgccggccugaccuacagccagcugaugacccugaaggacgccaugcugcagcuggaccccaacgccaagaccuggauggacaucgagggcagacccgaggaccccguggagguggcccuguaccagcccagcagcggcugcuacauccacuucuucagagagcccaccgaccugaagcaguucaagcaggacgccaaguacagccacggcaucgacgugaccgaccuguucgccgcccagcccggccugaccagcgccgugaucgacgcccugcccagaaacauggugaucaccugccagggcagcgacgacaucaagaagcugcuggagagccagggcagaaaggacaucaagcugaucgacaucgcccugagcaagaccgacagcagaaaguacgagaacgccgugugggaccaguacaaggaccugugccacaugcacaccggcguggugguggagaagaagaagagaggcggcaaggaggagaucaccccccacugcgcccugauggacugcaucauguucgacgccgccgugagcggcggccugaacaccagcgugcugagagccgugcugcccagagacaugguguucagaaccagcacccccagaguggugcugugaggacuagucccuguucccagagcccacuuuuuuuucuuuuuuugaaauaaaauagccugucuuucagaucucaaaggcucuuuucagagccaccaaaaaaaaaaaaaaaaaaaaaaaaaaaaaaaaaaaaaaaaaaaaaaaaaaaaaaaaaaaaaaaaagaauu

SEQ ID NO: 18471 - RNA, 2033 nt, Artificial Sequence
  mRNA product Design a-2 (hSL-A64-N5) comprising derived and/or modified sequence from LASV(G502-SLE-2009;Clade IV)__AIT17127__SP-HsPLAT_NP(2-569) (opt4)
aggagaguccgcucagccagguugcagaagcggcuuagcguguguccuaaucuucucucugcguguagguaggccugugccgcaaacaagcuuaccauggacgccaugaagagaggccugugcugcgugcugcugcugugcggcgccguguucgugagccccagcgccagcaaggagaucaagagcuuccuguggacccagagccugagaagagagcugagcggcuacugcagcaacaucaagcugcagguggugaaggacgcccaggcccugcugcacggccuggacuucagcgaggugagcaacgugcagagacugaugagaaaggagagaagagacgacaacgaccugaagagacugagagaccugaaccaggccgugaacaaccugguggagcugaagagcacccagcagaagagcauccugagagugggcacccugaccagcgacgaccugcugauccuggccgccgaccuggagaagcugaagagcaaggugaucagaaccgagagaccccugagcgccggcguguacaugggcaaccugagcagccagcagcuggaccagagaagagcccugcugagcaugaucggcaugagcggcggcaaccagggcgugagagccggcaaggacggcguggugagagugugggacgugaagaacgccgagcugcugaacaaccaguucggcaccaugcccagccugacccuggccugccugaccaagcagggccagguggaccugaacgacgccgugcaggcccugaccgaccugggccugaucuacaccgccaaguaccccaacaccagcgaccuggacagacugacccagagccaccccauccugaacaugaucgacaccaagaagagcagccugaacaucagcggcuacaacuucagccugggcgccgccgugaaggccggcgccugcaugcuggacggcggcaacaugcuggagaccaucaaggugagcccccagaccauggacggcauccugaagagcauccugaaggugaagaaggcccugggcauguucaucagcgacacccccggcgagagaaaccccuacgagaacauccuguacaagaucugccugagcggcgacggcuggcccuacaucgccagcagaaccagcaucaccggcagagccugggagaacaccgugguggaccuggagagcgacggcaagccccagaaggccggcagcaacaacagcaacaagagccugcagagcgccggcuucaccgccggccugaccuacagccagcugaugacccugaaggacgccaugcugcagcuggaccccaacaccaagaccuggauggacaucgagggcagacccgaggaccccguggagaucgcccuguaccagcccagcagcggcugcuacauccacuucuucagagagcccaccgaccugaagcaguucaagcaggacgccaaguacagccacggcaucgacgugaccgaccuguucgccgcccagcccggccugaccagcgccgugaucgacgcccugcccagaaacauggugaucaccugccagggcagcgacgacaucagaaagcugcuggagagccagggcagaaaggacaucaagcugaucgacaucgcccugaacaagaccgacagcagaaaguacgagaacgccgugugggaccaguacaaggaccugugccacaugcacaccggcguggugguggagaagaagaagagaggcggcaaggaggagaucaccccccacugcgcccugauggacugcaucauguucgacgccgccgugagcggcggccugaacaccagcgugcugagagccgugcugcccagagacaugguguucagaaccagcacccccagaguggugcugugaggacuagucccuguucccagagcccacuuuuuuuucuuuuuuugaaauaaaauagccugucuuucagaucucaaaggcucuuuucagagccaccaaaaaaaaaaaaaaaaaaaaaaaaaaaaaaaaaaaaaaaaaaaaaaaaaaaaaaaaaaaaaaaaagaauu

SEQ ID NO: 18472 - RNA, 2033 nt, Artificial Sequence
  mRNA product Design a-2 (hSL-A64-N5) comprising derived and/or modified sequence from LASV(G733-SLE-2010;Clade IV)__AIT17155__SP-HsPLAT_NP(2-569) (opt4)
aggagaguccgcucagccagguugcagaagcggcuuagcguguguccuaaucuucucucugcguguagguaggccugugccgcaaacaagcuuaccauggacgccaugaagagaggccugugcugcgugcugcugcugugcggcgccguguucgugagccccagcgccagcaaggagaucaagagcuuccuguggacccagagccugagaagagagcugagcggcuacugcagcaacaucaagcugcagguggugaaggacgcccaggcccugcugcacggccuggacuucagcgaggugagcaacgugcagagacugaugagaaaggagagaagagacgacaacgaccugaagagacugagagaccugaaccaggccgugaacaaccugguggagcugaagagcacccagcagaagagcgugcugagagugggcacccugaccagcgacgagcugcuggugcuggccgccgaccuggagaagcugaagagcaaggugaucagaaccgagagaccccugagcgccggcguguacaugggcaaccugagcagccagcagcuggaccagagaagagcccugcugagcaugaucggcaugagcggcggcaaccagggcgccagaaccggcagagacggcguggugagagugugggacgugaagaacgccgagcugcugaacaaccaguucggcaccaugcccagccugacccuggccugccugaccaagcagggccagguggaccugaacgacgccgugcaggcccugaccgaccugggccugaucuacaccgccaaguaccccaacaccagcgaccuggacagacugacccagagccaccccauccugaacaugaucgacaccaagaagagcagccugaacaucagcggcuacaacuucagccugggcgccgccgugaaggccggcgccugcaugcuggacggcggcaacaugcuggagaccaucaaggugagcccccagaccauggacggcauccugaagagcauccugaaggugaagaaggcccugggcauguucaucagcgacacccccggcgagagaaaccccuacgagaacauccuguacaagaucugccugagcggcgacggcuggcccuacaucgccagcagaaccagcaucaccggcagagccugggagaacaccgugguggaccuggagagcgacggcaagccccagaaggccggcagcaacaacagcaacaagagccugcagagcgccggcuucaccgccggccugaccuacagccagcugaugacccugaaggacgccaugcugcagcuggaccccaacgccaagaccuggauggacaucgagggcagacccgaggaccccguggagaucgcccuguaccagcccagcagcggcugcuacauccacuucuucagagagcccaccgaccugaagcaguucaagcaggacgccaaguacagccacggcaucgacgugaccgaccuguucgccgcccagcccggccugaccagcgccgugaucgacgcccugcccagaaacauggugaucaccugccagggcagcgacgacaucagaaagcugcuggagagccagggcagaaaggacaucaagcugaucgacaucgcccugagcaagaucgacagcagaaaguacgagaacgccgugugggaccaguacaaggaccugugccacaugcacaccggcguggugguggagaagaagaagagaggcggcaaggaggagaucaccccccacugcgcccugauggacugcaucauguucgacgccgccgugagcggcggccugaacagccuggugcugagagccgugcugcccagagacaugguguucagaaccagcacccccagaguggugcugugaggacuagucccuguucccagagcccacuuuuuuuucuuuuuuugaaauaaaauagccugucuuucagaucucaaaggcucuuuucagagccaccaaaaaaaaaaaaaaaaaaaaaaaaaaaaaaaaaaaaaaaaaaaaaaaaaaaaaaaaaaaaaaaaagaauu

SEQ ID NO: 18473 - RNA, 2033 nt, Artificial Sequence
  mRNA product Design a-2 (hSL-A64-N5) comprising derived and/or modified sequence from MOPV/LASV reassortant(IGS-1;Clade IV)__AFY05578__SP-HsPLAT_NP(2-569) (opt4)
aggagaguccgcucagccagguugcagaagcggcuuagcguguguccuaaucuucucucugcguguagguaggccugugccgcaaacaagcuuaccauggacgccaugaagagaggccugugcugcgugcugcugcugugcggcgccguguucgugagccccagcgccagcaaggagaucaagagcuuccuguggacccagagccugagaagagagcugagcggcuacugcagcaacaucaagcugcagguggugaaggacgcccaggcccugcugcacggccuggacuucagcgaggugagcaacgugcagagacugaugagaaaggagagaagagacgacaacgaccugaagagacugagagaccugaaccaggccgugaacaaccugguggagcugaagagcacccagcagaagagcauccugagagugggcacccugaccagcgacgaccugcugauccuggccgccgaccuggagaagcugagaagcaaggugaucagaaccgagagaccccugagcgccggcguguacaugggcaaccugagcagccagcagcuggaccagagaagagcccugcugaacaugaucggcaugagcggcggcaaccagggcgccagagccggcagagacggcguggugagagugugggacgugaagaacgccgagcugcugagcaaccaguucggcaccaugcccagccugacccuggccugccugaccaagcagggccagguggaccugaacgacgccgugcaggcccugaccgaccugggccugaucuacaccgccaaguaccccaacaccagcgaccuggacagacugacccagagccaccccauccugaacaugaucgacaccaagaagagcagccugaacaucagcggcuacaacuucagccugggcgccgccgugaaggccggcgccugcaugcuggacggcggcaacaugcuggagaccaucaaggugagcccccagaccauggacggcauccugaagagcauccugaaggugaagaaggcccugggcauguucaucagcgacacccccggcgagagaaaccccuacgagaacauccuguacaagaucugccugagcggcgacggcuggcccuacaucgccagcagaaccagcaucaccggcagagccugggagaacaccgugguggaccuggagagcgacggcaagccccagaaggccgacagcaacaacagcagcaagagccugcagagcgccggcuucaccgccggccugaccuacagccagcugaugacccugaaggacgccaugcugcagcuggaccccaacgccaagaccuggauggacaucgagggcagacccgaggaccccguggagaucgcccuguaccagcccagcagcggcugcuacauccacuucuucagagagcccaccgaccugaagcaguucaagcaggacgccaaguacagccacggcaucgacgugaccgaccuguucgccacccagcccggccugaccagcgccgugaucgacgcccugcccagaaacauggugaucaccugccagggcagcgacgacaucagaaagcugcuggagagccagggcagaaaggacaucaagcugaucgacaucgaccugagcaagaccgacagcagaaaguacgagaacgccgugugggaccaguacaaggaccugugccacaugcacaccggcguggugguggagaagaagaagagaggcggcaaggaggagaucaccccccacugcgcccugauggacugcaucauguucgacgccgccgugagcggcggccugaacaccagcgugcugagagccgugcugcccagagacaugguguucagaaccagcacccccagaguggugcugugaggacuagucccuguucccagagcccacuuuuuuuucuuuuuuugaaauaaaauagccugucuuucagaucucaaaggcucuuuucagagccaccaaaaaaaaaaaaaaaaaaaaaaaaaaaaaaaaaaaaaaaaaaaaaaaaaaaaaaaaaaaaaaaaagaauu

SEQ ID NO: 18474 - RNA, 2033 nt, Artificial Sequence
  mRNA product Design a-2 (hSL-A64-N5) comprising derived and/or modified sequence from LASV(LM765-SLE-2012;Clade IV)__AIT17815__SP-HsPLAT_NP(2-569) (opt4)
aggagaguccgcucagccagguugcagaagcggcuuagcguguguccuaaucuucucucugcguguagguaggccugugccgcaaacaagcuuaccauggacgccaugaagagaggccugugcugcgugcugcugcugugcggcgccguguucgugagccccagcgccagcaaggagaucaagagcuuccuguggacccagagccugagaagagagcugagcggcuacugcagcaacaucaagcugcagguggugaaggacgcccaggcccugcugcacggccuggacuucagcgaggugagcaacgugcagagacugaugagaaaggagagaagagacgacaacgaccugaagagacugagagaccugaaccaggccgugaacaaccugguggagcugaagagcacccagcagaagagcauccugagagugggcacccugaccagcgacgaccugcugauccuggccgccgaccuggagaagcugaagagcaaggugaccagaaccgagagaccccugagcgccggcguguacaugggcaaccugagcagccagcagcuggaccagagaagagcccugcuggacaugaucggcaugagcggcagcaaccagggcgccagagccggcagagacggcguggugagagugugggacgugaagaacgccgagcugcugaacaaccaguucggcaccaugcccagccugacccuggccugccugaccaagcagggccagguggaccugaacgacgccgugcaggcccugaccgaccugggccugaucuacaccgccaaguaccccaacaccagcgaccuggacagacugacccagagccaccccauccugaacaugaucgacaccaagaagagcagccugaacaucagcggcuacaacuucagccugggcgccgccgugaaggccggcgccugcaugcuggacggcggcaacaugcuggagaccaucaaggugagcccccagaccauggacggcauccugaagagcauccugaaggugaagaaggcccugggcauguucaucagcgacgcccccggcgagagaaaccccuacgagaacauccuguacaagaucugccugagcggcgacggcuggcccuacaucgccagcagaaccagcaucaccggcagagccugggagaacaccgugguggaccuggagagcgacggcaagccccagaaggccggcagcaacggcagcaacaagagccugcagagcgccggcuucaccgccggccugaccuacagccagcugaugacccugaaggacgccaugcugcagcuggaccccaacgccaagaccuggauggacaucgagggcagacccgaggaccccguggagaucgcccuguaccagcccagcagcggcugcuacauccacuucuucagagagcccaccgaccugaagcaguucaagcaggacgccaaguacagccacggcaucgacgugaccgaccuguucgccgcccagcccggccugaccagcgccgugaucgacgcccugcccagaaacauggugaucaccugccagggcagcgacgacaucagaaagcuguucgagagccagggcagaaaggacaucaagcugaucgacaucgcccugagcaagaccgacagcagaaaguacgagaacgccgugugggaccaguacaaggaccugugccacaugcacaccggcaucgugguggagaagaagaagagaggcggcaaggaggagaucaccccccacugcgcccugauggacugcaucauguucgacgccgccgugagcggcggccugaacaccagcgugcugagagccgugcugcccagagacaugguguucagaaccagcacccccagaguggugcugugaggacuagucccuguucccagagcccacuuuuuuuucuuuuuuugaaauaaaauagccugucuuucagaucucaaaggcucuuuucagagccaccaaaaaaaaaaaaaaaaaaaaaaaaaaaaaaaaaaaaaaaaaaaaaaaaaaaaaaaaaaaaaaaaagaauu

SEQ ID NO: 18475 - RNA, 2033 nt, Artificial Sequence
  mRNA product Design a-2 (hSL-A64-N5) comprising derived and/or modified sequence from LASV(LM776-SLE-2012;Clade IV)__AIT17825__SP-HsPLAT_NP(2-569) (opt4)
aggagaguccgcucagccagguugcagaagcggcuuagcguguguccuaaucuucucucugcguguagguaggccugugccgcaaacaagcuuaccauggacgccaugaagagaggccugugcugcgugcugcugcugugcggcgccguguucgugagccccagcgccagcaaggagaucaagagcuuccuguggacccagagccugagaagagagcugagcagcuacugcagcaacaucaagcugcagguggugaaggacgcccaggcccugcugcacggccuggacuucagcgaggugagcaacgugcagagacugaugagaaaggagagaagagacgacaacgaccugaagagacugagagaccugaaccaggccgugaacaaccugguggagcugaagagcacccagcagaagagcauccugagagugggcacccugaccagcgacgaccugcugauccuggccgccgaccuggagaagcugaagagcaaggugaccagaaccgagagaccccugagcgccggcguguacaugggcaaccugagcagccagcagcuggaccagagaagagcccugcugagcaugaucggcaugagcggcagcaaccagggcgccagagccggcagagacggcguggugagagugugggacgugaagaacgccgagcugcugaacaaccaguucggcaccaugcccagccugacccuggccugccugaccaagcagggccagguggaccugaacgacgccgugcaggcccugaccgaccugggccugaucuacaccgccaaguaccccaacaccagcgaccuggacagacugacccagagccaccccauccugaacaugaucgacaccaagaagagcagccugaacaucagcggcuacaacuucagccugggcgccgccgugaaggccggcgccugcaugcuggacggcggcaacaugcuggagaccaucaaggugagcccccagaccauggacggcauccugaagagcauccugaaggugaagaaggcccugggcauguucaucagcgacacccccggcgagagaaaccccuacgagaacauccuguacaagaucugccugagcggcgacggcuggcccuacaucgccagcagaaccagcaucaccggcagagccugggagaacaccgugguggaccuggagagcgacggcaagccccagaaggccggcagcaacaacagcaacaagagccugcagagcgccggcuucaccgccggccugaccuacagccagcugaugacccugaaggacgccaugcugcagcuggaccccaacgccaagaccuggauggacaucgagggcagacccgaggaccccguggagguggcccuguaccagcccagcagcggcugcuacauccacuucuucagagagcccaccgaccugaagcaguucaagcaggacgccaaguacagccacggcaucgacgugaccgaccuguucgccgcccagcccggccugaccagcgccgugaucgacgcccugcccagaaacauggugaucaccugccagggcagcgacgacaucagaaagcugcuggagagccagggcagaaaggacaucaagcugaucgacaucgcccugagcaagaccgacagcagaaaguacgagaacgccgugugggaccaguacaaggaccugugccacaugcacaccggcguggugguggagaagaagaagagaggcggcaaggaggagaucaccccccacugcgcccugauggacugcaucauguucgacgccgccgugagcggcggccugaacaccagcgugcugagagccgugcugcccagagacaugguguucagaaccagcacccccagaguggugcugugaggacuagucccuguucccagagcccacuuuuuuuucuuuuuuugaaauaaaauagccugucuuucagaucucaaaggcucuuuucagagccaccaaaaaaaaaaaaaaaaaaaaaaaaaaaaaaaaaaaaaaaaaaaaaaaaaaaaaaaaaaaaaaaaagaauu

SEQ ID NO: 18476 - RNA, 2033 nt, Artificial Sequence
  mRNA product Design a-2 (hSL-A64-N5) comprising derived and/or modified sequence from LASV(Mad39;Clade IV)__ANH09723__SP-HsPLAT_NP(2-569) (opt4)
aggagaguccgcucagccagguugcagaagcggcuuagcguguguccuaaucuucucucugcguguagguaggccugugccgcaaacaagcuuaccauggacgccaugaagagaggccugugcugcgugcugcugcugugcggcgccguguucgugagccccagcgccagcaaggagaucaagagcuuccuguggacccagagccugagaagagagcugagcggcuacugcagcaacaucaagcugcagguggugaaggacgcccaggcccugcugcacggccuggacuucagcgaggugagcaacgugcagagacugaugagaaagcagagaagagacgacaacgaccugaagagacugagagaccugaaccaggccgugaacaaccugguggagcugaagagcacccagcagaagagcgugcugagagugggcacccugaccagcgacgaccugcugacccuggccgccgaccuggagaagcugaagagcaaggugaccagaaccgagagaccccugaccgccggcguguacaugggcaaccugagcagccagcagcuggaccagagaagagcccugcugaacaugaucggcaugagcggcggcaaccagggcgccagaaccggcagagacggcguggugagagugugggacgugaagaacgccgagcugcugaacaaccaguucggcaccaugcccagccugacccuggccugccugaccaagcagggccagguggaccugaacgacguggugcaggcccugaccgaccugggccugaucuacaccgccaaguaccccaacaccagcgaccuggacagacugacccagagccaccccauccugaacaugaucgacaccaacaagagcagccugaacaucagcggcuacaacuucagccugggcgccgccgugaaggccggcgccugcaugcuggacggcggcaacaugcuggagaccaucaaggugagcccccagaccauggacggcauccugaagagcauccugaaggugaagaagagccugggcauguucaucagcgacacccccggcgagagaaaccccuacgagaacauccuguacaagaucugccugagcggcgacggcuggcccuacaucgccagcagaaccagcaucaccggcagagccugggagaacaccgugguggaccuggagagcggcggcaagccccagaaggccggcagcaacaacagcaacaagagccugcagagcgccggcuucgccgccggccugaccuacagccagcugaugacccugaaggacgccaugcugcagcuggaccccaacgccaagaccuggauggacaucgagggcagacccgaggaccccguggagaucgcccuguaccagcccaucagcggcugcuacauccacuucuucagagagcccaccgaccugaagcaguucaagcaggacgccaaguacagccacggcaucgacgugaccgaccuguucgccgcccagcccggccugaccagcgccgugaucgaggcccugcccagaaacauggugaucaccugccagggcagcgacgacaucagaaagcuguucgagagccagggcagaaaggacaucaagcugaucgacaucgcccugagcaagaccgacagcagaaaguacgagaacgccgugugggaccaguacaaggaccugugccacaugcacaccggcguggugguggagaagaagaagaagggcggcaaggaggagaucaccccccacugcgcccugauggacugcaucauguucgacgccgccgugagcggcggccugaacacccuggugcugagagccgugcugcccagagacaugguguucagaaccagcacccccaagguggugcugugaggacuagucccuguucccagagcccacuuuuuuuucuuuuuuugaaauaaaauagccugucuuucagaucucaaaggcucuuuucagagccaccaaaaaaaaaaaaaaaaaaaaaaaaaaaaaaaaaaaaaaaaaaaaaaaaaaaaaaaaaaaaaaaaagaauu

SEQ ID NO: 18477 - RNA, 2033 nt, Artificial Sequence
  mRNA product Design a-2 (hSL-A64-N5) comprising derived and/or modified sequence from LASV(Z0947-SLE-2011;Clade IV)__AIT17841__SP-HsPLAT_NP(2-569) (opt4)
aggagaguccgcucagccagguugcagaagcggcuuagcguguguccuaaucuucucucugcguguagguaggccugugccgcaaacaagcuuaccauggacgccaugaagagaggccugugcugcgugcugcugcugugcggcgccguguucgugagccccagcgccagcaaggagaucaagagcuuccuguggacccagagccugagaagagagcugagcggcuacugcagcaacaucaagcugcagguggugaaggacgcccaggcccugcugcacggccuggacuucagcgaggugagcaacgugcagagacugaugagaaaggagagaagagacgacaacgaccugaagagacugagagaccugaaccaggccgugaacaaccugguggagcugaagagcacccagcagaagagcauccugagagugggcacccugaccagcgacgaccugcugauccuggccgccgaccuggagaagcugaagagcaaggugaccagaaccgagagaccccugagcgccggcguguacaugggcaaccugagcagccagcagcuggaccagagaagagcccugcugaacaugaucggcaugagcggcagcaaccagggcgccagaaccggcagagacggcguggugagagugugggacgugaagaacgccgagcugcugaacaaccaguucggcaccaugcccagccugacccuggccugccugaccaagcagggccagguggaccugaacgacgccgugcaggcccugaccgaccugggccugaucuacaccgccaaguaccccaacaccagcgaccuggacagacugacccagagccaccccauccugaacaugaucgacaccaagaagagcagccugaacaucagcggcuacaacuucagccugggcgccgccgugaaggccggcgccugcaugcuggacggcggcaacaugcuggagaccaucaaggugagcccccagaccauggacggcauccugaagagcauccugaaggugaagaaggcccugggcauguucaucagcgacgcccccggcgagagaaaccccuacgagaacauccuguacaagaucugccugagcggcgacggcuggcccuacaucgccagcagaaccagcaucaccggcagagccugggagaacaccgugguggaccuggagagcgacggcaagccccagaaggccggcagcaacggcagcaacaagagccugcagagcgccggcuucaccgccggccugaccuacagccagcugaugacccugaaggacgccaugcugcagcuggaccccaacgccaagaccuggauggacaucgagggcagacccgaggaccccguggagaucgcccuguaccagcccagcagcggcugcuacauccacuucuucagagagcccaccgaccugaagcaguucaagcaggacgccaaguacagccacggcaucgacgugaccgaccuguucgccgcccagcccggccugaccagcgccgugaucgacgcccugcccagaaacauggugaucaccugccagggcagcgacgacaucagaaagcuguucgagagccagggcagaaaggacaucaagcugaucgacaucgcccugagcaagaccgacagcagaaaguacgagaacgccgugugggaccaguacaaggaccugugccacaugcacaccggcaucgugguggagaagaagaagagaggcggcaaggaggagaucaccccccacugcgcccugauggacugcaucauguucgacgccgccgugagcggcggccugaacaccagcgugcugagagccgugcugcccagagacaugguguucagaaccagcacccccagaguggugcugugaggacuagucccuguucccagagcccacuuuuuuuucuuuuuuugaaauaaaauagccugucuuucagaucucaaaggcucuuuucagagccaccaaaaaaaaaaaaaaaaaaaaaaaaaaaaaaaaaaaaaaaaaaaaaaaaaaaaaaaaaaaaaaaaagaauu

SEQ ID NO: 18478 - RNA, 2033 nt, Artificial Sequence
  mRNA product Design a-2 (hSL-A64-N5) comprising derived and/or modified sequence from LASV(Josiah;Clade IV)__NP_694869__SP-HsPLAT_NP(2-569) (opt5)
aggagaguccgcucagccagguugcagaagcggcuuagcguguguccuaaucuucucucugcguguagguaggccugugccgcaaacaagcuuaccauggacgccaugaagagaggccugugcugugugcuccugcuuugcggggcugucuucguuagccccagcgccuccaaggagaucaaaucuuuccuguggacccagagccucagacgggaacuguccggcuacugcucuaacauuaagcugcaaguggucaaagacgcucaggcccugcuccacgggcuggauuuuagcgagguuuccaaugugcagcgccuuaugagaaaggaacggcgcgacgauaacgaccugaaaagacuccgggaucugaaucaggcggugaacaaucuggucgagcucaagucuacacaacaaaagagcauccugcgcgugggaacgcuuaccuccgacgaucugcucauucuggcugccgaccuugaaaaacuuaagagcaaaguuaucagaacagagcggccccucucugccggcguguauauggggaaccuguccagccagcagcuggaucagcgcagagcucuccugaauaugauuggaaugucuggcgggaaccagggagcccgggcuggccgcgacggcgucgugagaguuugggaugugaagaaugccgagcuucugaacaaucaguucgggaccaugccuucccucacacuggcgugucuuaccaaacagggacaagucgaccugaacgaugccgugcaggcucucacagaccugggccugaucuacaccgccaaguauccgaauacgagcgaccucgaucggcugacccagucucaucccauccuuaacaugauugacacaaagaaauccagccugaauaucuccggguacaacuuuucucucggagcugccgugaaggcgggcgccugcaugcuggaugggggaaacaugcuugaaaccauuaaagucagcccucaaacaauggacggcauccugaaguccauucucaaaguuaagaaagcucugggcauguucaucagcgauacccccggggagcgcaauccuuaugaaaacauucuguacaagaucugucucucuggagacggcuggcccuauaucgccuccagaacgagcauuacagggcgggcuugggagaauaccgugguggaucuggagucugacggaaagccucagaaagccgauagcaacaauuccucuaagagccuucaguccgccggcuuuacagcugggcugaccuacagccagcucaugacccugaaagacgcgaugcugcaacuugauccgaacgccaagacauggauggacaucgaaggaagacccgaggacccugucgaaauugcucucuaccagcccucuuccggcugcuauauccacuucuuucgcgagccuacggaucugaaacaguucaagcaggacgccaaguacagccauggcauugaugugaccgaccuguuugccacacaacccgggcucaccucugcuguuaucgaugcccugccgcggaauauggugaucacaugucagggauccgacgauauuagaaaacuucuggaaagccagggccgcaaggacaucaaacucauugauaucgcgcuguccaagaccgacucucggaaauaugagaacgcugucugggaucaguacaaggaccugugccacaugcauacgggggugguuguggagaagaaaaagagaggaggcaaagaagagauuacaccucacugugcccuuauggauugcaucauguucgacgccgcugucagcgggggccucaauaccuccgugcugcgcgccguccugccccgggacaugguguuuagaaccucuacaccucgcguugugcucugaggacuagucccuguucccagagcccacuuuuuuuucuuuuuuugaaauaaaauagccugucuuucagaucucaaaggcucuuuucagagccaccaaaaaaaaaaaaaaaaaaaaaaaaaaaaaaaaaaaaaaaaaaaaaaaaaaaaaaaaaaaaaaaaagaauu

SEQ ID NO: 18479 - RNA, 2033 nt, Artificial Sequence
  mRNA product Design a-2 (hSL-A64-N5) comprising derived and/or modified sequence from LASV(LP;Clade I)__AAF86702__SP-HsPLAT_NP(2-569) (opt5)
aggagaguccgcucagccagguugcagaagcggcuuagcguguguccuaaucuucucucugcguguagguaggccugugccgcaaacaagcuuaccauggacgccaugaagagaggccugugcugugugcuccugcuuugcggggcugucuucguuagccccagcaacuccaaggagaucaaaucuuuccuguggacccagagccucagacgggaacuguccggcuacugcucuaauauuaagcuccaaguggucaaagacgcccaggcucugcuccacgggcuggauuuuagcgagguuuccaacgugcagcgccuuaugagaaagcagaaacgggacgaugccgaccugaagcgccucagagaucugaaucaagcggugaacaaucuggucgaacucaagucuacacagcagaaaaacgugcugcggguuggaacgcuuagcuccgacgaucugaucacccucgcugccgaccuggagaaacuuaaaagcaaggugauucgcacagaaagaccccugucuuccggcgucuauauggggaaucucagcucucagcaacuggaucagcggcgcgcccugcucuccaugaucggaaugagcggcgggccucagggaaacagaaccggcggcgacggggugguucgggugugggaugucaaaaaugcugagcugcuuaacaaucaguucggaacaaugccgucucugacccucgccugucugacaaagcaaggccagguggaccuuaacgaugcugugcaggcccugaccgaccucgggcugauuuacacggcgaaguaucccaauuccagcgaccuggauaugcucacccaaucccauccuauccugggaauggucgacacaaagaagucuagccuuaacaucuccggcuacaauuuuagccugggggccgcuguuaaagccggagcuugcaugcucgauggcggcaacaugcuggagaccauuaaggugucuccccagacaauggacgggauccuuaaauccauucugaaggugaaacgcagccucggaauguucaucucugauaccccuggcgaaagaaaccccuaugagaauauucuguacaagaucugucugagcggggaaggauggccuuauauugccucccggacgucuaucacaggccgcgcgugggagaacacccucgucgaccuggagagcgauaauaagccgcccaaacuuaacuccgccgggagcaauaagucucugcaggcugccggacucaacgcuggccugacauacucccagcugaugacccuuaaagacugcaugcuccaacuggauccuagcucuaagaccuggaucgacauugaaggcagacccgaggauccuguggaaaucgcccuguuucagcccuccagcggguguuacauucacuucuuucgggagccgacagaccucaaacaguucaagcaggacgccaaguauucccauggaaucgauguuacggaccuguuuucuacccaaccuggccuuacaagcgcugugauugaagcgcugcccagaaauaugguccuuaccugccagggguccgaugacaucaaaaagcugcuggagucucagggacgccgggauaucaaacuuauugacaucagccucuccaaggccgauagcagaaaauucgagaacgcugugugggaccaguacaaggaucugugucacaugcauacaggcguuguggucgaaaagaaaaagcgcgggggcaaagaggaaauuaccccucacugcgcccugcucgacuguaucauguuugaugccgcuacgacaggaucucugaauauuaccacccuucgggccgugcugcccagagacauggucuuccgcacauccacccccaaggugguucucugaggacuagucccuguucccagagcccacuuuuuuuucuuuuuuugaaauaaaauagccugucuuucagaucucaaaggcucuuuucagagccaccaaaaaaaaaaaaaaaaaaaaaaaaaaaaaaaaaaaaaaaaaaaaaaaaaaaaaaaaaaaaaaaaagaauu

SEQ ID NO: 18480 - RNA, 2033 nt, Artificial Sequence
  mRNA product Design a-2 (hSL-A64-N5) comprising derived and/or modified sequence from LASV(803213;Clade II)__AAF86704__SP-HsPLAT_NP(2-569) (opt5)
aggagaguccgcucagccagguugcagaagcggcuuagcguguguccuaaucuucucucugcguguagguaggccugugccgcaaacaagcuuaccauggacgccaugaagagaggccugugcugugugcuccugcuuugcggggcugucuucguuagccccagcgccuccaaggaggugaaaucuuuccuguggacccagagccucagacgggaacuguccggcuacugcucuaacaucaaacuucaagucguuaaggacgcucaggcccugcuccacgggcuggauuuuagcgaggugaauaacgugcagcgccuuaugagaaagcagaaacgggacgauggagaccugaagcgccucagagaucugaaucaagcggucaacaaucugguggaacucaaguccacacagcagaaaucuauucugcggguuggcacgcuuaccagcgacgaucugcucacacuggcugccgaccuugagaagcugaaauccaaggugauccgcaccgaaagaccccucagcucuggggucuauaugggaaaccuguccacacagcaacuggagcagcggcgcgcccuccugaauaugauuggcauggugggaggagcucagggcacccagccuggcagagaugggguugugcgggucugggacgugaaaaacccggaucuucugaauaaccaauucggaacaaugcccagccucacccuggccugucuuacgaagcagggccagguggaccugaaugaugcuguccucgcccugaccgaccuggggcucaucuacacagcgaaguauccuaacucuuccgaccuggaucgccuuagccaaucucaucccauucugaauaugguugacaccaaaaaguccagccucaacaucuccggauacaauuuuucucugggcgccgcugugaaagccggggcuugcaugcuugauggaggcaacaugcuggagacaaucaaggugaccccucagacgauggacggcauucucaaaagcauccugaaggucaaaagaucccuggggauguucgugagcgauacacccggagaacggaacccuuaugagaauauucucuacaagaucugucugucuggcgacggguggccguauauugccucccgcaccagcaucguugggagagcgugggaaaacacaaccguggaucuugagucugacggcaagccccagaaagucgggaccgccggaagcaauaagucccugcagucugcuggcuuuccuacaggccucacguacagccaacugaugacccugaaagauuccaugaugcagcuugaccccagcgccaagacauggauugauaucgaggggcggccugaagaccccguggagaucgcucucuaccagccgaugucuggaugcuauauucacuucuuuagagaaccuaccgaccugaaacaguucaagcaagaugccaaguacucccauggcaucgacguugccgaucuguuucccgcucagccugggcucacaagcgcggugauugaggcccugccccgcaacaugguccuuaccugucagggaucugacgauaucaaaaagcugcucgacucccagggccggagagauauuaaacugaucgacaucagccuguccaagguggauucucgcaaauucgaaaaugcugucugggaccaaugcaaggaucuuugucacaugcauacgggggugguuguggagaagaaaaagcggggcggaaaagaggaaauuacaccccacugcgcccucauggacuguaucauguuugaugccgcugucagcggcgggcugaacauuccugugcugagagccguucucccgcgcgacaugguguuccggaccuccucucccaaggucgugcugugaggacuagucccuguucccagagcccacuuuuuuuucuuuuuuugaaauaaaauagccugucuuucagaucucaaaggcucuuuucagagccaccaaaaaaaaaaaaaaaaaaaaaaaaaaaaaaaaaaaaaaaaaaaaaaaaaaaaaaaaaaaaaaaaagaauu

SEQ ID NO: 18481 - RNA, 2036 nt, Artificial Sequence
  mRNA product Design a-2 (hSL-A64-N5) comprising derived and/or modified sequence from LASV(GA391;Clade III)__CAA36646__SP-HsPLAT_NP(2-570) (opt5)
aggagaguccgcucagccagguugcagaagcggcuuagcguguguccuaaucuucucucugcguguagguaggccugugccgcaaacaagcuuaccauggacgccaugaagagaggccugugcugugugcuccugcuuugcggggcugucuucguuagccccagcgccuccaaggaggugagaucuuuccuguggacccagagccuccggcgcgaacuguccggcuacugcucuaacaucaaacuucaagucguuaaggacgcucaggcccugcuccacgggcuggauuuuagcgagguguccaaugugcagagacuuaugcggaaacagaagcgcgacgauggagaccugaaaagacuccgggaucugaaccaagcggucaauaaccugguggaacucaagucuacacagcagaaaagcguucugcgcgugggcacgcuuuccagcgacgaucugcucauucuggcugccgaccuugagaaacugaagucuaaagucaccagaacagaacggccccucuccagcgggguguauaugggaaaucugucuucccagcaacuggaucagcgcagagcccuccugaacaugaucggcaugaccgggguuagcggaggcggcaagggggcuucugacggaauugugcgggucugggaugugaaaaaugccgagcuucugaacaaucaguucggcacaaugccuucccucacccuggcuugucuuacaaagcaggggcaaguggaccugaacgaugccguccaggcgcucaccgaccugggacugaucuacacggccaaguauccgaauagcuccgaccucgaucgccugucucagagccaucccauucuuaacaugaucgacaccaaaaaguccagccugaauaucucuggcuacaacuuuucccucggggcugccguuaaagcuggagccugcaugcuggauggcggcaauaugcuugagacaauuaaggugagcccucaaaccauggacgggauccugaaaucuauucucaaggugaaaaagagccugggaauguucgucuccgauacacccggcgaaagaaacccuuaugagaacauccuguacaagauuugucucucuggggacggauggcccuauaucgcgagccggaccuccauugugggccgcgccugggaaaauacgguuguggaucuggagcaggacaacaaaccucagaagaucgggaauggaggcagcaacaaaucucuucaguccgcuggcuuugccgcugggcugacauacagccaacucaugacccugaaggauuucaaaugcuuuaaucugaucccgaacgccaagacauggauggacauugagggaagacccgaagauccugucgagaucgcccuuuaccagcccucuuccggcuguuaugugcacuucuuucgggaaccuaccgaccucaagcaguucaaacaggacgcuaaguacagccaugggauugauguuaccgaccuguuugcggcccaacccggacugacauccgcugugaucgaggcccucccgagaaauauggucauuacgugccagggcucugaagauauccgcaaacugcuugagagccaggggcggagagacaucaagcugauugauaucacccucuccaaagccgacucucgcaaguucgagaacgcugugugggaucaguuuaaggaccugugucacaugcauacaggcgucgugguugaaaagaagaaacggggaggcaaggaggaaauuaccccucacugcgcccugauggauuguaucauguucgacgcggcugugagcgggggacuugaugccaaaguccucagagugguucugccccgcgacaugguguuccggacauccaccccuaaggucgugcugugaggacuagucccuguucccagagcccacuuuuuuuucuuuuuuugaaauaaaauagccugucuuucagaucucaaaggcucuuuucagagccaccaaaaaaaaaaaaaaaaaaaaaaaaaaaaaaaaaaaaaaaaaaaaaaaaaaaaaaaaaaaaaaaaagaauu

SEQ ID NO: 18482 - RNA, 2033 nt, Artificial Sequence
  mRNA product Design a-2 (hSL-A64-N5) comprising derived and/or modified sequence from LASV(AV;Clade V)__CCA30315__SP-HsPLAT_NP(2-569) (opt5)
aggagaguccgcucagccagguugcagaagcggcuuagcguguguccuaaucuucucucugcguguagguaggccugugccgcaaacaagcuuaccauggacgccaugaagagaggccugugcugugugcuccugcuuugcggggcugucuucguuagccccagcgccuccaaggaggugaaaucuuuccuguggacccagagccucagacgggaacuguccggcuacugcucuaacaucaaacuucaagucguuaaggacgcucaggcccugcuccacgggcuggauuuuagcgagguguccaaugugcagcgccuuaugagaaagcagcggcgcgacgauucugaccugaaaagacuccgggaucugaaccaagcggucaauaaccugguggaacucaagagcacacagcagaaguccguucugcgcgugggaacgcuuagcucugacgaucugcucacccuggcugccgaccuugagaaacugaaguccaaagucacaagaaccgaacggccccucagcucuggcguguauauggggaaucuguccagccagcaacuggaucagcgcagagcccuccugaaccuuauuggaaugacaaauggcucucaggggucccaggcuggacgggacggcguugugcgcgucugggaugugaagaacgccgagcugcucaauaaccaauucggcaccaugccuagccugacacuugcuugucugaccaaacagggacagguggaccucaaugaugucguucaagcccugacggaccuggggcucaucuacaccgcgaaguauccgaacacauccgaccuggauagacuuacccagucucaucccauucugaauaugaucgacacaaagaaaagcucccucaacauuagcggcuacaauuuuucucugggggccgcugugaaggccggagcuugcaugcuugauggcgggaacaugcuggagaccaucaaaguguccccucagagcauggacggaauccucaagucuauucugaaagucaagcgggcccugggcauguucgugagcgauacgcccggcgaacgcaacccuuaugagaauauccucuacaaaauuugucuguccggggacggauggcccuauaucgcgucuagaacaagcauuguuggccgggccugggaaaacaccguggucgaucuugagacagacgggaagccucagaagaucggauccggcaauagcaacaaaucucugcaauccgcuggguuuagcgccggacucaccuacucucagcugaugacccugaaggaugcuaugcuucagcucgacccgaaugccaaaacauggauggauauugagggcagacccgaagacccuguggagguugcccuguaccagcccaucuccggcugcuauauccacuucuuucgcgaaccuacggaccugaagcaauucaaacaggaugcuaaguacagccaugggauugacaucgcggaucucuuugccgcucagcccggacugaccuccgccgugauugaggcccuuccgcggaacauggucaucacaugucagggcucugaagacauuaagaaacugcucgagagccaagggagaaaggauaucaaacugaucgacauugcucuguccaagaucgauucucgcaaauucgagaaugccgugugggaccaguauaaggaucuuugccacaugcauaccggagucgugguugaaaagaaaaagcggggcgggaaagaggaaauuacaccucacugugcgcucauggacugcaucauguuugaugcugccgugagcggcggacugaacacccugguccucagagccgugcugccccgcgacaugguuuuccggacguccacaccuagagugguccuuugaggacuagucccuguucccagagcccacuuuuuuuucuuuuuuugaaauaaaauagccugucuuucagaucucaaaggcucuuuucagagccaccaaaaaaaaaaaaaaaaaaaaaaaaaaaaaaaaaaaaaaaaaaaaaaaaaaaaaaaaaaaaaaaaagaauu

SEQ ID NO: 18483 - RNA, 2033 nt, Artificial Sequence
  mRNA product Design a-2 (hSL-A64-N5) comprising derived and/or modified sequence from LASV(Togo/2016/7082;Clade VI)__AMR44578__SP-HsPLAT_NP(2-569) (opt5)
aggagaguccgcucagccagguugcagaagcggcuuagcguguguccuaaucuucucucugcguguagguaggccugugccgcaaacaagcuuaccauggacgccaugaagagaggccugugcugugugcuccugcuuugcggggcugucuucguuagccccagcaacuccaaggaggugaaaucuuuccuguggacccagagccucagacgggaacuguccggcuacugcucuaauaucaaacuucaagucguuaaagacgcccaggcucugcuccacgggcuggauuuuagcgagguguccaacgugcagcgccuuaugagaaagcagaaacgggacgauggagaccugaagcgccucagagaucugaaucaagccgucaacaaucugguggaacucaagucuguucagcagaaaagcauucugcgggugggcacacuuacguccgacgaucugcucacccuggcggcugaccuugagaagcugaaaagcaaggucacacgcaccgaaagaccccucucuuccgggguguauaugggaaaccugagcucucagcaacuggaucagcggcgcgcccuccuguccaugaucggcaugagcgggggaaaucagaacucucagccuaaaggcgacggcguugugagagucugggaugugaagaaugccgaccuucugaacaaucaauucgggacaaugccgucccucacccuggcuugucuuacaaagcagggacagguggaucugaacgacgccguccaagcucucaccgaccugggccugauuuacacggccaaauaucccaauagcuccgaucucgaccggcugucucagagccauccuauccuuaacaugauugauaccaagaaauccagccugaauaucucuggguacaacuuuucccucggagcggccaucaagacaggcgcuugcaugcuggacgggggaaacaugcuugagaccauuaaaguuacaccccagaccauggauggcauccucaagagcauucugaaagugaagcgcucucugggcauguucaucagcgacacgccuggggagagaaaucccuaugaaaacauucuguacaagaucugucucuccggagauggcuggccuuauauugccucucggacagcuaucaucgggcgcgccugggagaauaccguggucgaccuggaaagcgauuccaaaccgcagaagauuggaagcaacggcucuaauaaaucccuucaaagcgcgggguuugcccccggacugacauacucucagcucaugacccugaaggacuccaugcugcagcuugauccuaacgcuaaaaccuggaucgacauugagggcagacccgaggacccuguggaaguugcccucuuccagcccaucagcggcugcuacauucacuuuuuccgggagccgacagaucugaagcaauuuaagcaggacgcuaaauauucccaugggaucgaugugacggaccuguucgccgcccagccuggacucaccucugcugucaucgaagcgcugcccagaaauauggugcuuacaugucagggcagcgaugacauuaagaaacugcucgauucccaagggcgccgggacaucaagcugauugauguuucucugaacaaaaucgacagcagaaaguuugagaaugccgugugggaucaguacaaggaccuuugccacaugcauaccggagucguggucgaaaagaagaaaaagggcgggaaagaggagauuacaccucacugugcucuccuggauugcaucauguucgacgccgccguguccggcggacugaacgcuaccguucuccgcgccgugcugccccgggacauggucuuuagaacgagcucucccaaggugguucuuugaggacuagucccuguucccagagcccacuuuuuuuucuuuuuuugaaauaaaauagccugucuuucagaucucaaaggcucuuuucagagccaccaaaaaaaaaaaaaaaaaaaaaaaaaaaaaaaaaaaaaaaaaaaaaaaaaaaaaaaaaaaaaaaaagaauu

SEQ ID NO: 18484 - RNA, 2033 nt, Artificial Sequence
  mRNA product Design a-2 (hSL-A64-N5) comprising derived and/or modified sequence from LASV(KAK-428;Clade n.d. (VII))__ANH09741__SP-HsPLAT_NP(2-569) (opt5)
aggagaguccgcucagccagguugcagaagcggcuuagcguguguccuaaucuucucucugcguguagguaggccugugccgcaaacaagcuuaccauggacgccaugaagagaggccugugcugugugcuccugcuuugcggggcugucuucguuagccccagcaacuccaaggaggugaaaucuuuccuguggacccagagccucagacgggaacuguccggcuacugcacaaauaucaaacuucaagucguuaaggacgcccaggcucugcuccacgggcuggauuuuucugaggugagcaacgugcagcgccuuaugagaaagcagaaacgggacgauaaugaccugaagcgccucagagaucugaaccaagccgucaauaaccugguggaacucaaguccguucagcagaaaucugugcugaaggucggaacgcuuaauagcgacgaucugcucacccuggcggcugaccuugagaaacugaaguccaaagugguucggacagaacgcccccucagcucuggcguguauauggggaaccuguccagccagcaacuggaucagagacgggcccuccugaauaugauuggaauggccggcgggucucagggaaaccagccuucccgcgacggcgucgugagagugugggaugucaagaaugcugaccuucugaacaaucaauucggcaccaugccgagccucacacuggccugucuuaccaagcaggggcagguugaucugaacgacguggugcucgcucugacagaccugggacucaucuacaccgccaaauaucccaauucuuccgaucuggaccggcuuagccaaaaccauccuguccugaacaugauugaugugaauaaguccucucucaacaucagcggcuacaauuuuucccugggggcggccguuaaagcuggagccugcaugcuugacggcgggaacaugcuggagacgauuaagaucagcccccagaccguggauggaauccucaaaucuauucugaaggucaaacgcgcucugggcauguucguguccgacacaccuggcgagagaaaucccuaugaaaacauccucuacaagguuugucugagcgggaauggauggccuuauauugccucucggaccagcaucgugggccgcgcgugggagaacacagucguggaucuugaauccaauaagaaccagccgaaagucgggaauaacggaucuaauaagaugcugcagagcuccggcuuugccaccgggcucacguacagccaacugaugacacugagagacucuaugcuucagcucgaucccaccgcuaaaacauggauugacaucgagggacggccugaggaucccguggaacuggcccuguuccagccuuccagcggcugcuacauucacuuuuucagagagcccaccgaccucaagcaguuuaaacaagacgcuaaguauucucauggcaucgauguuaacgaccuguucuccgcccagccggggcuuaccagcgccgugcuggaagcucucccucgcaauaugguccugacaugucagggauccgaugacauccggaagcugcuugauucucaggacagaaaagauauuaagcucaucgacauuagccuguccaaagcggaugcccgcaaguuugagaacgacgugugggaucaauucaaagaccugugccacaugcauacgggcaucguuguggaaaagaagaaaaagggagggaaacaggagaugacaccccacugugcucuccuggauugcauuauguuugacgccgccgucucuggcgggcuuaacgugccuacccugcgggcugugcuccccaccgacaugguuuucagaacaaucaccacgaaggucgugcugugaggacuagucccuguucccagagcccacuuuuuuuucuuuuuuugaaauaaaauagccugucuuucagaucucaaaggcucuuuucagagccaccaaaaaaaaaaaaaaaaaaaaaaaaaaaaaaaaaaaaaaaaaaaaaaaaaaaaaaaaaaaaaaaaagaauu

SEQ ID NO: 18485 - RNA, 2033 nt, Artificial Sequence; identical to SEQ ID NO: 18479
  mRNA product Design a-2 (hSL-A64-N5) comprising derived and/or modified sequence from LASV(Pinneo-NIG-1969;Clade I)__AIT17837__SP-HsPLAT_NP(2-569) (opt5)

SEQ ID NO: 18486 - RNA, 2033 nt, Artificial Sequence
  mRNA product Design a-2 (hSL-A64-N5) comprising derived and/or modified sequence from LASV(ISTH0009-NIG-2011;Clade II)__AIT17405__SP-HsPLAT_NP(2-569) (opt5)
aggagaguccgcucagccagguugcagaagcggcuuagcguguguccuaaucuucucucugcguguagguaggccugugccgcaaacaagcuuaccauggacgccaugaagagaggccugugcugugugcuccugcuuugcggggcugucuucguuagccccagcguguccaaggaggucaaaucuuuccuguggacccagagccucagacgggaacuguccggcuacugcucuaacaucaaacuucaaguugugaaggacgcccaggcucugcuccacgggcuggauuuuagcgagguguccaauguccagcgccuuaugagaaagcagaaacgggacgauucugaccugaagcgccucagagaucugaaccaagccgugaauaaccugguugaacucaagagcacacagcagaaauccauucugcgggugggaacgcuuaccagcgacgaucugcucacacuggcggcugaccuugagaagcugaaaucuaaggucauccgcaccgaaagaccccucuccagcggcguguauauggggaaucugucuacacagcaacuggagcagcggcgcgcccuccugaacaugauuggaaugguuggcggggcccagggaacccagccuggcagagauggcgugguccgggugugggacgugaaaaauccggaucuucugaacaaucaauucgggacaaugcccucccucacccuggcuugucuuacgaagcagggacaggucgaccugaacgaugccguucucgcucugaccgaccugggccucaucuacacagccaaguauccuaauagcucugaccuggaucgccuuucccaaagccaucccauucugaacaugguggacaucaaaaaguccucucucaauaucagcggguacaacuuuucccugggagcggccgugaaagcuggcgccugcaugcuugaugggggaaauaugcuggagaccauuaaggucacaccucagaccauggacggcauccucaaaagcauucugaaggugaaaagaucucugggcauguucguuuccgauacgcccggggaacggaacccuuaugagaacauccucuacaagauuugucugagcggagacggcuggccguauaucgcuucucgcacaagcauuguggggagagccugggaaaauaccacagucgaucuugaguccgacggaaagccccagaaagugggcucugcggggagcaacaagucccugcagagcgccggauuuccuaccggccucaccuacucucaacugaugacacugaaagauuccaugaugcagcuugaccccagcgcuaagacguggaucgauaucgagggccggccugaagaccccguugagauugcccucuaccagccgaugucugggugcuauauccacuucuuuagagaaccuaccgaccugaaacaguucaagcaagaugcuaaguacucccauggaauugacguggccgaucuguuucccgcccagccuggccucacaagcgcugucaucgaggcgcugccccgcaauauggugcuuaccugucagggguccgacgauauuaaacggcugcucgacucucagggaagacgcgauaucaagcugaucgacauugcccugagcaaagcugauucccggagauucgaaaacgccgucugggaccaaugcaaggaucuuugucacaugcauacaggcgugguuguggagaaaaagaagcgcgggggcaaagaggaaaucacgccccacugcgcccucauggacuguauuauguaugaugcugccgucucuggaggccugaauaucccugugcugcgggcgguucucccgagagacaugguguuucgcaccagcucccccaaggucgugcugugaggacuagucccuguucccagagcccacuuuuuuuucuuuuuuugaaauaaaauagccugucuuucagaucucaaaggcucuuuucagagccaccaaaaaaaaaaaaaaaaaaaaaaaaaaaaaaaaaaaaaaaaaaaaaaaaaaaaaaaaaaaaaaaaagaauu

SEQ ID NO: 18487 - RNA, 2033 nt, Artificial Sequence
  mRNA product Design a-2 (hSL-A64-N5) comprising derived and/or modified sequence from LASV(ISTH2010-NIG-2012;Clade II)__AIT17483__SP-HsPLAT_NP(2-569) (opt5)
aggagaguccgcucagccagguugcagaagcggcuuagcguguguccuaaucuucucucugcguguagguaggccugugccgcaaacaagcuuaccauggacgccaugaagagaggccugugcugugugcuccugcuuugcggggcugucuucguuagccccagcgccuccaaggaggugaaaucuuuccuguggacccagagccucagacgggaacuguccggcuacugcucuaacaucaaacuucaagucguuaaggacgcucaggcccugcuccacgggcuggauuuuagcgagguguccaaugugcagcgccuuaugagaaagcagaaacgggacgauucugaccugaagcgccucagagaucugaaccaagcggucaauaaccugguggaacucaagagcacacagcagaaauccauucugcggguuggaacgcuuaccagcgacgaucugcucacacuggcugccgaccuugagaagcugaaaucuaaggugauccgcaccgaaagaccccucuccagcggcgucuauauggggaaucugucuacacagcaacuggagcagcggcgcgcccuccugaaccuuauuggaauggugggcggggcucagggaacccagccuggcagagauggcguugugcgggucugggacgugaaaaauccggaucugcucaacaaucaauucgggacaaugcccucccugacccuugccugucugacgaagcagggacagguggaccucaacgaugcuguccuggcccugaccgaccucggccugaucuacacagcgaaguauccuaauagcucugaccuugaucgccugucccaaagccaucccauucucaacaugguugacaccaaaaaguccucucugaauaucagcggguuuaacuucucccuuggagccgcugugaaagccggcgcuugcaugcuggaugggggaaauaugcucgagacaaucaaggugaccccucagacgauggacggcauucugaaaagcauccugaaggucaaaaagucucucggcauguuuguguccgauacacccggggaaagaaacccuuacgagaacauucuguauaagaucugucuuagcggagacggcuggccguacauugccucucggaccagcaucguugggcgcgcgugggaaaauacaaccguggaucuggaguccgacggaaaaccccacaaggucggcaccgccgggucuaacaaaagccuccaguccgcuggauucccuacaggccugacguauagccagcugaugacccuuaaggauucuaugaugcaacucgaccccuccgccaaaacauggauugauaucgagggcagaccugaagaccccguggagaucgcucuguaccagccgaugagcgggugcuacauucacuuuuuccgggaaccuaccgaccugaagcaguuuaagcaggaugccaaauauucucauggaaucgacguugccgaucucuuccccgcucaaccuggccugacauccgcggugauugaggcccuucccagaaauaugguccugaccugucaggggagcgacgauaucaagcgccuccuggacucccagggacggagagauauuaaacugaucgacaucgcucuuucuaaggccgauagccgccgguuugaaaacgccgugugggaccagugcaaagaucucugucauaugcacacgggcgucgugguugagaagaagaaaagagggggcaaggaggaaauuacaccccacugcgcucugauggacuguaucauguacgaugccgcgguguccggaggccugaauauuccuguccuccgcgcugugcugccgcgggacaugguuuucagaaccucuagccccaaagugguccuuugaggacuagucccuguucccagagcccacuuuuuuuucuuuuuuugaaauaaaauagccugucuuucagaucucaaaggcucuuuucagagccaccaaaaaaaaaaaaaaaaaaaaaaaaaaaaaaaaaaaaaaaaaaaaaaaaaaaaaaaaaaaaaaaaagaauu

SEQ ID NO: 18488 - RNA, 2033 nt, Artificial Sequence
  mRNA product Design a-2 (hSL-A64-N5) comprising derived and/or modified sequence from LASV(Lassa virus/H.sapiens-wt/NGA/2015/ISTH_0543;Clade II)__AVO03640__SP-HsPLAT_NP(2-569) (opt5)
aggagaguccgcucagccagguugcagaagcggcuuagcguguguccuaaucuucucucugcguguagguaggccugugccgcaaacaagcuuaccauggacgccaugaagagaggccugugcugugugcuccugcuuugcggggcugucuucguuagccccagcgccuccaaggaggugaaaucuuuccuguggacccagagccucagacgggaacuguccggcuacugcucuaacaucaaacuucaagucguuaaggacgcucaggcccugcuccacgggcuggauuuuagcgagguguccaaugugcagcgccuuaugagaaagcagaaacgggacgauucugaccugaagcgccucagagaucugaaccaagcggucaauaaccugguggaacucaagagcacacagcagaaauccauucugcggguuggaacgcuuaccagcgacgaucugcucacacuggcugccgaccuugagaagcugaaaucuaaggugauccgcaccgaaagaccccucuccagcggcgucuauauggggaaucugucuacacagcaacuggagcagcggcgcgcccuccugaacaugauuggaauggugggcggggcucagggaacccagccuggcagagauggcguugugcgggucugggacgugaaaaauccggaucuucugaacaaucaauucgggacaaugcccucccucacccuggccugucuuacgaagcagggacagguggaccugaacgaugcuguccucgcccugaccgaccugggccucaucuacacagcgaaguauccuaauagcucugaccuggaucgccuuucccaaagccaucccauucugaacaugguugacaccaaaaaguccucucucaauaucagcggguacaacuuuucccugggagccgcugugaaagccggcgcuugcaugcuugaugggggaaauaugcuggagacaaucaaggugaccccucagacgauggacggcauucucaaaagcauccugaaggucaaaaagucucugggcauguucguguccgauacacccggggaaagaaacccuuaugagaacauucucuacaagaucugucugagcggagacggcuggccguauauugccucucggaccagcaucguugggcgcgcgugggaaaauacaaccguggaucuugaguccgacggaaaaccccagaaggucggcucugccgggagcaacaaaucccugcagagcgcuggauuuccuaccggccucacauacucucaacugaugacgcugaaggauuccaugaugcagcuugaccccagcgccaaaaccuggauugauaucgagggcagaccugaagaccccguggagaucgcucucuaccagccgaugucugggugcuauauucacuucuuucgggaaccuacagaccugaagcaguucaagcaagaugccaaauacucccauggaaucgacguugccgaucuguuucccgcucagccuggccucaccagcgcggugauugaggcccugcccagaaauaugguccuuacaugucagggguccgacgauaucaagcgccugcucgacucucagggacggaaagauauuaagcugaucgacaucgcucugagcaaagccgauuccagacgcuucgaaaacgccgugugggaccaaugcaaggaucuuugucacaugcauaccggcgucgugguugagaagaaaaagagagggggcaaagaggaaauuacgccccacugcgcucucauggacuguaucauguaugaugccgcggugucuggaggccugaauauuccuguccugcgggcugugcucccgcgcgacaugguuuuucggacaagcucccccaaggugguccugugaggacuagucccuguucccagagcccacuuuuuuuucuuuuuuugaaauaaaauagccugucuuucagaucucaaaggcucuuuucagagccaccaaaaaaaaaaaaaaaaaaaaaaaaaaaaaaaaaaaaaaaaaaaaaaaaaaaaaaaaaaaaaaaaagaauu

SEQ ID NO: 18489 - RNA, 2033 nt, Artificial Sequence
  mRNA product Design a-2 (hSL-A64-N5) comprising derived and/or modified sequence from LASV(Lassa virus/H.sapiens-wt/NGA/2016/ISTH_0009;Clade II)__AVO03572__SP-HsPLAT_NP(2-569) (opt5)
aggagaguccgcucagccagguugcagaagcggcuuagcguguguccuaaucuucucucugcguguagguaggccugugccgcaaacaagcuuaccauggacgccaugaagagaggccugugcugugugcuccugcuuugcggggcugucuucguuagccccagcgccuccaaggaggugaaaucuuuccuguggacccagagccucagacgggaacuguccggcuacugcucuaacaucaaacuucaagucguuaaggacgcucaggcccugcuccacgggcuggauuuuagcgagguguccaaugugcagcgccuuaugagaaagcagaaacgggacgauucugaccugaagcgccucagagaucugaaccaagcggucaauaaccugguggaacucaagagcacacagcagaaauccauucugcggguuggaacgcuuaccagcgacgaucugcucacacuggcugccgaccuugagaagcugaaaucuaaggugauccgcaccgaaagaccccucuccagcggcgucuauauggggaaucugucuacacagcaacuggagcagcggcgcgcccuccugaacaugauuggaauggugggcggggcucagggaacccagccuggcagagauggcguugugcgggucugggacgugaaaaauccggaucuucugaacaaucaauucgggacaaugcccucccucacccuggccugucuuacgaagcagggacagguggaccugaacgaugcuguccucgcccugaccgaccugggccucaucuacacagcgaaguauccuaauagcucugaccuggaucgccuuucccaaagccaucccauucugaacaugguugacaccaaaaaguccucucucaauaucagcggguacaacuuuucccugggagccgcugugaaagccggcgcuugcaugcuugaugggggaaauaugcuggagacaaucaaggugaccccucagacgauggacggcauucucaaaagcauccugaaggucaaaaagucucugggcauguucguguccgauacacccggggaaagaaacccuuaugagaacauucucuacaagaucugucugagcggagacggcuggccguauauugccucucggaccagcaucguugggcgcgcgugggaaaauacaaccguggaucuugaguccgacggaaaaccccagaaggucggcucugccgggagcaacaaaucccugcagagcgcuggauuuccuaccggccucacauacucucaacugaugacgcugaaggauuccaugaugcagcuugaccccagcgccaaaaccuggauugauaucgagggcagaccugaagaccccguggagaucgcucucuaccagccgaugucugggugcuauauucacuucuuucgggaaccuacagaccugaagcaguucaagcaagaugccaaauacucccauggaaucgacguugccgaucuguuucccgcucagccuggccucaccagcgcggugauugaggcccugcccagaaauaugguccuuacaugucagggguccgacgauaucaagcgccugcucgacucucagggacggagagauauuaaacugaucgacaucgcucugagcaaggccgauucccgccgguucgaaaacgccgugugggaccaaugcaaagaucuuugucacaugcauaccggcgucgugguugagaagaagaaaagagggggcaaggaggaaauuacgccccacugcgcucucauggacuguaucauguaugaugccgcggugucuggaggccugaauauuccuguccugcgcgcugugcucccgcgggacaugguuuuuagaacaagcucccccaaagugguccugugaggacuagucccuguucccagagcccacuuuuuuuucuuuuuuugaaauaaaauagccugucuuucagaucucaaaggcucuuuucagagccaccaaaaaaaaaaaaaaaaaaaaaaaaaaaaaaaaaaaaaaaaaaaaaaaaaaaaaaaaaaaaaaaaagaauu

SEQ ID NO: 18490 - RNA, 2033 nt, Artificial Sequence
  mRNA product Design a-2 (hSL-A64-N5) comprising derived and/or modified sequence from LASV(Lassa virus/H.sapiens-wt/NGA/2016/ISTH_0017;Clade II)__AVO03568__SP-HsPLAT_NP(2-569) (opt5)
aggagaguccgcucagccagguugcagaagcggcuuagcguguguccuaaucuucucucugcguguagguaggccugugccgcaaacaagcuuaccauggacgccaugaagagaggccugugcugugugcuccugcuuugcggggcugucuucguuagccccagcgccuccaaggaggugaaaucuuuccuguggacccagagccucagacgggaacuguccggcuacugcucuagcaucaaacuucaagucguuaaggacgcucaggcccugcuccacgggcuggauuuuuccgaggugucuaacgugcagcgccuuaugagaaagcagaaacgggacgauagcgaccugaagcgccucagagaucugaaucaagcggucaacaaucugguggaacucaaguccacacagcagaaaagcauucugcggguuggaacgcuuaccucugacgaucugcucacacuggcugccgaccuugagaagcugaaauccaaggugauccgcaccgaaagaccccucagcucuggcgucuauauggggaaccuguccacacagcaacuggagcagcggcgcgcccuccugaauaugauuggaauggcuggcggggcccagggaacccagccuggcagagauggcgugguucgggugugggacgucaaaaacccggaucuucugaauaaccaauucgggacaaugcccagccucacccuggcuugucuuacgaagcagggacagguggaccugaaugaugccgugcucgcgcugaccgaccugggccucaucuacacagccaaguauccuaacucuuccgaccuggaucgccuuagccaaucccaucccauucugaauauggucgacaccaaaaagucuagccucaacaucuccggguacaauuuuagccugggagcugccguuaaagcuggcgccugcaugcuugaugggggaaacaugcuggagacaaucaaggugaccccucagacgauggacggcauucucaaaucuauccugaaggugaaaagaucccugggcauguucgucagcgaugcgcccggggaacggaauccuuaugagaacauucucuacaagaucugucugucuggagacggcuggccguauauugccagccgcacauccaucguggggagagcuugggaaaacaccacaguugaucuugagucugacggaaagccccagaaagugggcgccaccgggagcaauaagucccugcagagcgcuggauuuccuaccggccucacauacucucaacugaugacgcugaaagauuccaugaugcagcuugaccccagcgccaagaccuggauugauaucgagggccggccugaagaccccgucgagguggcccucuaccagccgguuucugggugcuauauccacuucuuuagagaaccuacagaccugaaacaguucaagcaagaugcuaaguacucccauggaauugacguggcggaucuguuucccgcccagccuggccucaccagcgcugucaucgaggcccugccccgcaacauggugcuuacaugucagggguccgacgauauuaaaaagcugcucgacucucagggacggaaagauaucaagcugauugacaucgcccugagcaaagcugauuccagacgcuucgaaaaugccgucugggaccaaugcaaggaucuuugucacaugcauaccggcgugguuguggagaagaaaaagagagggggcaaagaggaaaucacgccccacugcgcgcucauggacuguauuauguaugaugcugccgucucuggaggccugaacaucccugugcugcgggccguucucccgcgcgacaugguguuucggacaagcucccccaaggucgugcugugaggacuagucccuguucccagagcccacuuuuuuuucuuuuuuugaaauaaaauagccugucuuucagaucucaaaggcucuuuucagagccaccaaaaaaaaaaaaaaaaaaaaaaaaaaaaaaaaaaaaaaaaaaaaaaaaaaaaaaaaaaaaaaaaagaauu

SEQ ID NO: 18491 - RNA, 2033 nt, Artificial Sequence
  mRNA product Design a-2 (hSL-A64-N5) comprising derived and/or modified sequence from LASV(Lassa virus/H.sapiens-wt/NGA/2018/ISTH_0959;Clade II)__AVV65100__SP-HsPLAT_NP(2-569) (opt5)
aggagaguccgcucagccagguugcagaagcggcuuagcguguguccuaaucuucucucugcguguagguaggccugugccgcaaacaagcuuaccauggacgccaugaagagaggccugugcugugugcuccugcuuugcggggcugucuucguuagccccagcgccuccaaggaggugaaaucuuuccuguggacccagagccucagacgggaacuguccggcuacugcucuaacaucaaacuucaagucguuaaggacgcucaggcccugcuccacgggcuggauuuuagcgagguguccaaugugcagcgccuuaugagaaagcagaaacgggacgauucugaccugaagcgccucagagaucugaaccaagcggucaauaaccugguggaacucaagagcacccagcagaaauccauucugcggguuggaacgcuuaccagcgacgaucugcucacacuggcugccgaccuugagaagcugaaaucuaaggugauccgcaccgaaagaccccucuccagcggcgucuauauggggaaucugucuacacagcaacuggagcagcggcgcgcccuccugaaccuuauuggaauggugggcggggcucagggaacccagccuggcagagauggcguugugcgggucugggacgugaaaaauccggaucugcucaacaaucaauucgggacaaugcccucccugacccuugccugucugacgaagcagggacagguggaccucaacgaugucguucuggcucugaccgaccucggccugaucuacacagccaaguauccuaauagcucugaccuugaucgccugucccaaagccaucccauucucaacaugguggacaccaaaaaguccucucugaauaucagcggguuuaacuucucccuuggagcggccgugaaagcuggcgccugcaugcuggaugggggaaauaugcucgagacaaucaaggucaccccucagacgauggacggcauucugaaaagcauccugaaggugaaaaagucucucggcauguuuguuuccgauacacccggggaaagaaacccuuacgagaacauucuguauaagaucugucuuagcggagacggcuggccguacauugcuucucggaccagcaucguggggcgcgccugggaaaauacaaccgucgaucuggaguccgacggaaaaccccacaaggugggcaccgcggggucuaacaaaagccuccaguccgccggauucccuacaggccugacguauagccagcugaugacccuuaaggauucuaugaugcaacucgaccccuccgcuaaaacauggauugauaucgagggcagaccugaagaccccguugagaucgcccuguaccagccgaugagcgggugcuacauucacuuuuuccgggaaccuaccgaccugaagcaguuuaagcaggaugcuaaauauucucauggaaucgacguggccgaucucuuccccgcccaaccuggccugacauccgcugucauugaggcgcuucccagaaauauggugcugaccugucaggggagcgacgauaucaagcgccuccuggacucccagggacggaaagauauuaagcugaucgacaucgcccuuucuaaaacggauagcagacgcuuugaaaacgcugucugggaccagugcaaggaucucugucauaugcacacaggcgugguuguggagaagaaaaagagagggggcaaagaggaaauuacaccccacugcgcccugauggacuguaucauguacgaugccgcugucuccggaggccugaauauuccugugcuccgggccguucugccgcgcgacaugguguuccggaccucuagccccaaggucgugcuuugaggacuagucccuguucccagagcccacuuuuuuuucuuuuuuugaaauaaaauagccugucuuucagaucucaaaggcucuuuucagagccaccaaaaaaaaaaaaaaaaaaaaaaaaaaaaaaaaaaaaaaaaaaaaaaaaaaaaaaaaaaaaaaaaagaauu

SEQ ID NO: 18492 - RNA, 2033 nt, Artificial Sequence
  mRNA product Design a-2 (hSL-A64-N5) comprising derived and/or modified sequence from LASV(LASV003-NIG-2008;Clade II)__AIT17581__SP-HsPLAT_NP(2-569) (opt5)
aggagaguccgcucagccagguugcagaagcggcuuagcguguguccuaaucuucucucugcguguagguaggccugugccgcaaacaagcuuaccauggacgccaugaagagaggccugugcugugugcuccugcuuugcggggcugucuucguuagccccagcgccuccaaggaggugaaaucuuuccuguggacccagagccucagacgggaacuguccggcuacugcucuagcaucaaacuucaagucguuaaggacgcucaggcccugcuccacgggcuggauuuuuccgaggugucuaacgugcagcgccuuaugagaaagcagaaacgggacgauagcgaccugaagcgccucagagaucugaaucaagcggucaacaaucugguggaacucaaguccacccagcagaaaagcguucugcgggugggaacgcuuaccucugacgaucugcucacacuggcugccgaccuugagaagcugaaauccaaggucauucgcaccgaaagaccccucagcucuggcguguauauggggaaccuguccgcccagcaacuggagcagcggcgcacacuccugaauaugaucggaaugguuggcggggcucagggaacccagccuggcagagauggcgugguccgggugugggacgugaaaaacccggaucuucugaauaaccaauucgggacaaugcccagccucacccuggccugucuuacgaagcagggacaggucgaccugaaugauguugugcucgcucugaccgaccugggccucauuuacacagccaaguauccuaacucuuccgaccuggaucgccuuagccaaucccaucccauccugucuaugguggacaccaaaaagagcucccucaauauuagcggguacaacuuuucucugggagcggccgucaaagcuggcgccugcaugcuugaugggggaaauaugcuggagacaaucaaggugaccccucagacgauggacggcauccucaaauccauucugaagguuaaaaagagccugggcauguucgugucugauacacccggggaaagaaacccuuaugagaauauccucuacaagauuugucugagcggagacggcuggccguauaucgcuucccggaccucuauugucgggcgcgccugggaaaacacaaccguggaucuugagagcgacggaaaaccccagaagguuggcaccgcgggguccaacaaaagccugcagucugccggauuuccuacaggccucacguacucccaacugaugacccugaaggauagcaugaugcagcuugaccccucugcuaaaacauggaucgauauugagggcagaccugaagaccccguggagaucgcccucuaccagccgauguccgggugcuauauccacuucuuucgggaaccuaccgaccugaagcaguucaagcaagaugcuaaauacagccauggaauugacgucacagaucuguuucccgcccagccuggccucaccuccgccgugaucgaggcucugcccagaaauaugguccuuacgugucaggggucugacgauauuaagcgccugcucgacagccagggacggagagauaucaaacugauugacaucgcgcuguccaaggccgauucucgccgguucgaaaacgcugugugggaccaaugcaaagaucuuugucacaugcauacaggcguuguggucgagaagaagaaaagagggggcaaggaggaaaucacaccccacugcgcccucauggacuguauuauguaugaugccgcugugagcggaggccugaauaucccuguucugcgcgccgugcucccgcgggacauggucuuuagaaccuccagccccaaaguggugcugugaggacuagucccuguucccagagcccacuuuuuuuucuuuuuuugaaauaaaauagccugucuuucagaucucaaaggcucuuuucagagccaccaaaaaaaaaaaaaaaaaaaaaaaaaaaaaaaaaaaaaaaaaaaaaaaaaaaaaaaaaaaaaaaaagaauu

SEQ ID NO: 18493 - RNA, 2033 nt, Artificial Sequence
  mRNA product Design a-2 (hSL-A64-N5) comprising derived and/or modified sequence from LASV(LASV035-NIG-2009;Clade II)__AIT17589__SP-HsPLAT_NP(2-569) (opt5)
aggagaguccgcucagccagguugcagaagcggcuuagcguguguccuaaucuucucucugcguguagguaggccugugccgcaaacaagcuuaccauggacgccaugaagagaggccugugcugugugcuccugcuuugcggggcugucuucguuagccccagcgccuccaaggaggugaaaucuuuccuguggacccagagccucagacgggaacuguccggcuacugcucuagcaucaaacuucaagucguuaaagacgcucaggcccugcuccacgggcuggauuuuuccgaggugucuaacgugcagcgccuuaugagaaagcagaaacgggacgauagcgaccugaagcgccucagagaucugaaucaagcggucaacaaucugguggaacucaaguccacacagcagaaaagcauucugcggguuggaacgcuuaccucugacgaucugcucacacuggcugccgaccuugagaagcugaaauccaaggugauccgcaccgaaagaccccucagcucuggcgucuauauggggaaccuguccgcccagcaacuggagcagcggcgcgcucuccugaauaugauuggaauggugggcggggcccagggaacacagccuggcagagauggcguugugcgggucugggacgugaaaaacccggaucuucugaauaaccaauucgggaccaugcccagccucacacuggcuugucuuaccaagcagggacagguggaccugaaugaugccguccucgcgcugacggaccugggccucaucuacaccgccaaguauccuaacucuuccgaccuggaucgccuuagccaaucccaucccauucugaauaugguugacacaaagaagucuagccucaacaucuccggguacaauuuuagccugggagcugccgugaaagcuggcgccugcaugcuugaugggggaaacaugcuggagaccaucaaggugacaccucagaccauggacggcauucucaaaucuauccugaaggucaaaagaucccugggcauguucgugagcgauacgcccggggaacggaauccuuaugagaacauucucuacaagaucugucugucuggagacggcuggccguauauugcgagccgcacauccaucguugggagagccugggaaaacaccacaguggaucuugagucugacggaaagccccagaaagucggcaccaccgggagcaauaagucccugcagagcgcuggauuuccuacaggccucacguacucucaacugaugacccugaaagauuccaugaugcagcuugaccccagcgccaagacauggauugauaucgagggccggccugaagaccccguggagaucgcucucuaccagccgaugucugggugcuauauucacuucuuuagagaaccuaccgaccugaaacaguucaagcaagaugccaaguacucccauggaaucgacguugccgaucuguuucccgcucagccuggccucacaagcgcggugauugaggcccugccccgcaacaugguccuuaccugucagggguccgacgauaucaaaaagcugcucgacucucagggacggagagauauuaaacugaucgacaucgcucugagcaaggccgauucccgcaaauucgaaaaugccgugugggaccaaugcaaggaucuuugucacaugcauacgggcgucgugguugagaagaaaaagagagggggcaaagaggaaauuacaccccacugcgcucucauggacuguaucauguaugaugccgcggugucuggaggccugaacauuccuguccugcgggcugugcucccgcgcgacaugguuuuucggaccagcucccccaaggugguccugugaggacuagucccuguucccagagcccacuuuuuuuucuuuuuuugaaauaaaauagccugucuuucagaucucaaaggcucuuuucagagccaccaaaaaaaaaaaaaaaaaaaaaaaaaaaaaaaaaaaaaaaaaaaaaaaaaaaaaaaaaaaaaaaaagaauu

SEQ ID NO: 18494 - RNA, 2033 nt, Artificial Sequence
  mRNA product Design a-2 (hSL-A64-N5) comprising derived and/or modified sequence from LASV(LASV1000-NIG-2009;Clade II)__AIT17783__SP-HsPLAT_NP(2-569) (opt5)
aggagaguccgcucagccagguugcagaagcggcuuagcguguguccuaaucuucucucugcguguagguaggccugugccgcaaacaagcuuaccauggacgccaugaagagaggccugugcugugugcuccugcuuugcggggcugucuucguuagccccagcgccuccaaggaggugaaaucuuuccuguggacccagagccucagacgggaacuguccggcuacugcucuaacaucaaacuucaagucguuaaggacgcucaggcccugcuccacgggcuggauuuuagcgagguguccaaugugcagcgccuuaugagaaagcagaaacgggacgauucugaccugaagcgccucagagaucugaaccaagcggucaauaaccugguggaacucaagagcacacagcagaaauccauucugcggguuggaacgcuuaccagcgacgaucugcucacacuggcugccgaccuugagaagcugaaaucuaaggugauccgcaccgaaagaccccucuccagcggcgucuauauggggaaucugucuacacagcaacuggagcagcggcgcgcccuccugaacaugauuggaauggugggcggggcucagggaacccagccuggcagagauggcguugugcgggucugggacgugaaaaauccggaucuucugaacaaucaauucgggacaaugcccucccucacccuggccugucuuacgaagcagggacagguggaccugaacgaugucguucucgcucugaccgaccugggccucaucuacacagccaaguauccuaauagcucugaccuggaucgccuuucccaaagccaucccauucugaacaugguggacaccaaaaaguccucucucaauaucagcggguacaacuuuucccugggagcggccgugaaagcuggcgccugcaugcuugaugggggaaauaugcuggagacaaucaaggucaccccucagacgauggacggcauucucaaaagcauccugaaggugaaaaagucucugggcauguucguuuccgauacacccggggaaagaaacccuuaugagaacauucucuacaagaucugucugagcggagacggcuggccguauauugcuucucggaccagcaucguggggcgcgccugggaaaauacaaccgucgaucuugaguccgacggaaaaccccagaaggugggcaccgcggggucuaacaaaagccugcaguccgccggauuuccuacaggccucacguacagccaacugaugacccugaaggauucuaugaugcagcuugaccccuccgcuaaaacauggauugauaucgagggcagaccugaagaccccguugagaucgcccucuaccagccggugagcgggugcuauauucacuucuuucgggaaccuaccgaccugaagcaguucaagcaagaugcuaaauacucucauggaaucgacgucgccgaucuguuucccgcccagccuggccucacauccgcugugauugaggcgcugcccagaaauaugguccuuaccugucaggggagcgacgauaucaagcgccugcucgacucccagggacggagagauauuaaacugaucgacaucgcccugucuaaggcugauagccgccgguucgaaaacgccgugugggaccaaugcaaagaucuuugucacaugcauacgggcguuguggucgagaagaagaaaagagggggcaaggaggaaauuacaccccacugcgcccucauggacuguaucauguaugaugcugccguguccggaggccugaauauuccuguucugcgcgcggugcucccgcgggacauggucuuuagaaccucuagccccaaaguggugcugugaggacuagucccuguucccagagcccacuuuuuuuucuuuuuuugaaauaaaauagccugucuuucagaucucaaaggcucuuuucagagccaccaaaaaaaaaaaaaaaaaaaaaaaaaaaaaaaaaaaaaaaaaaaaaaaaaaaaaaaaaaaaaaaaagaauu

SEQ ID NO: 18495 - RNA, 2033 nt, Artificial Sequence
  mRNA product Design a-2 (hSL-A64-N5) comprising derived and/or modified sequence from LASV(LASV221-NIG-2010;Clade II)__AIT17625__SP-HsPLAT_NP(2-569) (opt5)
aggagaguccgcucagccagguugcagaagcggcuuagcguguguccuaaucuucucucugcguguagguaggccugugccgcaaacaagcuuaccauggacgccaugaagagaggccugugcugugugcuccugcuuugcggggcugucuucguuagccccagcgccuccaaggaggugaaaucuuuccuguggacccagagccucagacgggaacuguccggcuacugcucuagcaucaaacuucaagucguuaaggacgcucaggcccugcuccacgggcuggauuuuuccgaggugucuaacgugcagcgccuuaugagaaagcagcggcgcgacgauagcgaccugaaaagacuccgggaucugaaucaagcggucaacaaucugguggaacucaaguccacacagcaaaagagcauucugcgcguuggaacgcuuaccucugacgaucugcucacacuggcugccgaccuugagaaacugaaguccaaagugaucagaaccgaacggccccucagcucuggcgucuauauggggaaccuguccacacagcagcuggagcagcgcagagcccuccugaauaugauuggaauggugggcggggcucagggaacccagccuggccgggauggcguugugcgcgucugggacgugaagaacccggaucuucugaauaaccaauucgggacaaugcccagccucacccuggccugucuuacgaaacagggacagguggaccugaaugaugcuguccucgcccugaccgaccugggccucaucuacacagcgaaguauccuaacucuuccgaccuggauagacuuagccaaucccaucccauucugaauaugguugacaccaagaaaucuagccucaacaucuccggguacaauuuuagccugggagccgcugugaaggccggcgcuugcaugcuugaugggggaaacaugcuggagacaaucaaagugaccccucagacggucgacggcauucucaagucuauccugaaagugaagcggucccugggcauguucguuagcgauacacccggggaacgcaauccuuaugagaacauucucuacaaaaucugucugucuggagacggcuggccguauauugccagcagaaccuccaucguggggcgggcgugggaaaacacaaccgucgaucuugagucugacggaaagccccagaaggugggcaccgccgggagcaauaaaucccugcagagcgcuggauuuccuacaggccucacguacucucaacugaugacccugaaggauuccaugaugcagcuugaccccagcgccaaaacauggauugauaucgagggcagaccugaagaccccguugagaucgcucucuaccagccgaugucugggugcuauauucacuucuuucgcgaaccuaccgaccugaagcaguucaaacaagaugccaaguacucccauggaaucgacguggccgaucuguuucccgcucagccuggccucacaagcgcggucauugaggcccugccccggaacauggugcuuaccugucagggguccgacgauaucaagagacugcucgacucucagggacgccgggauauuaaacugaucgacaucgcucugagcaaggccgauuccagaaaauucgaaaaugccgucugggaccaaugcaaggaucuuugucacaugcauacgggcgugguuguggagaaaaagaagcgcgggggcaaagaggaaauuacaccccacugcgcucucauggacuguaucauguaugaugccgcggucucuggaggccugaacauuccugugcugcgggcuguucucccgagagacaugguguuucgcaccagcucccccaaggucgugcugugaggacuagucccuguucccagagcccacuuuuuuuucuuuuuuugaaauaaaauagccugucuuucagaucucaaaggcucuuuucagagccaccaaaaaaaaaaaaaaaaaaaaaaaaaaaaaaaaaaaaaaaaaaaaaaaaaaaaaaaaaaaaaaaaagaauu

SEQ ID NO: 18496 - RNA, 2033 nt, Artificial Sequence
  mRNA product Design a-2 (hSL-A64-N5) comprising derived and/or modified sequence from LASV(LASV237-NIG-2010;Clade II)__AIT17639__SP-HsPLAT_NP(2-569) (opt5)
aggagaguccgcucagccagguugcagaagcggcuuagcguguguccuaaucuucucucugcguguagguaggccugugccgcaaacaagcuuaccauggacgccaugaagagaggccugugcugugugcuccugcuuugcggggcugucuucguuagccccagcgccuccaaggaggugaaaucuuuccuguggacccagagccucagacgggaacuguccggcuacugcucuaacaucaaacuucaagucguuaaggacgcucaggcccugcuccacgggcuggauuuuagcgagguguccaaugugcagcgccuuaugagaaagcagaaacgggacgauucugaccugaagcgccucagagaucugaaccaagcggucaauaaccugguggaacucaagagcacacagcagaaauccauucugcggguuggaacgcuuaccagcgacgaucugcucacacuggcugccgaccuugagaagcugaaaucuaaggugauccgcaccgaaagaccccucuccagcggcgucuauauggggaaucugucuacacagcaacuggagcagcggcgcgcccuccugaacaugauuggaauggugggcggggcucagggaacccagccuggcagagauggcguugugcgggucugggacgugaaaaauccggaucuucugaacaaucaauucgggacaaugcccucccucacccuggccugucuuacgaagcagggacagguggaccugaacgaugcuguccucgcccugaccgaccugggccucaucuacacagcgaaguauccuaauagcucugaccuggaucgccuuucccaaagccaucccauucugaacaugguugacaucaaaaaguccucucucaauaucagcggguacaacuuuucccugggagccgcugugaaagccggcgcuugcaugcuugaugggggaaauaugcuggagaccauuaaggugacaccucagaccauggacggcauccucaaaagcauucugaaggucaaaagaucucugggcauguucguguccgauacgcccggggaacggaacccuuaugagaacauccucuacaagauuugucugagcggagacggcuggccguauaucgccucucgcacaagcauuguugggagagcgugggaaaauaccacaguggaucuugaguccgacggaaagccccagaaagucggcucugccgggagcaacaagucccugcagagcgcuggauuuccuaccggccucaccuacucucaacugaugacacugaaagauuccaugaugcagcuugaccccagcgccaagacguggaucgauaucgagggccggccugaagaccccguggagauugcucucuaccagccgaugucugggugcuauauccacuucuuuagagaaccuaccgaccugaaacaguucaagcaagaugccaaguacucccauggaauugacguugccgaucuguuucccgcucagccuggccucacaagcgcggugaucgaggcccugccccgcaauaugguccuuaccugucagggguccgacgauauuaaacggcugcucgacucucagggaagacgcgauaucaagcugaucgacauugcucugagcaaagccgauucccggagauucgaaaacgccgugugggaccaaugcaaggaucuuugucacaugcauacaggcgucgugguugagaaaaagaagcgcgggggcaaagaggaaaucacgccccacugcgcucucauggacuguauuauguaugaugccgcggugucuggaggccugaauaucccuguccugcgggcugugcucccgagagacaugguuuuucgcaccagcucccccaaggugguccugugaggacuagucccuguucccagagcccacuuuuuuuucuuuuuuugaaauaaaauagccugucuuucagaucucaaaggcucuuuucagagccaccaaaaaaaaaaaaaaaaaaaaaaaaaaaaaaaaaaaaaaaaaaaaaaaaaaaaaaaaaaaaaaaaagaauu

SEQ ID NO: 18497 - RNA, 2033 nt, Artificial Sequence
  mRNA product Design a-2 (hSL-A64-N5) comprising derived and/or modified sequence from LASV(LASV253-NIG-2011;Clade II)__AIT17671__SP-HsPLAT_NP(2-569) (opt5)
aggagaguccgcucagccagguugcagaagcggcuuagcguguguccuaaucuucucucugcguguagguaggccugugccgcaaacaagcuuaccauggacgccaugaagagaggccugugcugugugcuccugcuuugcggggcugucuucguuagccccagcgccuccaaggaggugaaaucuuuccuguggacccagagccucagacgggaacuguccggcuacugcucuagcaucaaacuucaagucguuaaggacgcucaggcccugcuccacgggcuggauuuuuccgaggugucuaacgugcagcgccuuaugagaaagcagaaacgggacgauagcgaccugaagcgccucagagaucugaaucaagcggucaacaaucugguggaacucaaguccacccagcagaaaagcguucugcgggugggaacgcuuaccucugacgaucugcucacacuggcugccgaccuugagaagcugaaauccaaggucauucgcaccgaaagaccccucagcucuggcguguauauggggaaccuguccacacagcaacuggagcagcggcgcgcccuccugaauaugaucggaaugguuggcggggcucagggaacccagccuggcagagauggcgugguccgggugugggacgugaaaaacccggaucuucugaauaaccaauucgggacaaugcccagccucacccuggccugucuuacgaagcagggacaggucgaccugaaugauguugugcucgcucugaccgaccugggccucauuuacacagccaaguauccuaacucuuccgaccuggaucgccuuagccaaucccaucccauccugaauaugguggacaccaaaaagucuagccucaacauuuccggguacaauuuuagccugggagcggccgucaaagcuggcgccugcaugcuugaugggggaaacaugcuggagacaaucaaggugaccccucagacgauggacggcauccucaaaucuauucugaagguuaaaaagucccugggcauguucgugagcgauacacccggggaaagaaauccuuaugagaacauccucuacaagauuugucugucuggagacggcuggccguauaucgcuagccggaccuccauugucgggcgcgccugggaaaacacaaccguggaucuugagucugacggaaaaccccagaagguuggcaccgcggggagcaauaaaucccugcagagcgccggauuuccuacaggccucacguacucucaacugaugacccugaaggauuccaugaugcagcuugaccccagcgcuaaaacauggaucgauauugagggcagaccugaagaccccguggagaucgcccucuaccagccgaugucugggugcuauauccacuucuuucgggaaccuaccgaccugaagcaguucaagcaagaugcuaaauacucccauggaauugacgucacagaucuguuucccgcccagccuggccucaccagcgccgugaucgaggcucugcccagaaacaugguccuuacgugucagggguccgacgauauuaagcgccugcucgacucucagggacggagagauaucaaacugauugacaucgcgcugagcaaggccgauucccgccgguucgaaaaugcugugugggaccaaugcaaagaucuuugucacaugcauacaggcguuguggucgagaagaagaaaagagggggcaaggaggaaaucacaccccacugcgcccucauggacuguauuauguaugaugccgcugugucuggaggccugaacaucccuguucugcgcgccgugcucccgcgggacauggucuuuagaaccagcucccccaaaguggugcugugaggacuagucccuguucccagagcccacuuuuuuuucuuuuuuugaaauaaaauagccugucuuucagaucucaaaggcucuuuucagagccaccaaaaaaaaaaaaaaaaaaaaaaaaaaaaaaaaaaaaaaaaaaaaaaaaaaaaaaaaaaaaaaaaagaauu

SEQ ID NO: 18498 - RNA, 2033 nt, Artificial Sequence
  mRNA product Design a-2 (hSL-A64-N5) comprising derived and/or modified sequence from LASV(LASV254-NIG-2011;Clade II)__AIT17675__SP-HsPLAT_NP(2-569) (opt5)
aggagaguccgcucagccagguugcagaagcggcuuagcguguguccuaaucuucucucugcguguagguaggccugugccgcaaacaagcuuaccauggacgccaugaagagaggccugugcugugugcuccugcuuugcggggcugucuucguuagccccagcgccuccaaggaggugaaaucuuuccuguggacccagagccucagacgggaacuguccggcuacugcucuagcaucaaacuucaagucguuaaggacgcucaggcccugcuccacgggcuggauuuuuccgaggugucuaacgugcagcgccuuaugagaaagcagaaacgggacgauagcgaccugaagcgccucagagaucugaaucaagcggucaacaaucugguggaacucaaguccacacagcagaaaagcguucugcgggugggaacgcuuaccucugacgaucugcucacacuggcugccgaccuugagaagcugaaauccaaggucauucgcaccgaaagaccccucagcucuggcguguauauggggaaccuguccacacagcaacuggagcagcggcgcgcccuccugaauaugaucggaaugguuggcggggcucagggaacccagccuggcagagauggcgugguccgggugugggacgugaaaaacccggaucuucugaauaaccaauucgggacaaugcccagccucacccuggccugucuuacgaagcagggacaggucgaccugaaugaugcuguucucgcccugaccgaccugggccucauuuacacagcgaaguauccuaacucuuccgaccuggaucgccuuagccaaucccaucccauccugaauaugguggacaccaaaaagucuagccucaacauuuccggguacaauuuuagccugggagccgcugugaaagccggcgcuugcaugcuugaugggggaaacaugcuggagacaaucaaggucaccccucagacgauggacggcauccucaaaucuauucugaaggugaaaaagucccugggcauguucguuagcgauacacccggggaaagaaauccuuaugagaacauccucuacaagauuugucugucuggagacggcuggccguauaucgccagccggaccuccauuguggggcgcgcgugggaaaacacaaucgucgaucuugagucugacggaaaaccccagaaggugggcaccgccgggagcaauaaaucccugcagagcgcuggauuuccuaccggccucacauacucucaacugaugacgcugaaggauuccaugaugcagcuugaccccagcgccaaaaccuggauugauaucgagggcagaccugaagaccccguugagaucgcucucuaccagccgaugucugggugcuauauucacuucuuucgggaaccuacagaccugaagcaguucaagcaagaugccaaauacucccauggaaucgacguggccgaucuguuucccgcucagccuggccucaccagcgcggucauugaggcccugcccagaaacauggugcuuacaugucagggguccgacgauaucaagcgccugcucgacucucagggacggagagauauuaaacugaucgacaucgcucugagcaaggccgauucccgccgguucgaaaaugccgucugggaccaaugcaaagaucuuugucacaugcauaccggcgugguuguggagaagaagaaaagagggggcaaggaggaaauuacgccccacugcgcucucauggacuguaucauguaugaugccgcggucucuggaggccugaacauuccugugcugcgcgcuguucucccgcgggacaugguguuuagaacaagcucccccaaagucgugcugugaggacuagucccuguucccagagcccacuuuuuuuucuuuuuuugaaauaaaauagccugucuuucagaucucaaaggcucuuuucagagccaccaaaaaaaaaaaaaaaaaaaaaaaaaaaaaaaaaaaaaaaaaaaaaaaaaaaaaaaaaaaaaaaaagaauu

SEQ ID NO: 18499 - RNA, 2033 nt, Artificial Sequence
  mRNA product Design a-2 (hSL-A64-N5) comprising derived and/or modified sequence from LASV(Nig08-04;Clade II)__ADU56611__SP-HsPLAT_NP(2-569) (opt5)
aggagaguccgcucagccagguugcagaagcggcuuagcguguguccuaaucuucucucugcguguagguaggccugugccgcaaacaagcuuaccauggacgccaugaagagaggccugugcugugugcuccugcuuugcggggcugucuucguuagccccagcgccuccaaggaggugaaaucuuuccuguggacccagagccucagacgggaacuguccggcuacugcucuaacaucaaacuucaagucguuaaggacgcucaggcccugcuccacgggcuggauuuuagcgagguguccaaugugcagcgccuuaugagaaagcagaaacgggacgauggagaccugaagcgccucagagaucugaaccaagcggucaauaaccugguggaacucaagucuacccagcagaaaagcguucugcgggugggcacgcuuaccuccgacgaucugcucacacuggcugccgaccuugagaagcugaaaagcaaggucauucgcaccgaaagaccccucucuuccgggguguauaugggaaaucugagcacacagcaacuggagcagcggaaagcccuccugucuaugaucggcaugguugggggagcucagggcacccagccuggccgcgaugggguggucagagugugggacgugaagaacccggaucuucugaauaaccaauucggaacaaugcccucccucacccuggccugucuuacgaagcagggccaggucgaccugaaugaugcuguucucgcccugaccgaccuggggcucauuuacacagcgaaauauccuaacagcucugaccuggaucggcuuucccaaagccaucccauccugaauaugguggacaccaagaaauccucucucaacauuagcggauacaauuuuucccugggcgccgcugugaaggccggggcuugcaugcuugauggaggcaacaugcuggagacaaucaaagucaccccucagacgauggacggcauccucaagagcauucugaaagugaagcgcucucuggggauguucguuuccgauacacccggagaaagaaauccuuaugagaacauccucuacaagauuugucugagcggcgacggguggccguauaucgccucucggaccagcauugugggacgcgcgugggaaaacacaaccgucgaucuugaguccgacggcaaaccccagaagguggggaccgccggaucuaauaaaagccugcaguccgcuggcuuuccuacaggccucacguacagccaacugaugacccugaaggauucuaugaugcagcuugaccccuccgccaaaacauggaucgauauugaggggagaccugaagaccccguugagaucgcucucuaccagccgaugagcggaugcuauauccacuucuuucgggaaccuaccgaccugaagcaguucaagcaagaugccaaauacucucauggcauugacgugacagaucuguuuuccgcccagcccgggcucaccagcgcugucaucgaggcgcugccuagaaacauggugcuuacgugucagggauccgacgauauuaagaaacugcucgacucucagggccgccgggauaucaagcugauugacaucagccugaauaaagccgauuccagacgcuucgaaaacgcugucugggaccaaugcaaggaucuuugucacaugcauacaggggugguuguggagaagaaaaagcggggcggaaaagaggaaaucacaccccacugcgcccucauggacuguauuauguuugaugccgcugucucuggcgggcugaauauccccauucugagagccgugcucccucgcgacaugguuuuccggaccagcuccccgaaggugguccugugaggacuagucccuguucccagagcccacuuuuuuuucuuuuuuugaaauaaaauagccugucuuucagaucucaaaggcucuuuucagagccaccaaaaaaaaaaaaaaaaaaaaaaaaaaaaaaaaaaaaaaaaaaaaaaaaaaaaaaaaaaaaaaaaagaauu

SEQ ID NO: 18500 - RNA, 2036 nt, Artificial Sequence
  mRNA product Design a-2 (hSL-A64-N5) comprising derived and/or modified sequence from LASV(GA391;Clade III)__AAA46284__SP-HsPLAT_NP(2-570) (opt5)
aggagaguccgcucagccagguugcagaagcggcuuagcguguguccuaaucuucucucugcguguagguaggccugugccgcaaacaagcuuaccauggacgccaugaagagaggccugugcugugugcuccugcuuugcggggcugucuucguuagccccagcgccuccaaggaggugagaucuugccuguggacccagagccuccggcgcgaacuguccggcuacuguucuaacaucaaacuucaagucguuaaggacgcucaggcccugcuccacgggcuggauuucagcgagguguccaaugugcagagacuuaugcggaaacagaagcgcgacgauggagaccugaaaagacuccgggaucugaaccaagcggucaauaaccugguggaacucaagucuacacagcagaaaagcguucugcgcgugggcacgcuuuccagcgacgaucugcucauucuggcugccgaccuugagaaacugaagucuaaagucaccagaacagaacggccccucuccagcgggguguauaugggaaaucugucuucccagcaacuggaucagcgcagagcccuccugaacaugaucggcaugaccgggguuagcggaggcggcaagggggcuucuaauggaauugugcgggucugggacgugaaaaacgccgagcuucugaauaaccaguuuggcacaaugccuucccucacccuggcuugccuuacaaagcaggggcaaguggaucugaaugacgccguccaggcgcucaccgaucugggacugaucuacacggccaaguauccgaacagcuccgaccucgaccgccugucucagagccaucccauucuuaauaugaucgauaccaaaaaguccagccugaacaucucuggcuacaauuucucccucggggcugccguuaaagcuggagccuguaugcuggacggcggcaacaugcuugagacaauuaaggugagcccucaaaccauggaugggauccugaaaucuauucucaaggugaaaaagagccugggaauguuugucuccgacacacccggcgaaagaaacccuuaugagaauauccuguacaagauuugccucucuggggauggauggagcuauaucgcgucccggaccagcauugugggccgcgccugggaaaacacgguuguggaccuggagcaggauaauaaaccccagaagaucgggaacggaggcucuaauaaaucccuucagagcgcuggcuucgccgcugggcugaucuacucucaacucaugacacugaaggacuuuaaauguuucaaccugauuccuaaugccaagaccuggauggauaucgagggaagaccggaagaccccgucgagauugcccuuuaccagccuuccagcggcugcuaugugcacuuuuuccgggaacccacagaucucaagcaguuuaaacaggacgcuaaguacucccaugggagagacguuaccgaucuguucgcggcccaaccuggacugaccucugcugugaucgaggcccucccccgcaacauggucauuacaugucagggcagcgaagacauccggaaacugcuugagucccaggggagacgcgauaucaagcugauugacaucacgcucucuaaagccgauagccggaaguuugagaaugcugugugggaccaguucaaggaucugugccacaugcauaccggcgucgugguugaaaagaagaaaagaggaggcaaggaggaaauuacaccgcacugugcccugauggacugcaucauguuugaugcggcuguguccgggggacuugacgccaaaguccuccgcgugguucugccucgggauaugguguucagaaccagcacacccaaggucgugcugugaggacuagucccuguucccagagcccacuuuuuuuucuuuuuuugaaauaaaauagccugucuuucagaucucaaaggcucuuuucagagccaccaaaaaaaaaaaaaaaaaaaaaaaaaaaaaaaaaaaaaaaaaaaaaaaaaaaaaaaaaaaaaaaaagaauu

SEQ ID NO: 18501 - RNA, 2033 nt, Artificial Sequence
  mRNA product Design a-2 (hSL-A64-N5) comprising derived and/or modified sequence from LASV(Nig08-A19;Clade III)__ADU56619__SP-HsPLAT_NP(2-569) (opt5)
aggagaguccgcucagccagguugcagaagcggcuuagcguguguccuaaucuucucucugcguguagguaggccugugccgcaaacaagcuuaccauggacgccaugaagagaggccugugcugugugcuccugcuuugcggggcugucuucguuagccccagcgccuccaaggaggugaaaucuuuccuguggacccagagccucagacgggaacuguccggcuacugcucuaacaucaaacuucaagucguuaaggacgcucaggcccugcuccacgggcuggauuuuagcgagguguccaaugugcagcgccuuaugagaaagcagaaacgggacgauggagaccugaagcgccucagagaucugaaccaagcggucaauaaccugguggaacucaagucuacacagcagaaaagcguucugcgggugggcacgcuuuccagcgacgaucugcucguccuggcugccgaccuugagaagcugaaaucuaaggugguucgcaccgaaagaccccucuccagcgggauuuauaugggaaaucugucuucccagcaacuggaucagcggaaagcccuccugaacaugaucggcaugacagggggaaauggcggccgcaacaccacaagcgacgggauugugagagucugggaugugaagaaugcugagcuucugaacaaucaguucggaaccaugccuucucucacacuggccugucuuaccaagcagggccaaguggaccugaacgaugcuguccaggcccucacggaccuggggcugaucuacaccgcgaaauaucccaauuccagcgaccucgaucggcuggcccagucccauccgauucuuaacaugaucgacacaaagaaaucuagccugaauaucuccggauacaacuuuagccucggcgcugccguuaaggcuggggccugcaugcuggauggaggcaacaugcuugagaccauuaaagugucuccucaaacaauggacggcauccugaaguccauucucaaagugaagcgcagccuggggauguucaucucugauacccccggagaaagaaauccuuaugagaacauucuguacaagaucugucucagcggcgacggguggcccuauauugcgucccggacgucuaucgucggacgcgccugggaaaauacagugguugaucuggagagcgacaacaaaccucagaagaccggcaaugggggauccaacaaaagccuucagucugcuggcuuugccgcuggccugacauacucccagcucaugacccugaaggauagcaugcugcaacuugacccgaaugccaaaaccuggauggauaucgaggggagacccgaagacccuguggagauugcccucuaccagcccucuuccggaugcuauauccacuucuuucgggaaccuacagaccugaagcaguucaagcaggaugcuaaauacagccauggcauugacgucacggaucuguuugcggcccaacccgggcucaccuccgcugugaucgaggcccugccgagaaacaugguuauuacaugucagggaucugaagacauccgcaaacuucuggagagccagggccggagagauaucaagcucauugacaucucccugucuaagguggauagccgcaaauucgagaaugccgucugggaccaguuuaaggaucugugccacaugcauaccgggauuguggucgaaaagaaaaagcggggcggaaaagaggaaaucacaccucacugugcucuuauggacugcauuauguucgaugccgcgguguccggcgggguugacgcuaaggugcucagagccguccugccccgcgauaugguguuucggaccagcacgccuaaaguugugcugugaggacuagucccuguucccagagcccacuuuuuuuucuuuuuuugaaauaaaauagccugucuuucagaucucaaaggcucuuuucagagccaccaaaaaaaaaaaaaaaaaaaaaaaaaaaaaaaaaaaaaaaaaaaaaaaaaaaaaaaaaaaaaaaaagaauu

SEQ ID NO: 18502 - RNA, 2033 nt, Artificial Sequence
  mRNA product Design a-2 (hSL-A64-N5) comprising derived and/or modified sequence from LASV(G1180-SLE-2010;Clade IV)__AIT17169__SP-HsPLAT_NP(2-569) (opt5)
aggagaguccgcucagccagguugcagaagcggcuuagcguguguccuaaucuucucucugcguguagguaggccugugccgcaaacaagcuuaccauggacgccaugaagagaggccugugcugugugcuccugcuuugcggggcugucuucguuagccccagcgccuccaaggagaucaaaucuuuccuguggacccagagccucagacgggaacuguccggcuacugcucuaacauuaagcugcaaguggucaaagacgcucaggcccugcuccacgggcuggauuuuagcgagguuuccaaugugcagcgccuuaugagaaaggaacggcgcgacgauaacgaccugaaaagacuccgggaucugaaucaggcggugaacaaucuggucgagcucaagucuacacaacaaaagagcauccugcgcgugggaacgcuuaccuccgacgaucugcucauucuggcugccgaccuugaaaaacuuaagagcaaaguuaucagaacagagcggccccucucugccggcguguauauggggaaccuguccagccagcagcuggaucagcgcagagcucuccugucuaugauuggaauguccagcggcaaucagcgggcccaggcugggcgcgacggagucgugagaguuugggaugugaagaacgucgagcuucugaauaaccaguucggcaccaugccuucucucacacuggccugucuuaccaaacaaggccagguggaccugaaugaugcggugcaggcccucacagaccuggggcugaucuacaccgcuaaguauccgaacacguccgaccucgaucggcugacccaaagccaucccauccuuaauaugauugacacaaagaaauccucucugaacaucagcggauacaauuuuucccucggcgccgcugucaaggccggggcgugcaugcuggauggaggcaacaugcuugaaaccauuaaaguuagcccucagacaauggacgggauccugaagucuauucucaaagugaagaaagcccugggaauguucaucuccgauacccccggcgagcgcaacccuuaugaaaauauucuguacaagaucugucucagcggcgacggguggcccuauaucgcuucuagaacgagcauuacaggacgggccugggagaacaccguggucgaucuggaguccgacggcaagccucagaaagcugggucuaauaacagcaauaagucccuucagagcgugggauuuacagccggccugaccuacucucaacucaugacccugaaagaugccaugcugcagcuugacccgaacgcuaagacauggauggauaucgaagggagacccgaggacccuguugaaauugcgcucuaccagcccuccagcggaugcuauauccacuucuuucgcgagccuacggaccugaaacaguucaagcaagaugccaaguacucucauggcauugacgugaccgaucuguuugcugcccagcccggccucacauccgccgucaucgacgcucugccgcggaauauggugaucaccugucaggggagcgaugacauuagaaaacuucuggaaucccagggacgcaaggauaucaaacucauugacaucgcccugucuaagacagauagccggaaauaugagaacgcgguuugggaccaauacaaggaucugugccacaugcauaccggcguggucguggagaagaaaaagagagggggaaaagaagagauuacgccucacugugcucuuauggacugcaucauguucgaugccgccgucuccggcgggcucaauacaucugugcugcgcgcuguucugccccgggacaugguguuuagaaccagcaccccucgcgucgugcucugaggacuagucccuguucccagagcccacuuuuuuuucuuuuuuugaaauaaaauagccugucuuucagaucucaaaggcucuuuucagagccaccaaaaaaaaaaaaaaaaaaaaaaaaaaaaaaaaaaaaaaaaaaaaaaaaaaaaaaaaaaaaaaaaagaauu

SEQ ID NO: 18503 - RNA, 2033 nt, Artificial Sequence
  mRNA product Design a-2 (hSL-A64-N5) comprising derived and/or modified sequence from LASV(G1442-SLE-2011;Clade IV)__AIT17181__SP-HsPLAT_NP(2-569) (opt5)
aggagaguccgcucagccagguugcagaagcggcuuagcguguguccuaaucuucucucugcguguagguaggccugugccgcaaacaagcuuaccauggacgccaugaagagaggccugugcugugugcuccugcuuugcggggcugucuucguuagccccagcgccuccaaggaggugaaaucuuuccuguggacccagagccucagacgggaacuguccggcuacugcucuaacaucaaacuucaagucguuaaggacgcucaggcccugcuccacgggcuggauuuuagcgagguguccaaugugcagcgccuuaugagaaagcagcggcgcgacgauaacgaccugaaaagacuccgggaucugaaucaagcggucaacaaucugguggaacucaagucuacacagcaaaagagcguucugcgcgugggaacgcuuaccuccgacgaucugcucguccuggcugccgaccuugagaaacuuaagagcaaagugauuagaacagaacggccccucucugccggcguuuauauggggaaccuguccagccagcagcuggaucagcgcagagcucuccugaauaugaucggaaugucuggcgggauucagggaacccggacaggccgcgacggcguggucagagugugggaugugaagaacgccgaccuucugaauaaccaguucgggaccaugccuucccucacacuggcuugucuuaccaaacaaggacaggucgaucugaaugacguugugcaggcccucacggaccugggccugaucuacaccgcgaaguauccgaacgccagcgaucucgaccggcugacacaaucucaucccauucuuaauaugaucgauaccaagaaauccagccugaacaucuccggguacaauuuuucucucggagcugccgugaaggcuggcgccugcaugcuggacgggggaaacaugcuugagacaauuaaagucagcccucagaccauggauggcauccugaaguccauucucaaagugaagaaaacgcugggcauguucaucagcgacacacccggggagcgcaacccuuaugaaaauauucuguacaagaucugucucucuggagauggcuggcccuauauugcguccagaaccagcaucacagggcgggccugggagaacaccguuguggaccuggaaucugauggaaagccucagaaagcuggcagcaauaacuccaauaagucucuucagagcgccggguuugcugccggacugaccuacucccaacucaugacacugaaagacgccaugcugcagcuugauccgaacgcuaagacguggauggacaucgagggcagacccgaggacccugucgaaauugcgcucuaccagcccagcucuggcugcuauauccacuucuuucgcgagccuaccgaucugaaacaguucaagcaagacgccaaguacucccaugggauugaugugacagaccuguuugcugcccagcccggacucaccagcgccguuaucgaagcucugccgcggaauauggugauuacaugucagggcucugaugacaucaaaaagcugcuggagucccaggggagaaaagauaucaagcucauugacaucgcccugagcaaaaccgauucccgcaaguaugaaaacgcggucugggaccaauacaaggaucugugccacaugcauacgggaguggucguggagaaaaagaaacggggcgggaaggaggaaauuacaccucacugugcucuuauggacugcaucauguucgaugccgccguuucuggcggacucaauacccuggugcugagagcuguccucccccgcgacaugguguuucggaccagcacaccuagaguugugcugugaggacuagucccuguucccagagcccacuuuuuuuucuuuuuuugaaauaaaauagccugucuuucagaucucaaaggcucuuuucagagccaccaaaaaaaaaaaaaaaaaaaaaaaaaaaaaaaaaaaaaaaaaaaaaaaaaaaaaaaaaaaaaaaaagaauu

SEQ ID NO: 18504 - RNA, 2033 nt, Artificial Sequence
  mRNA product Design a-2 (hSL-A64-N5) comprising derived and/or modified sequence from LASV(G3010-SLE-2013;Clade IV)__AIT17345__SP-HsPLAT_NP(2-569) (opt5)
aggagaguccgcucagccagguugcagaagcggcuuagcguguguccuaaucuucucucugcguguagguaggccugugccgcaaacaagcuuaccauggacgccaugaagagaggccugugcugugugcuccugcuuugcggggcugucuucguuagccccagcgccuccaaggagaucaaaucuuuccuguggacccagagccucagacgggaacuguccggcuacugcucuaacauuaaacuucaaguggucaaagacgcucaggcccugcuccacgggcuggauuuuagcgagguuuccaaugugcagcgccuuaugagaaaggaacggcgcgacgauaacgaccugaaaagacuccgggaucugaaucaggcggugaacaaucuggucgagcucaagucuacacaacaaaagagcauccugcgcgugggaacgcuuaccuccgacgaucugcucauucuggcugccgaccuugaaaaacuuaagagcaaaguuacaagaaccgagcggccccucucugccggcguguauauggggaaccuguccagccagcagcuggaucagcgcagagcucuccugucuaugaucggaauguccagcggcguccagggggcccgggcuggacgcgacggcgugguuagagugugggaugucaagaaugccgagcuucugaacaaucaguucggcacaaugccuucucucacccuggcgugucuuacaaaacaggggcaaguggaccugaacgaugugguccaggcccucaccgaccugggacugauuuacacggcuaaguauccgaauaccuccgaccucgaucggcugacacagagccaucccauccuuaacaugaucgacaccaagaaauccucucugaauauuagcggcuacaacuuuucccucggggccgcuguuaaggccggagcgugcaugcuggauggcgggaauaugcuugaaacaaucaaagugagcccucaaaccauggacggcauucugaagucuauccucaaagugaagaaagcccugggaauguucauuuccgagacgcccggcgaacgcaacccuuaugagaacauccuguacaagauuugucucagcggggauggauggcccuauaucgcuucuagaacaagcaucaccggccgggccugggagaauacagucguggaccuggaauccgaugggaagccucagaaagcuggaucuaacaauagcaacaagucccuucagagcgccggcuuuaccgccgggcugaccuacucucagcucaugacacugaaagacgcuaugcugcaacuugauccgaaugcgaagacguggauggacauugagggaagacccgaagauccuguugagguggcccucuaccagcccuccagcggcugcuauauccacuucuuucgcgaaccuaccgaccugaaacaguucaagcaggacgcuaaguacucucauggcauugaugucacagaccuguuugccgcccaacccgggcucaccuccgcugugaucgaugcccugccgcggaacaugguuauuacaugucagggaagcgacgauaucaaaaagcugcuggagucccagggcagaaaagacaucaagcucauugauaucgcgcugucuaaaaccgacagccgcaaguaugagaaugcugugugggaucaguacaaggaccugugccacaugcauacgggggucguggucgaaaagaagaaacggggaggcaaggaggaaauuacaccucacugugcccuuauggauugcaucauguucgacgccgcuguguccgggggccucaacaccucuguucugagagccgugcugccccgcgauauggucuuucggaccagcacaccuagagugguucucugaggacuagucccuguucccagagcccacuuuuuuuucuuuuuuugaaauaaaauagccugucuuucagaucucaaaggcucuuuucagagccaccaaaaaaaaaaaaaaaaaaaaaaaaaaaaaaaaaaaaaaaaaaaaaaaaaaaaaaaaaaaaaaaaagaauu

SEQ ID NO: 18505 - RNA, 2033 nt, Artificial Sequence
  mRNA product Design a-2 (hSL-A64-N5) comprising derived and/or modified sequence from LASV(G502-SLE-2009;Clade IV)__AIT17127__SP-HsPLAT_NP(2-569) (opt5)
aggagaguccgcucagccagguugcagaagcggcuuagcguguguccuaaucuucucucugcguguagguaggccugugccgcaaacaagcuuaccauggacgccaugaagagaggccugugcugugugcuccugcuuugcggggcugucuucguuagccccagcgccuccaaggagaucaaaucuuuccuguggacccagagccucagacgggaacuguccggcuacugcucuaacauuaagcugcaaguggucaaagacgcucaggcccugcuccacgggcuggauuuuagcgagguuuccaaugugcagcgccuuaugagaaaggaacggcgcgacgauaacgaccugaaaagacuccgggaucugaaucaggcggugaacaaucuggucgagcucaagucuacacaacaaaagagcauccugcgcgugggaacgcuuaccuccgacgaucugcucauucuggcugccgaccuugaaaaacuuaagagcaaaguuaucagaacagagcggccccucucugccggcguguauauggggaaccuguccagccagcagcuggaucagcgcagagcucuccugucuaugauuggaauguccggcgggaaucagggaguccgggccggcaaggacggcgugguucgcgugugggaugucaaaaacgcugagcuucugaauaaccaguucgggaccaugccuagccucacacuggccugucuuaccaagcagggacaaguggaccugaaugaugcggugcaggcccucacagaccugggccugaucuacaccgcuaaguauccgaacacgucugaccucgauagacugacccagucccaucccauccuuaauaugauugacaccaaaaagagcucccugaacaucucuggguacaauuuuagccucggagccgcugucaaagccggcgcgugcaugcuggaugggggaaacaugcuugaaacaauuaagguuuccccucaaacaauggacggcauccugaaaagcauucucaaggugaaaaaggcccugggcauguucaucucugauacccccggggagcggaacccuuaugaaaauauucuguacaagaucugucucuccggagacggcuggcccuauaucgcuagccgcacgucuauuacagggagagccugggagaacaccguggucgaucuggagagcgacggaaaaccucagaaggcuggcuccaauaacucuaauaaaagccuucaguccgccggguuuacagccggacugaccuacagccagcucaugacccugaaggaugcuaugcugcaacuugacccgaacacaaaaacguggauggauaucgaaggccggcccgaggacccuguggaaauugcgcucuaccagcccucuuccggcugcuauauccacuucuuuagagagccuaccgaccugaagcaguucaagcaggaugccaaauacagccaugggauugacguuacagaucuguuugcugcccaacccggacucaccucugccgugaucgacgcucugccgcgcaauauggucaucacaugucagggcuccgaugacauucggaaacuucuggaaagccaggggagaaaggauaucaagcucauugacaucgcccugaacaaaaccgauucccgcaaguaugagaaugcggugugggaccaguacaaggaucugugccacaugcauacgggaguuguggucgagaaaaagaaacggggcgggaaggaagagauuacaccucacugugcucuuauggacugcaucauguucgaugccgccgugucuggcggacucaacaccagcguccugagagcugugcugccccgcgacaugguuuuucggaccuccacaccuagagugguccucugaggacuagucccuguucccagagcccacuuuuuuuucuuuuuuugaaauaaaauagccugucuuucagaucucaaaggcucuuuucagagccaccaaaaaaaaaaaaaaaaaaaaaaaaaaaaaaaaaaaaaaaaaaaaaaaaaaaaaaaaaaaaaaaaagaauu

SEQ ID NO: 18506 - RNA, 2033 nt, Artificial Sequence
  mRNA product Design a-2 (hSL-A64-N5) comprising derived and/or modified sequence from LASV(G733-SLE-2010;Clade IV)__AIT17155__SP-HsPLAT_NP(2-569) (opt5)
aggagaguccgcucagccagguugcagaagcggcuuagcguguguccuaaucuucucucugcguguagguaggccugugccgcaaacaagcuuaccauggacgccaugaagagaggccugugcugugugcuccugcuuugcggggcugucuucguuagccccagcgccuccaaggagaucaaaucuuuccuguggacccagagccucagacgggaacuguccggcuacugcucuaacauuaagcugcaaguggucaaagacgcucaggcccugcuccacgggcuggauuuuagcgagguuuccaaugugcagcgccuuaugagaaaggaacggcgcgacgauaacgaccugaaaagacuccgggaucugaaucaggcggugaacaaucuggucgagcucaagucuacacaacaaaagagcgugcugcgcguuggaacgcuuaccuccgacgaacugcucgugcuggcugccgaucuugagaaacuuaagagcaaagucaucagaacagagcggccccucucugccggcguguauauggggaaccuguccagccagcagcuggaccagcgcagagcucuccugucuaugauuggaauguccggcgggaaucagggagcccggaccggccgcgauggcguugugagagucugggacgugaagaacgcugaacuucugaauaaccaguucgggacaaugccuagccucacccuggccugucuuacaaaacagggacaaguggaucugaaugacgcgguccaggcccucaccgaucugggccugaucuacacggcuaaguauccgaacaccucugaccucgaccggcugacacagucccaucccauucuuaauaugaucgauaccaagaaaagcucccugaacaucucuggguacaauuuuagccucggagccgcuguuaaggccggcgcgugcaugcuggacgggggaaacaugcuugagacaauuaaaguguccccucaaaccauggauggcauccucaagagcauucugaaagugaagaaagcccugggcauguucaucucugacacgcccggggaacgcaacccuuaugagaauauucuguacaagaucugucucuccggagauggcuggcccuauauugcuagcagaacaucuaucaccgggcgggccugggagaacacagucguggaccuggaaagcgauggaaagccucagaaagcuggcuccaauaacucuaauaagagccuucaguccgccggguuuaccgccggacugaccuacagccagcucaugacacugaaagacgcuaugcugcaacuugauccgaacgcgaagacguggauggacaucgagggcagacccgaagauccuguugagauugcccucuaccagcccucuuccggcugcuauauccacuucuuucgcgaaccuaccgaccugaaacaguucaagcaggacgcuaaguacagccaugggauugaugugacagaccuguuugccgcccaacccggacucaccucugcugucaucgaugcccugccgcggaauauggugauuacaugucagggcuccgacgauaucagaaaacuucuggagagccaggggcgcaaggacaucaaacucauugauaucgcgcuguccaagauugacucucggaaauaugagaacgcuguuugggaucaguacaaggaccugugccacaugcauaccggaguggucguggaaaagaaaaagagaggcgggaaagaggaaaucacgccucacugugcccuuauggauugcauuauguucgacgccgcugucagcggcggacucaauucccuggugcugcgcgccguucucccccgggauaugguguuuagaacaucuaccccucgcgucgugcugugaggacuagucccuguucccagagcccacuuuuuuuucuuuuuuugaaauaaaauagccugucuuucagaucucaaaggcucuuuucagagccaccaaaaaaaaaaaaaaaaaaaaaaaaaaaaaaaaaaaaaaaaaaaaaaaaaaaaaaaaaaaaaaaaagaauu

SEQ ID NO: 18507 - RNA, 2033 nt, Artificial Sequence
  mRNA product Design a-2 (hSL-A64-N5) comprising derived and/or modified sequence from MOPV/LASV reassortant(IGS-1;Clade IV)__AFY05578__SP-HsPLAT_NP(2-569) (opt5)
aggagaguccgcucagccagguugcagaagcggcuuagcguguguccuaaucuucucucugcguguagguaggccugugccgcaaacaagcuuaccauggacgccaugaagagaggccugugcugugugcuccugcuuugcggggcugucuucguuagccccagcgccuccaaggagaucaaaucuuuccuguggacccagagccucagacgggaacuguccggcuacugcucuaacauuaaacuucaaguggucaaggacgcucaggcccugcuccacgggcuggauuuuagcgagguuuccaaugugcagcgccuuaugagaaaggaacggcgcgacgauaacgaccugaaaagacuccgggaucugaaucaggcggugaacaaucuggucgagcucaagucuacacaacaaaagagcauccugcgcgugggaacgcuuaccuccgacgaucugcucauucuggcugccgaccuugaaaaacugagaagcaagguuauccggacagagcgcccccucucugccggcguguauauggggaaccuguccagccagcagcuggaucagagacgggcucuccugaauaugauuggaaugucuggcgggaaccagggagcccgcgcuggcagagacggcgucgugcggguuugggaugugaaaaaugccgagcuucuguccaaccaguucgggaccaugccuagccucacacuggcgugucuuaccaagcagggacaagucgaccugaaugaugccgugcaggcucucacagaccugggccugaucuacaccgccaaauauccgaacacgucugaccucgaucgccugacccagucccaucccauccuuaauaugauugacacaaagaaaagcucccugaacaucucuggguacaauuuuagccucggagcugccgugaaggcgggcgccugcaugcuggaugggggaaacaugcuugaaaccauuaaggucuccccucaaacaauggacggcauccugaaaagcauucucaagguuaaaaaggcucugggcauguucaucucugauacccccggggagagaaacccuuaugaaaauauucuguacaaaaucugucucuccggagacggcuggcccuauaucgccagccggacgucuauuacagggagagcuugggagaacaccgugguggaucuggagagcgacggaaagccucagaaggccgauuccaauaacucuagcaaaucccuucagagcgccggcuuuacagcugggcugaccuacucucagcucaugacccugaaggacgcgaugcugcaacuugauccgaaugccaaaacauggauggacaucgaaggacgccccgaggacccugucgaaauugcucucuaccagcccuccagcggcugcuauauccacuucuuucgggagccuacggaucugaagcaguucaaacaggacgccaaguacucucauggcauugaugugaccgaccuguuugccacacaacccgggcucaccuccgcuguuaucgaugcccugccgagaaacauggugaucacaugucagggaagcgacgauauucgcaaacuucuggaaucccagggccggaaggacaucaagcucauugauaucgaccugucuaaaaccgauagcagaaaguaugagaaugcggucugggaccaguacaaagaucugugccacaugcauacgggggugguuguggagaagaagaaacgcggaggcaaggaagagauuacaccucacugugcucuuauggacugcaucauguucgacgccgccgucuccgggggccucaacaccucugugcugcgggcuguccugcccagagauaugguguuucgcaccagcacaccucggguugugcucugaggacuagucccuguucccagagcccacuuuuuuuucuuuuuuugaaauaaaauagccugucuuucagaucucaaaggcucuuuucagagccaccaaaaaaaaaaaaaaaaaaaaaaaaaaaaaaaaaaaaaaaaaaaaaaaaaaaaaaaaaaaaaaaaagaauu

SEQ ID NO: 18508 - RNA, 2033 nt, Artificial Sequence
  mRNA product Design a-2 (hSL-A64-N5) comprising derived and/or modified sequence from LASV(LM765-SLE-2012;Clade IV)__AIT17815__SP-HsPLAT_NP(2-569) (opt5)
aggagaguccgcucagccagguugcagaagcggcuuagcguguguccuaaucuucucucugcguguagguaggccugugccgcaaacaagcuuaccauggacgccaugaagagaggccugugcugugugcuccugcuuugcggggcugucuucguuagccccagcgccuccaaggagaucaaaucuuuccuguggacccagagccucagacgggaacuguccggcuacugcucuaacauuaagcugcaaguggucaaagacgcucaggcccugcuccacgggcuggauuuuagcgagguuuccaaugugcagcgccuuaugagaaaggaacggcgcgacgauaacgaccugaaaagacuccgggaucugaaucaggcggugaacaaucuggucgagcucaagucuacacaacaaaagagcauccugcgcgugggaacgcuuaccuccgacgaucugcucauucuggcugccgaccuugaaaaacuuaagagcaaaguuacaagaaccgagcggccccucucugccggcguguauauggggaaccuguccagccagcagcuggaucagcgcagagcucuccuggacaugaucggaaugucuggcuccaaucagggggcccgggcuggacgcgauggcgucgugagaguuugggacgugaagaacgccgagcuucugaauaaccaguucggcacaaugccuagccucacccuggcgugucuuacaaaacaggggcaagucgaucugaaugacgccgugcaggcucucaccgaccugggacugauuuacacggccaaguauccgaacaccucugaucucgaccggcugacacagucccaucccauccuuaauaugaucgauaccaagaaaagcucccugaacauuucuggcuacaauuuuagccucggggcugccgugaaggcgggagccugcaugcuggacggcgggaacaugcuugaaacaaucaaagucuccccucaaaccauggauggcauucucaagagcauccugaaaguuaagaaagcucugggaauguucauuucugacgcccccggcgagcgcaacccuuaugaaaauauccuguacaagauuugucucuccggggauggauggcccuauaucgcuagcagaacgucuaucacaggccgggccugggagaacaccgugguggaccuggagagcgaugggaagccucagaaagccggauccaauggcucuaacaagagccuucaguccgcuggguuuacagcgggacugaccuacagccagcucaugacccugaaagacgccaugcugcaacuugauccgaaugcuaagacauggauggacauugaaggcagacccgaggacccugucgaaaucgcccucuaccagcccucuuccggcugcuauauucacuucuuucgcgagccuacggaucugaaacaguucaagcaggacgccaaguacagccaugggaucgaugugaccgaccuguuugcugcccaacccggacucacaucugcgguuauugaugcucugccgcggaacauggugaucaccugucagggcuccgacgauaucagaaaacuuuucgaaagccaggggcgcaaggacauuaaacugaucgauauugcccucuccaagacagacucucggaaauaugagaaugccgucugggaucaguacaaggaccugugccacaugcauaccggaaucgugguugagaagaaaaagagaggcgggaaagaagagauuacgccucacugugcucugauggauugcaucauguuugacgccgcugugagcggcggacuuaacacauccguccuccgcgccgugcugccccgggacauggucuucagaaccucuaccccucgcgugguucugugaggacuagucccuguucccagagcccacuuuuuuuucuuuuuuugaaauaaaauagccugucuuucagaucucaaaggcucuuuucagagccaccaaaaaaaaaaaaaaaaaaaaaaaaaaaaaaaaaaaaaaaaaaaaaaaaaaaaaaaaaaaaaaaaagaauu

SEQ ID NO: 18509 - RNA, 2033 nt, Artificial Sequence
  mRNA product Design a-2 (hSL-A64-N5) comprising derived and/or modified sequence from LASV(LM776-SLE-2012;Clade IV)__AIT17825__SP-HsPLAT_NP(2-569) (opt5)
aggagaguccgcucagccagguugcagaagcggcuuagcguguguccuaaucuucucucugcguguagguaggccugugccgcaaacaagcuuaccauggacgccaugaagagaggccugugcugugugcuccugcuuugcggggcugucuucguuagccccagcgccuccaaggagaucaaaucuuuccuguggacccagagccucagacgggaacuguccucuuacugcagcaacauuaaacuucaaguggucaaggacgcucaggcccugcuccacggccuggauuuuuccgagguuucuaaugugcagcgccuuaugagaaaggaacggcgcgacgauaacgaccugaaaagacuccgggaucugaaucaggcggugaacaaucuggucgagcucaagagcacacaacagaaguccauccugcgcguggggacgcuuaccagcgacgaucugcucauucuggcugccgaccuugaaaaacugaagucuaaaguuacaagaaccgagcggccccucuccgccggaguguauaugggcaaccugagcucucagcagcuggaucaacgcagagcucuccuguccaugaucgggaugagcggaucuaaucagggcgcccgggcugggcgcgacggagucgugagaguuugggaugugaagaacgccgagcuucugaauaaccaguucggcacaaugccuucccucacccuggcgugucuuacaaaacagggccaagucgaccugaaugaugccgugcaggcucucaccgaccuggggcugauuuacacggccaaguauccgaacaccagcgaccucgaucggcugacacagucccaucccauccuuaauaugaucgacaccaagaaaucuagccugaacauuuccggauacaauuuuagccucggcgcugccgugaaggcgggggccugcaugcuggauggaggcaacaugcuugaaacaaucaaagucucuccucaaaccauggacgggauucugaaguccauccucaaaguuaagaaagcucugggaauguucauuagcgauacgcccggcgagcgcaacccuuaugaaaauauccuguacaagauuugucucucuggcgacggguggcccuauaucgccagcagaacauccaucaccggacgggcuugggagaacacagugguggaucuggagucugacggcaagccucagaaagccgggagcaauaacuccaauaagagccuucagucugccggauuuaccgcuggccugaccuacucccagcucaugacacugaaagaugcgaugcugcaacuugacccgaacgccaagacguggauggauauugaagggagacccgaggacccugucgaaguggcucucuaccagcccagcucuggaugcuauauccacuucuuucgcgagccuaccgaccugaaacaguucaagcaggaugccaaguacucccauggcauugacguuacagaucuguuugccgcucaacccggccucaccagcgccgugaucgacgcgcugccgcggaauauggucauuacaugucagggguccgaugacaucagaaaacuucuggaaucucagggacgcaaggauaucaaacucauugacaucgcucugagcaagaccgauucccggaaauaugagaacgccgugugggaccaguacaaggaucugugccacaugcauacgggcguuguggucgagaagaaaaagagagggggaaaagaagagauuacaccucacugugcccuuauggacugcaucauguucgaugcugccgugucuggcgggcucaauaccagcguccugcgcgcugugcugccccgggacaugguuuuuagaaccuccacaccucgcgugguccucugaggacuagucccuguucccagagcccacuuuuuuuucuuuuuuugaaauaaaauagccugucuuucagaucucaaaggcucuuuucagagccaccaaaaaaaaaaaaaaaaaaaaaaaaaaaaaaaaaaaaaaaaaaaaaaaaaaaaaaaaaaaaaaaaagaauu

SEQ ID NO: 18510 - RNA, 2033 nt, Artificial Sequence
  mRNA product Design a-2 (hSL-A64-N5) comprising derived and/or modified sequence from LASV(Mad39;Clade IV)__ANH09723__SP-HsPLAT_NP(2-569) (opt5)
aggagaguccgcucagccagguugcagaagcggcuuagcguguguccuaaucuucucucugcguguagguaggccugugccgcaaacaagcuuaccauggacgccaugaagagaggccugugcugugugcuccugcuuugcggggcugucuucguuagccccagcgccuccaaggagaucaaaucuuuccuguggacccagagccucagacgggaacuguccggcuacugcucuaacauuaagcugcaaguggucaaagacgcucaggcccugcuccacgggcuggauuuuagcgagguuuccaaugugcagcgccuuaugagaaagcagcggcgcgacgauaacgaccugaaaagacuccgggaucugaaucaagcggugaacaaucuggucgaacucaagucuacacagcaaaagagcgugcugcgcguuggaacgcuuaccuccgacgaucugcucacacuggcugccgaccuugagaaacuuaagagcaaagugaccagaacagaacggccccucaccgccggcgucuauauggggaaccugucuucccagcagcuggaucagcgcagagcucuccugaauaugaucggaaugagcggcgggaaccagggagcccggacaggccgcgacggcgugguuagagugugggaugucaagaaugcugagcuucugaacaaucaguucgggaccaugccuucucucacgcuggccugucuuaccaaacaaggacagguggaccugaacgaugugguccaggcgcucacagaccugggccugauuuacaccgccaaguauccgaauacauccgaccucgaucggcugacccaaagccaucccauccuuaacaugauugacacgaauaagucuucccugaacaucagcggguacaacuuuucccucggagcugccguuaaagcuggcgccugcaugcuggaugggggaaauaugcuugagacaaucaaggugucuccucagaccauggacggcauucugaaaagcauccucaaggugaaaaagucccugggcauguucauuagcgauacacccggggaacgcaacccuuaugagaauauccuguacaaaauuugucucucuggagacggcuggcccuauaucgcguccagaaccagcauuaccgggcgggccugggaaaacacagucguggaucuggagucuggaggcaagccucagaaggcugggagcaauaacuccaauaaaucucuucagagcgccggauuugcugccggccugacguacucccaacucaugacccugaaggacgccaugcugcagcuugauccgaacgcuaaaacauggauggacaucgagggcagacccgaagauccuguugagaucgcgcucuaccagcccauuagcgggugcuauauccacuucuuucgcgaaccuaccgaccugaagcaguucaaacaagacgccaaguacucucauggaauugaugugacagaccuguuugcugcccagcccggccucaccuccgccgucaucgaggcucugccgcggaauauggugauuacgugucaggggagcgaugacaucagaaaacuuuucgaaucucagggacgcaaggauaucaagcugauugacaucgcccucuccaaaacagauagccggaaguaugagaacgcgguuugggaccaauacaaagaucugugccacaugcauaccggcguggucguggagaagaagaaaaagggcgggaaagaagagauuaccccucacugugcucugauggacugcaucauguuugaugccgccgucuccggaggccuuaauacacucgugcugagagcuguucugccccgcgacaugguguuccggaccucuacaccuaaggucgugcucugaggacuagucccuguucccagagcccacuuuuuuuucuuuuuuugaaauaaaauagccugucuuucagaucucaaaggcucuuuucagagccaccaaaaaaaaaaaaaaaaaaaaaaaaaaaaaaaaaaaaaaaaaaaaaaaaaaaaaaaaaaaaaaaaagaauu

SEQ ID NO: 18511 - RNA, 2033 nt, Artificial Sequence
  mRNA product Design a-2 (hSL-A64-N5) comprising derived and/or modified sequence from LASV(Z0947-SLE-2011;Clade IV)__AIT17841__SP-HsPLAT_NP(2-569) (opt5)
aggagaguccgcucagccagguugcagaagcggcuuagcguguguccuaaucuucucucugcguguagguaggccugugccgcaaacaagcuuaccauggacgccaugaagagaggccugugcugugugcuccugcuuugcggggcugucuucguuagccccagcgccuccaaggagaucaaaucuuuccuguggacccagagccucagacgggaacuguccggcuacugcucuaacauuaagcugcaaguggucaaagacgcucaggcccugcuccacgggcuggauuuuagcgagguuuccaaugugcagcgccuuaugagaaaggaacggcgcgacgauaacgaccugaaaagacuccgggaucugaaucaggcggugaacaaucuggucgagcucaagucuacacaacaaaagagcauccugcgcgugggaacgcuuaccuccgacgaucugcucauucuggcugccgaccuugaaaaacuuaagagcaaaguuacaagaaccgagcggccccucucugccggcguguauauggggaaccuguccagccagcagcuggaucagcgcagagcucuccugaauaugaucggaaugucuggcuccaaccagggggcccggacaggacgcgacggcgucgugagaguuugggaugugaagaaugcugagcuucugaacaaucaguucggcaccaugccuagccucacacuggccugucuuaccaaacaggggcaagucgaccugaacgaugcggugcaggcccucacggaccugggacugauuuacaccgcuaaguauccgaauacaucugaccucgaucggcugacccagucccaucccauccuuaacaugaucgacacaaagaaaagcucccugaauauuucuggcuacaacuuuagccucggggccgcugugaaggccggagcgugcaugcuggauggcgggaacaugcuugaaaccaucaaagucuccccucaaacgauggacggcauucucaagagcauccugaaaguuaagaaagcccugggaauguucauuucugaugcucccggcgagcgcaauccuuaugaaaacauccuguacaagauuugucucuccggggacggauggcccuauaucgccagcagaacaucuaucaccggccgggcuugggagaauacagugguggaucuggagagcgacgggaagccucagaaagccggauccaacggcucuaauaagagccuucaguccgccggguuuaccgcuggacugaccuacagccagcucaugacacugaaagaugcgaugcugcaacuugacccgaacgccaagacguggauggauauugaaggcagacccgaggacccugucgaaaucgcucucuaccagcccucuuccggcugcuauauucacuucuuucgcgagccuaccgaccugaaacaguucaagcaggaugccaaguacagccaugggaucgacgugacagaucuguuugccgcucaacccggacucaccucugccguuauugacgcgcugccgcggaauauggugaucacaugucagggcuccgaugacaucagaaaacuuuucgaaagccaggggcgcaaggauauuaaacugaucgacauugcucucuccaagaccgauucucggaaauaugagaacgccgucugggaccaguacaaggaucugugccacaugcauacgggaaucgugguugagaagaaaaagagaggcgggaaagaagagauuacaccucacugugcccugauggacugcaucauguuugaugcugccgugagcggcggacuuaauaccuccguccuccgcgcugugcugccccgggacauggucuucagaaccucuacaccucgcgugguucugugaggacuagucccuguucccagagcccacuuuuuuuucuuuuuuugaaauaaaauagccugucuuucagaucucaaaggcucuuuucagagccaccaaaaaaaaaaaaaaaaaaaaaaaaaaaaaaaaaaaaaaaaaaaaaaaaaaaaaaaaaaaaaaaaagaauu

SEQ ID NO: 18512 - RNA, 2064 nt, Artificial Sequence
  mRNA product Design a-2 (hSL-A100) comprising derived and/or modified sequence from LASV(Josiah;Clade IV)__NP_694869__SP-HsPLAT_NP(2-569) (opt1)
aggagaguccgcucagccagguugcagaagcggcuuagcguguguccuaaucuucucucugcguguagguaggccugugccgcaaacaagcuuaccauggacgccaugaagcgcggccugugcugcgugcuccugcugugcggggccgucuucgugagccccagcgccuccaaggagaucaagagcuuccuguggacccagucccuccgccgggagcugagcggcuacugcuccaacaucaagcuccagguggucaaggacgcccaggcgcugcugcacgggcuggacuucagcgagguguccaacgugcagcgccucaugcggaaggagcgccgggacgacaacgaccugaagcgccugcgggaccucaaccaggccgucaacaaccugguggagcucaagagcacccagcagaaguccauccugcgcgugggcacccugaccagcgacgaccugcucauccuggccgccgaccuggagaagcucaaguccaaggucauccggaccgagcgcccccugagcgccgggguguacaugggcaaccuguccagccagcagcucgaccagcggcgcgcgcugcugaacaugaucgggauguccggcggcaaccagggggcccgggccggccgcgacggggugguccgggugugggacgugaagaacgccgagcuccugaacaaccaguucggcaccaugccgagccugacgcucgcgugccugaccaagcaggggcaggucgaccugaacgacgccgugcaggcccucaccgaccugggccugaucuacaccgccaaguaccccaacacguccgaccucgaccgccugacccagagccaccccauccugaacaugaucgacaccaagaaguccagccucaacaucagcggcuacaacuucucccugggggccgcggugaaggccggcgccugcaugcuggacgggggcaacaugcucgagaccaucaaggucagcccccagacgauggacggcauccugaaguccauccugaaggugaagaaggcccucgggauguucaucagcgacaccccgggcgagcggaaccccuacgagaacauccuguacaagaucugccuguccggggacggcuggcccuacaucgccagccgcaccuccaucaccgggcgggcgugggagaacacgguggucgaccucgagagcgacggcaagccccagaaggccgacuccaacaacagcuccaagagccugcaguccgccggcuucaccgccgggcugaccuacagccagcucaugacccugaaggacgccaugcugcagcuggacccgaacgcgaagacguggauggacaucgagggccgccccgaggaccccguggagaucgcccucuaccagcccuccagcgggugcuacauccacuucuuccgggagccgaccgaccugaagcaguucaagcaggacgccaaguacucccacggcaucgacgugaccgaccuguucgccacccagcccgggcucacgagcgccgucaucgacgcgcugccccgcaacauggugaucacgugccagggcuccgacgacauccgcaagcugcucgagagccagggccggaaggacaucaagcugaucgacaucgcccugagcaagaccgacucccgcaaguacgagaacgccgugugggaccaguacaaggaccucugccacaugcacaccggggucguggucgagaagaagaagcggggcgggaaggaggagaucaccccgcacugcgcccugauggacugcaucauguucgacgcggccgugagcggcgggcugaacaccuccgugcuccgcgccguccugccccgggacaugguguuccgcaccagcacgccccgggugguccugugaggacuagucccuguucccagagcccacuuuuuuuucuuuuuuugaaauaaaauagccugucuuucagaucucaaaggcucuuuucagagccaccaaaaaaaaaaaaaaaaaaaaaaaaaaaaaaaaaaaaaaaaaaaaaaaaaaaaaaaaaaaaaaaaaaaaaaaaaaaaaaaaaaaaaaaaaaaaaaaaaaaaa

SEQ ID NO: 18513 - RNA, 2064 nt, Artificial Sequence
  mRNA product Design a-2 (hSL-A100) comprising derived and/or modified sequence from LASV(LP;Clade I)__AAF86702__SP-HsPLAT_NP(2-569) (opt1)
aggagaguccgcucagccagguugcagaagcggcuuagcguguguccuaaucuucucucugcguguagguaggccugugccgcaaacaagcuuaccauggacgccaugaagcgcggccugugcugcgugcuccugcugugcggggccgucuucgugagccccagcaacuccaaggagaucaagagcuuccuguggacccagucccuccgccgggagcugagcggcuacugcuccaacaucaagcuccagguggucaaggacgcccaggcccugcugcacgggcuggacuucagcgagguguccaacgugcagcgccucaugcggaagcagaagcgcgacgacgcggaccugaagcggcugcgcgaccucaaccaggccgucaacaaccugguggagcucaagagcacccagcagaagaacgugcugcgggucggcacgcuguccagcgacgaccugaucacccucgccgccgaccuggagaagcugaaguccaaggugauccgcaccgagcggccccucagcuccgggguguacaugggcaaccugagcucccagcagcuggaccagcgccgggcccuccugagcaugaucgggauguccggcggcccgcaggggaaccgcaccggcggggacggcgucgugcgggugugggacgucaagaacgcggagcugcucaacaaccaguucgggacgaugcccagccugacccuggccugccucaccaagcagggccagguggaccugaacgacgccgugcaggcccugaccgaccucggccugaucuacacggcgaaguaccccaacuccagcgaccuggacaugcucacccagagccaccccauccuggggauggucgacaccaagaaguccagccugaacaucuccggcuacaacuucagccucggggccgccgugaaggccggcgccugcaugcuggacggcgggaacaugcuggagaccaucaagguguccccgcagacgauggacggcauccucaagagcauccugaaggucaagcgcucccuggggauguucaucagcgacacccccggcgagcggaaccccuacgagaacauccucuacaagaucugccuguccggggagggcuggcccuacaucgcgagccgcaccuccaucaccggccgggccugggagaacacgcugguggaccucgagagcgacaacaagccgcccaagcugaacuccgccgggagcaacaagucccugcaggccgccggccucaacgcggggcugaccuacagccagcugaugacccugaaggacugcaugcuccagcuggaccccuccagcaagaccuggaucgacaucgagggccgccccgaggacccgguggagaucgcccuguuccagcccuccagcgggugcuacauccacuucuuccgggagcccacggaccucaagcaguucaagcaggacgccaaguacagccacggcaucgacgucaccgaccuguucuccacccagcccggccugaccagcgccgugaucgaggcccucccgcgcaacauggugcugacgugccagggguccgacgacaucaagaagcugcucgagagccagggccggcgcgacaucaagcugaucgacaucucccugagcaaggcggacucccgcaaguucgagaacgccgucugggaccaguacaaggaccucugccacaugcacaccgggguggucguggagaagaagaagcggggcgggaaggaggagaucacgccccacugcgcccugcuggacugcaucauguucgacgccgccaccaccggcagccucaacaucaccacccugcgcgcggugcugccccgggacauggucuuccgcaccuccacgcccaagguggugcucugaggacuagucccuguucccagagcccacuuuuuuuucuuuuuuugaaauaaaauagccugucuuucagaucucaaaggcucuuuucagagccaccaaaaaaaaaaaaaaaaaaaaaaaaaaaaaaaaaaaaaaaaaaaaaaaaaaaaaaaaaaaaaaaaaaaaaaaaaaaaaaaaaaaaaaaaaaaaaaaaaaaaa

SEQ ID NO: 18514 - RNA, 2064 nt, Artificial Sequence
  mRNA product Design a-2 (hSL-A100) comprising derived and/or modified sequence from LASV(803213;Clade II)__AAF86704__SP-HsPLAT_NP(2-569) (opt1)
aggagaguccgcucagccagguugcagaagcggcuuagcguguguccuaaucuucucucugcguguagguaggccugugccgcaaacaagcuuaccauggacgccaugaagcgcggccugugcugcgugcuccugcugugcggggccgucuucgugagccccagcgccuccaaggaggugaaguccuuccuguggacccagagccuccgccgggagcugagcggcuacugcuccaacaucaagcugcaggucgugaaggacgcccaggcgcuccugcacgggcuggacuucagcgaggugaacaacguccagcgccucaugcggaagcagaagcgcgacgacggcgaccugaagcggcugcgcgaccucaaccaggccgugaacaaccugguggagcugaaguccacccagcagaaguccauccuccgggucgggacgcugaccagcgacgaccugcucacccuggccgccgaccuggagaagcucaagagcaaggugauccgcaccgagcggccccuguccagcggcguguacauggggaaccuguccacgcagcagcucgagcagcgccgggcccugcugaacaugaucggcauggucggcggggcgcagggcacccagccggggcgcgacggcguggugcgggucugggacgugaagaaccccgaccuccugaacaaccaguucgggaccaugcccagccugacccucgccugccugacgaagcagggccagguggaccugaacgacgccguccucgcccugaccgaccugggccucaucuacaccgcgaaguaccccaacuccagcgaccuggaccgccugucccagagccacccgauccucaacaugguggacaccaagaaguccagccugaacaucagcggguacaacuucucccugggcgccgccgugaaggccggggccugcaugcucgacggcggcaacaugcuggagacgaucaaggucacgccccagaccauggacgggauccucaagagcauccugaaggugaagcggucccugggcauguucgugagcgacacccccggggagcgcaaccccuacgagaacauccuguacaagaucugccucuccggcgacggguggccguacaucgcgagccggaccuccaucgucggccgcgccugggagaacaccaccguggaccuggagagcgacggcaagccccagaagguggggaccgccggcuccaacaagagccugcaguccgccggguuccccacgggccucaccuacagccagcugaugacccugaaggacuccaugaugcagcuggaccccagcgccaagaccuggaucgacaucgaggggcggccggaggaccccgucgagaucgcgcucuaccagcccauguccggcugcuacauccacuucuuccgcgagcccacggaccugaagcaguucaagcaggacgccaaguacagccacggcaucgacguggccgaccuguucccggcccagcccgggcucaccuccgccgucaucgaggcgcugccccggaacauggugcugaccugccagggcagcgacgacaucaagaagcuccuggacucccaggggcgccgcgacaucaagcugaucgacaucagccucagcaagguggacucccggaaguucgagaacgccgucugggaccagugcaaggaccugugccacaugcacaccggcgugguggucgagaagaagaagcgcgggggcaaggaggagaucacgccccacugcgcccugauggacugcaucauguucgacgccgccgugagcggcgggcucaacaucccggugcugcgggcgguccugccccgcgacaugguguuccggaccuccagccccaaggugguccucugaggacuagucccuguucccagagcccacuuuuuuuucuuuuuuugaaauaaaauagccugucuuucagaucucaaaggcucuuuucagagccaccaaaaaaaaaaaaaaaaaaaaaaaaaaaaaaaaaaaaaaaaaaaaaaaaaaaaaaaaaaaaaaaaaaaaaaaaaaaaaaaaaaaaaaaaaaaaaaaaaaaaa

SEQ ID NO: 18515 - RNA, 2067 nt, Artificial Sequence
  mRNA product Design a-2 (hSL-A100) comprising derived and/or modified sequence from LASV(GA391;Clade III)__CAA36646__SP-HsPLAT_NP(2-570) (opt1)
aggagaguccgcucagccagguugcagaagcggcuuagcguguguccuaaucuucucucugcguguagguaggccugugccgcaaacaagcuuaccauggacgccaugaagcgcggccugugcugcgugcuccugcugugcggggccgucuucgugagccccagcgccuccaaggaggugcgcagcuuccuguggacccagucccuccggcgcgagcugagcggcuacugcuccaacaucaagcugcaggucgugaaggacgcccaggcgcuccugcacgggcuggacuucagcgagguguccaacguccagcggcucaugcgcaagcagaagcgggacgacggcgaccugaagcgccugcgggaccucaaccaggccgugaacaaccugguggagcucaagagcacccagcagaaguccguccugcgcguggggacccugagcuccgacgaccugcucauccuggccgccgaccuggagaagcucaagagcaaggugacccggaccgagcgcccccuguccagcggcgucuacauggggaaccuguccagccagcagcucgaccagcggcgcgcccugcugaacaugaucggcaugaccggcguguccgggggcgggaagggcgcgagcgacgggaucgugcgggucugggacgugaagaacgccgagcuccugaacaaccaguucggcacgaugccgucccugacccucgccugccugaccaagcagggccagguggaccugaacgacgccguccaggcgcucaccgaccuggggcugaucuacacggccaaguaccccaacagcagcgaccucgaccgccugucccagagccaccccauccugaacaugaucgacaccaagaaguccagccucaacaucuccggcuacaacuucagccugggggccgccgugaaggccggcgcgugcaugcuggacggcgggaacaugcucgagaccaucaaggugagcccccagaccauggacggcauccucaaguccauccugaaggucaagaagucccuggggauguucgugagcgacacgccgggcgagcggaaccccuacgagaacauccuguacaagaucugccuguccggggacggcuggcccuacaucgccagccgcaccuccaucgugggccgggccugggagaacaccgucguggaccucgagcaggacaacaagccccagaagaucgggaacggcgggagcaacaagucccugcagagcgccggcuucgccgcggggcugaccuacucccagcucaugacgcugaaggacuucaagugcuucaaccugaucccgaacgccaagaccuggauggacaucgagggccgccccgaggaccccguggagaucgcccuguaccagcccagcuccggcugcuacguccacuucuuccgggagccgaccgaccucaagcaguucaagcaggacgccaaguacagccacgggaucgacgugaccgaccuguucgccgcgcagcccggccugacgagcgccgucaucgaggcccucccccgcaacauggugaucacgugccagggguccgaggacauccggaagcugcuggagagccagggccgccgcgacaucaagcucaucgacaucacccuguccaaggccgacagccggaaguucgagaacgccgugugggaccaguucaaggaccugugccacaugcacaccggggucgugguggagaagaagaagcgcggcggcaaggaggagaucacgccccacugcgcgcucauggacugcaucauguucgacgccgccgucuccgggggccuggacgccaaggugcugcgggugguccucccgcgcgacaugguguuccggaccagcacccccaaggugguccugugaggacuagucccuguucccagagcccacuuuuuuuucuuuuuuugaaauaaaauagccugucuuucagaucucaaaggcucuuuucagagccaccaaaaaaaaaaaaaaaaaaaaaaaaaaaaaaaaaaaaaaaaaaaaaaaaaaaaaaaaaaaaaaaaaaaaaaaaaaaaaaaaaaaaaaaaaaaaaaaaaaaaa

SEQ ID NO: 18516 - RNA, 2064 nt, Artificial Sequence
  mRNA product Design a-2 (hSL-A100) comprising derived and/or modified sequence from LASV(AV;Clade V)__CCA30315__SP-HsPLAT_NP(2-569) (opt1)
aggagaguccgcucagccagguugcagaagcggcuuagcguguguccuaaucuucucucugcguguagguaggccugugccgcaaacaagcuuaccauggacgccaugaagcgcggccugugcugcgugcuccugcugugcggggccgucuucgugagccccagcgccuccaaggaggugaaguccuuccuguggacccagagccuccgccgggagcugagcggcuacugcuccaacaucaagcugcaggucgugaaggacgcccaggcgcuccugcacgggcuggacuucagcgagguguccaacguccagcgccucaugcggaagcagcgccgggacgacagcgaccugaagcgccugcgggaccucaaccaggccgugaacaaccugguggagcugaaguccacccagcagaaguccguccuccgcgugggcacgcugagcagcgacgaccugcucacccuggccgccgaccuggagaagcucaaguccaaggugacccggaccgagcgcccccugagcuccggggucuacaugggcaaccugagcucccagcagcucgaccagcggcgcgcccugcugaaccucaucgggaugacgaacggcagccagggcucccaggcggggcgggacggcguggugcgcgucugggacgugaagaacgccgagcugcugaacaaccaguucgggaccaugccgagccucacccuggccugccugaccaagcagggccagguggaccucaacgacgucgugcaggcccugacggaccuggggcucaucuacaccgcgaaguaccccaacaccagcgaccuggaccggcugacccagucccaccccauccucaacaugaucgacacgaagaaguccagccugaacaucagcggcuacaacuucucccugggcgccgccgugaaggccggggccugcaugcucgacggcgggaacaugcuggagaccaucaaggucagcccccaguccauggacggcauccucaagagcauccugaaggugaagcgcgcgcugggcauguucguguccgacaccccgggggagcggaaccccuacgagaacauccuguacaagaucugccucagcggcgacggguggcccuacaucgccucccgcaccagcaucgucggccgggccugggagaacacggugguggaccuggagaccgacgggaagccccagaagaucggcuccggcaacagcaacaagucccugcagagcgccggguucuccgccggccucaccuacagccagcugaugacccugaaggacgcgaugcugcagcucgacccgaacgccaagacguggauggacaucgaggggcgccccgaggaccccgucgagguggcccuguaccagcccaucuccggcugcuacauccacuucuuccgggagccgaccgaccugaagcaguucaagcaggacgccaaguacagccacgggaucgacaucgccgaccucuucgcggcccagcccggccugaccagcgccgucaucgaggcccugccccgcaacauggugaucacgugccagggcuccgaggacaucaagaagcuccuggagagccaggggcgcaaggacaucaagcugaucgacaucgcccucuccaagaucgacagccggaaguucgagaacgcggugugggaccaguacaaggaccugugccacaugcacaccggcgucgugguggagaagaagaagcgcgggggcaaggaggagaucaccccgcacugcgcccugauggacugcaucauguucgacgccgccgucuccgggggccucaacacccuggugcugcgggcggugcucccccgcgacauggucuuccggaccagcacgccccgcguggugcugugaggacuagucccuguucccagagcccacuuuuuuuucuuuuuuugaaauaaaauagccugucuuucagaucucaaaggcucuuuucagagccaccaaaaaaaaaaaaaaaaaaaaaaaaaaaaaaaaaaaaaaaaaaaaaaaaaaaaaaaaaaaaaaaaaaaaaaaaaaaaaaaaaaaaaaaaaaaaaaaaaaaaa

SEQ ID NO: 18517 - RNA, 2064 nt, Artificial Sequence
  mRNA product Design a-2 (hSL-A100) comprising derived and/or modified sequence from LASV(Togo/2016/7082;Clade VI)__AMR44578__SP-HsPLAT_NP(2-569) (opt1)
aggagaguccgcucagccagguugcagaagcggcuuagcguguguccuaaucuucucucugcguguagguaggccugugccgcaaacaagcuuaccauggacgccaugaagcgcggccugugcugcgugcuccugcugugcggggccgucuucgugagccccagcaacuccaaggaggugaaguccuuccuguggacccagagccuccgccgggagcugagcggcuacugcuccaacaucaagcugcaggucgugaaggacgcccaggcccuccugcacgggcuggacuucagcgagguguccaacguccagcgccucaugcggaagcagaagcgcgacgacggcgaccugaagcggcugcgcgaccucaaccaggcggugaacaaccugguggagcucaagagcguccagcagaaguccauccugcggguggggacccugaccagcgacgaccugcucacccuggccgccgaccuggagaagcucaaguccaaggugacccgcaccgagcggccccugagcuccggcgucuacauggggaaccugagcucccagcagcucgaccagcgccgggcccugcugagcaugaucggcauguccggcgggaaccagaacagccagccgaagggcgacgggguggugcgcgucugggacgugaagaacgccgaccuccugaacaaccaguucggcacgaugcccucccugacccucgcgugccugaccaagcagggccagguggaccugaacgacgccguccaggcccucaccgaccuggggcugaucuacacggccaaguaccccaacagcagcgaccucgaccggcugucccagagccaccccauccugaacaugaucgacaccaagaaguccagccucaacaucuccggcuacaacuucagccugggggcggccaucaagaccggcgccugcaugcuggacgggggcaacaugcucgagaccaucaaggugacgccgcagaccauggacggcauccugaaguccauccugaaggugaagcgcagccucgggauguucaucuccgacacccccggcgagcggaaccccuacgagaacauccuguacaagaucugccugagcggggacggcuggcccuacaucgccucccgcaccgccaucaucgggcgggcgugggagaacacggucguggaccucgagagcgacuccaagccgcagaagaucggcagcaacggcuccaacaagagccugcaguccgccggguucgcccccggccugaccuacagccagcucaugacccugaaggacuccaugcugcagcuggaccccaacgccaagaccuggaucgacaucgaggggcgccccgaggacccgguggaggucgcccucuuccagcccaucagcggcugcuacauccacuucuuccgggagcccacggaccugaagcaguucaagcaggacgcgaaguacagccacgggaucgacgugaccgaccuguucgccgcccagcccggccucaccuccgccgugaucgaggcccugccgcgcaacaugguccugaccugccagggcagcgacgacaucaagaagcuccuggacucccaggggcggcgcgacaucaagcugaucgacgugagccucaacaagaucgacucccgcaaguucgagaacgcggucugggaccaguacaaggaccugugccacaugcacacgggcgugguggucgagaagaagaagaagggcgggaaggaggagaucacgccccacugcgcccugcucgacugcaucauguucgacgccgccgugagcgggggccugaacgccaccgugcugcgggcgguccucccccgcgacaugguguuccggaccuccagccccaaggugguccugugaggacuagucccuguucccagagcccacuuuuuuuucuuuuuuugaaauaaaauagccugucuuucagaucucaaaggcucuuuucagagccaccaaaaaaaaaaaaaaaaaaaaaaaaaaaaaaaaaaaaaaaaaaaaaaaaaaaaaaaaaaaaaaaaaaaaaaaaaaaaaaaaaaaaaaaaaaaaaaaaaaaaa

SEQ ID NO: 18518 - RNA, 2064 nt, Artificial Sequence
  mRNA product Design a-2 (hSL-A100) comprising derived and/or modified sequence from LASV(KAK-428;Clade n.d. (VII))__ANH09741__SP-HsPLAT_NP(2-569) (opt1)
aggagaguccgcucagccagguugcagaagcggcuuagcguguguccuaaucuucucucugcguguagguaggccugugccgcaaacaagcuuaccauggacgccaugaagcgcggccugugcugcgugcuccugcugugcggggccgucuucgugagccccagcaacuccaaggaggugaaguccuuccuguggacccagagccuccgccgggagcugagcggcuacugcaccaacaucaagcugcaggucgugaaggacgcccaggcccuccugcacgggcuggacuucuccgaggugagcaacguccagcgccucaugcggaagcagaagcgcgacgacaacgaccugaagcggcugcgcgaccucaaccaggcggugaacaaccugguggagcugaaguccguccagcagaaguccgugcucaaggugggcacgcugaacagcgacgaccugcucacccuggccgccgaccuggagaagcucaagagcaaggucgugcggaccgagcgcccccuguccagcgggguguacaugggcaaccuguccagccagcagcucgaccagcggcgcgcccugcugaacaugaucgggauggccggcggcucccaggggaaccagccgagccgggacggcgucgugcgcgugugggacgucaagaacgcggaccuccugaacaaccaguucgggaccaugcccucccugacgcucgccugccugaccaagcagggccagguggaccugaacgacgugguccucgcccugaccgaccuggggcucaucuacaccgccaaguaccccaacagcuccgaccuggaccggcugagccagaaccaccccgugcucaacaugaucgacgugaacaagagcucccugaacaucagcggcuacaacuucucccugggcgcggccgucaaggccggggccugcaugcucgacggcgggaacaugcuggagacgaucaagaucagcccgcagaccguggacggcauccugaaguccauccucaaggugaagcgcgcccugggcauguucgucagcgacacccccggggagcggaaccccuacgagaacauccuguacaaggugugccucuccggcaacggguggcccuacaucgcgagccgcaccuccaucgucggccgggccugggagaacacggugguggaccuggagagcaacaagaaccagccgaaggucgggaacaacggcuccaacaagaugcugcagagcuccggcuucgccaccgggcucaccuacagccagcugaugacccugcgcgacuccaugcugcagcucgaccccacggccaagaccuggaucgacaucgagggccggcccgaggaccccguggagcuggcccuguuccagccgagcuccgggugcuacauccacuucuuccgcgagcccaccgaccucaagcaguucaagcaggacgcgaaguacagccacggcaucgacgugaacgaccuguucuccgcccagcccgggcugaccagcgccguccucgaggcccugccccggaacauggugcugacgugccagggcagcgacgacauccgcaagcuccuggacucccaggaccgcaaggacaucaagcugaucgacaucagccucuccaaggccgacgcgcggaaguucgagaacgacgugugggaccaguucaaggaccugugccacaugcacaccggcaucgucguggagaagaagaagaagggcgggaagcaggagaugaccccgcacugcgcccugcucgacugcaucauguucgacgccgccgugagcgggggccugaacguccccacccugcgcgccgugcuccccacggacaugguguuccggaccaucaccaccaaggucgugcugugaggacuagucccuguucccagagcccacuuuuuuuucuuuuuuugaaauaaaauagccugucuuucagaucucaaaggcucuuuucagagccaccaaaaaaaaaaaaaaaaaaaaaaaaaaaaaaaaaaaaaaaaaaaaaaaaaaaaaaaaaaaaaaaaaaaaaaaaaaaaaaaaaaaaaaaaaaaaaaaaaaaaa

SEQ ID NO: 18519 - RNA, 2064 nt, Artificial Sequence; identical to SEQ ID NO: 18513
  mRNA product Design a-2 (hSL-A100) comprising derived and/or modified sequence from LASV(Pinneo-NIG-1969;Clade I)__AIT17837__SP-HsPLAT_NP(2-569) (opt1)

SEQ ID NO: 18520 - RNA, 2064 nt, Artificial Sequence
  mRNA product Design a-2 (hSL-A100) comprising derived and/or modified sequence from LASV(ISTH0009-NIG-2011;Clade II)__AIT17405__SP-HsPLAT_NP(2-569) (opt1)
aggagaguccgcucagccagguugcagaagcggcuuagcguguguccuaaucuucucucugcguguagguaggccugugccgcaaacaagcuuaccauggacgccaugaagcgcggccugugcugcgugcuccugcugugcggggccgucuucgugagccccagcguguccaaggaggucaagagcuuccuguggacccagucccuccgccgggagcugagcggcuacugcuccaacaucaagcuccagguggugaaggacgcccaggcccugcugcacgggcuggacuucagcgaggucuccaacgugcagcgccucaugcggaagcagaagcgcgacgacagcgaccugaagcggcugcgcgaccucaaccaggcggugaacaaccuggucgagcugaaguccacccagcagaaguccauccuccgggugggcacccugaccagcgacgaccugcucacccuggccgccgaccuggagaagcucaagagcaaggugauccgcaccgagcggccccuguccagcggggucuacaugggcaaccuguccacgcagcagcucgagcagcgccgggcccugcugaacaugaucgggauggugggcggcgcccaggggacccagccgggccgcgacggggugguccgggugugggacgugaagaaccccgaccuccugaacaaccaguucggcaccaugcccagccugacccucgcgugccugacgaagcaggggcaggucgaccugaacgacgccgugcucgcccugaccgaccugggccucaucuacaccgccaaguaccccaacuccagcgaccuggaccgccugucccagagccacccgauccucaacaugguggacaucaagaaguccagccugaacaucagcggcuacaacuucucccugggggcggccgucaaggccggcgccugcaugcucgacgggggcaacaugcuggagaccaucaaggugacgccccagaccauggacggcauccucaagagcauccugaaggugaagcggucccuggggauguucgucagcgacacccccggcgagcgcaaccccuacgagaacauccuguacaagaucugccucuccggggacggcuggccguacaucgccagccggaccuccaucguggggcgcgcgugggagaacacgaccguggaccuggagagcgacggcaagccccagaaggucggcuccgccgggagcaacaagucccugcagagcgccggcuuccccaccgggcucaccuacucccagcugaugacgcugaaggacagcaugaugcagcuggaccccuccgccaagaccuggaucgacaucgagggccggccggaggaccccguggagaucgcccucuaccagcccaugagcgggugcuacauccacuucuuccgcgagcccaccgaccugaagcaguucaagcaggacgcgaaguacucccacggcaucgacgucgccgaccuguucccggcccagcccggccucaccagcgccgugaucgaggcccugccccggaacauggugcugacgugccaggggagcgacgacaucaagcgccuccuggacucccagggccgccgggacaucaagcugaucgacaucgcgcucagcaaggccgacucccgccgguucgagaacgccgucugggaccagugcaaggaccugugccacaugcacaccggggugguggucgagaagaagaagcgcggcgggaaggaggagaucacgccccacugcgcccugauggacugcaucauguacgacgccgcggugagcggcggccucaacaucccggugcugcgggccguccugccccgcgacaugguguuccggaccuccagccccaaggugguccucugaggacuagucccuguucccagagcccacuuuuuuuucuuuuuuugaaauaaaauagccugucuuucagaucucaaaggcucuuuucagagccaccaaaaaaaaaaaaaaaaaaaaaaaaaaaaaaaaaaaaaaaaaaaaaaaaaaaaaaaaaaaaaaaaaaaaaaaaaaaaaaaaaaaaaaaaaaaaaaaaaaaaa

SEQ ID NO: 18521 - RNA, 2064 nt, Artificial Sequence
  mRNA product Design a-2 (hSL-A100) comprising derived and/or modified sequence from LASV(ISTH2010-NIG-2012;Clade II)__AIT17483__SP-HsPLAT_NP(2-569) (opt1)
aggagaguccgcucagccagguugcagaagcggcuuagcguguguccuaaucuucucucugcguguagguaggccugugccgcaaacaagcuuaccauggacgccaugaagcgcggccugugcugcgugcuccugcugugcggggccgucuucgugagccccagcgccuccaaggaggugaaguccuuccuguggacccagagccuccgccgggagcugagcggcuacugcuccaacaucaagcugcaggucgugaaggacgcccaggcgcuccugcacgggcuggacuucagcgagguguccaacguccagcgccucaugcggaagcagaagcgcgacgacagcgaccugaagcggcugcgcgaccucaaccaggccgugaacaaccugguggagcugaaguccacccagcagaaguccauccuccgggucggcacgcugaccagcgacgaccugcucacccuggccgccgaccuggagaagcucaagagcaaggugauccgcaccgagcggccccuguccagcgggguguacaugggcaaccuguccacgcagcagcucgagcagcgccgggcccugcugaaccucaucgggauggucggcggcgcgcaggggacccagccgggccgcgacgggguggugcgggucugggacgugaagaaccccgaccugcugaacaaccaguucggcaccaugcccagccucacccuggccugccugacgaagcagggccagguggaccucaacgacgccguccuggcccugaccgaccucgggcugaucuacaccgcgaaguaccccaacuccagcgaccuggaccgccucucccagagccacccgauccugaacaugguggacaccaagaaguccagccugaacaucagcggcuucaacuucucccucggggccgccgugaaggccggcgccugcaugcuggacgggggcaacaugcuggagacgaucaaggucacgccccagaccauggacggcauccucaagagcauccugaaggugaagaagucccuggggauguucgugagcgacacccccggcgagcggaaccccuacgagaacauccucuacaagaucugccuguccggggacggcuggccguacaucgcgagccgcaccuccaucgucgggcgggccugggagaacaccaccguggaccuggagagcgacggcaagccccacaaggugggcaccgccggguccaacaagagccuccaguccgccggcuuccccacggggcugaccuacagccagcugaugacccugaaggacuccaugaugcagcucgaccccagcgccaagaccuggaucgacaucgagggccgcccggaggaccccgucgagaucgcgcuguaccagcccauguccgggugcuacauccacuucuuccgggagcccacggaccugaagcaguucaagcaggacgccaaguacagccacggcaucgacguggccgaccucuucccggcccagcccggccugaccuccgccgucaucgaggcgcugccccgcaacauggugcugaccugccaggggagcgacgacaucaagcggcuccuggacagccagggccgccgcgacaucaagcucaucgacaucgcccuguccaaggccgacagccggcgcuucgagaacgccgugugggaccagugcaaggaccugugccacaugcacaccggggucgugguggagaagaagaagcggggcgggaaggaggagaucacgccccacugcgcccucauggacugcaucauguacgacgcggccgucuccggcggccugaacaucccggugcugcgcgccgugcucccccgggacauggucuuccgcaccagcucccccaagguggugcugugaggacuagucccuguucccagagcccacuuuuuuuucuuuuuuugaaauaaaauagccugucuuucagaucucaaaggcucuuuucagagccaccaaaaaaaaaaaaaaaaaaaaaaaaaaaaaaaaaaaaaaaaaaaaaaaaaaaaaaaaaaaaaaaaaaaaaaaaaaaaaaaaaaaaaaaaaaaaaaaaaaaaa

SEQ ID NO: 18522 - RNA, 2064 nt, Artificial Sequence
  mRNA product Design a-2 (hSL-A100) comprising derived and/or modified sequence from LASV(Lassa virus/H.sapiens-wt/NGA/2015/ISTH_0543;Clade II)__AVO03640__SP-HsPLAT_NP(2-569) (opt1)
aggagaguccgcucagccagguugcagaagcggcuuagcguguguccuaaucuucucucugcguguagguaggccugugccgcaaacaagcuuaccauggacgccaugaagcgcggccugugcugcgugcuccugcugugcggggccgucuucgugagccccagcgccuccaaggaggugaaguccuuccuguggacccagagccuccgccgggagcugagcggcuacugcuccaacaucaagcugcaggucgugaaggacgcccaggcgcuccugcacgggcuggacuucagcgagguguccaacguccagcgccucaugcggaagcagaagcgcgacgacagcgaccugaagcggcugcgcgaccucaaccaggccgugaacaaccugguggagcugaaguccacccagcagaaguccauccuccgggucggcacgcugaccagcgacgaccugcucacccuggccgccgaccuggagaagcucaagagcaaggugauccgcaccgagcggccccuguccagcgggguguacaugggcaaccuguccacgcagcagcucgagcagcgccgggcccugcugaacaugaucgggauggucggcggcgcgcaggggacccagccgggccgcgacgggguggugcgggucugggacgugaagaaccccgaccuccugaacaaccaguucggcaccaugcccagccugacccucgccugccugacgaagcagggccagguggaccugaacgacgccguccucgcccugaccgaccuggggcucaucuacaccgcgaaguaccccaacuccagcgaccuggaccgccugucccagagccacccgauccucaacaugguggacaccaagaaguccagccugaacaucagcggcuacaacuucucccugggggccgccgugaaggccggcgccugcaugcucgacgggggcaacaugcuggagacgaucaaggucacgccccagaccauggacggcauccucaagagcauccugaaggugaagaagucccuggggauguucgugagcgacacccccggcgagcggaaccccuacgagaacauccuguacaagaucugccucuccggggacggcuggccguacaucgcgagccgcaccuccaucgucgggcgggccugggagaacaccaccguggaccuggagagcgacggcaagccccagaaggugggcuccgccgggagcaacaagucccugcagagcgccggcuuccccaccgggcucacguacucccagcugaugacccugaaggacagcaugaugcagcuggaccccuccgccaagaccuggaucgacaucgagggccgcccggaggaccccgucgagaucgcgcucuaccagcccaugagcgggugcuacauccacuucuuccgggagcccaccgaccugaagcaguucaagcaggacgccaaguacucccacggcaucgacguggccgaccuguucccggcccagcccggccucacgagcgccgucaucgaggcgcugccccgcaacauggugcugaccugccaggggagcgacgacaucaagcggcuccuggacucccagggccgcaaggacaucaagcugaucgacaucgcccucagcaaggccgacucccgccgguucgagaacgccgugugggaccagugcaaggaccugugccacaugcacaccggggucgugguggagaagaagaagcgcggcgggaaggaggagaucacgccccacugcgcccugauggacugcaucauguacgacgcggccgucagcggcggccucaacaucccggugcugcgggccgugcugccccgcgacauggucuuccggaccuccagccccaagguggugcucugaggacuagucccuguucccagagcccacuuuuuuuucuuuuuuugaaauaaaauagccugucuuucagaucucaaaggcucuuuucagagccaccaaaaaaaaaaaaaaaaaaaaaaaaaaaaaaaaaaaaaaaaaaaaaaaaaaaaaaaaaaaaaaaaaaaaaaaaaaaaaaaaaaaaaaaaaaaaaaaaaaaaa

SEQ ID NO: 18523 - RNA, 2064 nt, Artificial Sequence
  mRNA product Design a-2 (hSL-A100) comprising derived and/or modified sequence from LASV(Lassa virus/H.sapiens-wt/NGA/2016/ISTH_0009;Clade II)__AVO03572__SP-HsPLAT_NP(2-569) (opt1)
aggagaguccgcucagccagguugcagaagcggcuuagcguguguccuaaucuucucucugcguguagguaggccugugccgcaaacaagcuuaccauggacgccaugaagcgcggccugugcugcgugcuccugcugugcggggccgucuucgugagccccagcgccuccaaggaggugaaguccuuccuguggacccagagccuccgccgggagcugagcggcuacugcuccaacaucaagcugcaggucgugaaggacgcccaggcgcuccugcacgggcuggacuucagcgagguguccaacguccagcgccucaugcggaagcagaagcgcgacgacagcgaccugaagcggcugcgcgaccucaaccaggccgugaacaaccugguggagcugaaguccacccagcagaaguccauccuccgggucggcacgcugaccagcgacgaccugcucacccuggccgccgaccuggagaagcucaagagcaaggugauccgcaccgagcggccccuguccagcgggguguacaugggcaaccuguccacgcagcagcucgagcagcgccgggcccugcugaacaugaucgggauggucggcggcgcgcaggggacccagccgggccgcgacgggguggugcgggucugggacgugaagaaccccgaccuccugaacaaccaguucggcaccaugcccagccugacccucgccugccugacgaagcagggccagguggaccugaacgacgccguccucgcccugaccgaccuggggcucaucuacaccgcgaaguaccccaacuccagcgaccuggaccgccugucccagagccacccgauccucaacaugguggacaccaagaaguccagccugaacaucagcggcuacaacuucucccugggggccgccgugaaggccggcgccugcaugcucgacgggggcaacaugcuggagacgaucaaggucacgccccagaccauggacggcauccucaagagcauccugaaggugaagaagucccuggggauguucgugagcgacacccccggcgagcggaaccccuacgagaacauccuguacaagaucugccucuccggggacggcuggccguacaucgcgagccgcaccuccaucgucgggcgggccugggagaacaccaccguggaccuggagagcgacggcaagccccagaaggugggcuccgccgggagcaacaagucccugcagagcgccggcuuccccaccgggcucacguacucccagcugaugacccugaaggacagcaugaugcagcuggaccccuccgccaagaccuggaucgacaucgagggccgcccggaggaccccgucgagaucgcgcucuaccagcccaugagcgggugcuacauccacuucuuccgggagcccaccgaccugaagcaguucaagcaggacgccaaguacucccacggcaucgacguggccgaccuguucccggcccagcccggccucacgagcgccgucaucgaggcgcugccccgcaacauggugcugaccugccaggggagcgacgacaucaagcggcuccuggacucccagggccgccgcgacaucaagcugaucgacaucgcccucagcaaggccgacucccggcgcuucgagaacgccgugugggaccagugcaaggaccugugccacaugcacaccggggucgugguggagaagaagaagcggggcgggaaggaggagaucacgccccacugcgcccugauggacugcaucauguacgacgcggccgucagcggcggccucaacaucccggugcugcgcgccgugcugccccgggacauggucuuccgcaccuccagccccaagguggugcucugaggacuagucccuguucccagagcccacuuuuuuuucuuuuuuugaaauaaaauagccugucuuucagaucucaaaggcucuuuucagagccaccaaaaaaaaaaaaaaaaaaaaaaaaaaaaaaaaaaaaaaaaaaaaaaaaaaaaaaaaaaaaaaaaaaaaaaaaaaaaaaaaaaaaaaaaaaaaaaaaaaaaa

SEQ ID NO: 18524 - RNA, 2064 nt, Artificial Sequence
  mRNA product Design a-2 (hSL-A100) comprising derived and/or modified sequence from LASV(Lassa virus/H.sapiens-wt/NGA/2016/ISTH_0017;Clade II)__AVO03568__SP-HsPLAT_NP(2-569) (opt1)
aggagaguccgcucagccagguugcagaagcggcuuagcguguguccuaaucuucucucugcguguagguaggccugugccgcaaacaagcuuaccauggacgccaugaagcgcggccugugcugcgugcuccugcugugcggggccgucuucgugagccccagcgccuccaaggaggugaaguccuuccuguggacccagagccuccgccgggagcugagcggcuacugcuccagcaucaagcugcaggucgugaaggacgcccaggcgcuccugcacgggcuggacuucuccgaggugagcaacguccagcgccucaugcggaagcagaagcgcgacgacuccgaccugaagcggcugcgcgaccucaaccaggccgugaacaaccugguggagcucaagagcacccagcagaaguccauccugcgggucggcacgcugaccagcgacgaccugcucacccuggccgccgaccuggagaagcucaaguccaaggugauccgcaccgagcggccccugagcuccgggguguacaugggcaaccugagcacgcagcagcucgagcagcgccgggcccugcugaacaugaucgggauggcgggcggcgcccaggggacccagccgggccgcgacggggucgugcgggugugggacgucaagaaccccgaccuccugaacaaccaguucggcaccaugcccucccugacccucgccugccugacgaagcagggccagguggaccugaacgacgccgugcucgcgcugaccgaccuggggcucaucuacaccgccaaguaccccaacagcuccgaccuggaccgccugagccagagccacccgauccucaacauggucgacaccaagaaguccagccugaacaucuccggcuacaacuucagccugggggccgccgugaaggccggcgcgugcaugcucgacgggggcaacaugcuggagacgaucaaggugacgccccagaccauggacggcauccugaaguccauccucaaggucaagcggagccuggggauguucguguccgacgcccccggcgagcgcaaccccuacgagaacauccuguacaagaucugccucagcggggacggcuggccguacaucgccucccggaccagcaucguggggcgcgccugggagaacaccaccgucgaccuggaguccgacggcaagccccagaaggugggcgccaccgggagcaacaagucccugcagagcgcgggcuuccccaccgggcucacguacucccagcugaugacccugaaggacagcaugaugcagcuggaccccuccgccaagaccuggaucgacaucgagggccggccggaggaccccguggaggucgcccucuaccagcccgugagcgggugcuacauccacuucuuccgcgagcccaccgaccugaagcaguucaagcaggacgccaaguacucccacggcaucgacgucgccgaccuguucccggcgcagcccggccucacgagcgccgugaucgaggcccugccccggaacauggugcugaccugccaggggagcgacgacaucaagaagcuccuggacucccagggccgcaaggacaucaagcugaucgacaucgcccucagcaaggccgacucccgccgguucgagaacgcggucugggaccagugcaaggaccugugccacaugcacaccggggugguggucgagaagaagaagcgcggcgggaaggaggagaucacgccccacugcgcccugauggacugcaucauguacgacgccgccgugagcggcggccucaacaucccggugcugcgggcgguccugccccgcgacaugguguuccggaccuccagccccaaggugguccucugaggacuagucccuguucccagagcccacuuuuuuuucuuuuuuugaaauaaaauagccugucuuucagaucucaaaggcucuuuucagagccaccaaaaaaaaaaaaaaaaaaaaaaaaaaaaaaaaaaaaaaaaaaaaaaaaaaaaaaaaaaaaaaaaaaaaaaaaaaaaaaaaaaaaaaaaaaaaaaaaaaaaa

SEQ ID NO: 18525 - RNA, 2064 nt, Artificial Sequence
  mRNA product Design a-2 (hSL-A100) comprising derived and/or modified sequence from LASV(Lassa virus/H.sapiens-wt/NGA/2018/ISTH_0959;Clade II)__AVV65100__SP-HsPLAT_NP(2-569) (opt1)
aggagaguccgcucagccagguugcagaagcggcuuagcguguguccuaaucuucucucugcguguagguaggccugugccgcaaacaagcuuaccauggacgccaugaagcgcggccugugcugcgugcuccugcugugcggggccgucuucgugagccccagcgccuccaaggaggugaaguccuuccuguggacccagagccuccgccgggagcugagcggcuacugcuccaacaucaagcugcaggucgugaaggacgcccaggcgcuccugcacgggcuggacuucagcgagguguccaacguccagcgccucaugcggaagcagaagcgcgacgacagcgaccugaagcggcugcgcgaccucaaccaggccgugaacaaccugguggagcugaaguccacccagcagaaguccauccuccgggucggcacccugaccagcgacgaccugcucacccuggccgccgaccuggagaagcucaagagcaaggugauccgcaccgagcggccccuguccagcgggguguacaugggcaaccuguccacgcagcagcucgagcagcgccgggcccugcugaaccucaucgggauggucggcggcgcgcaggggacccagccgggccgcgacgggguggugcgggucugggacgugaagaaccccgaccugcugaacaaccaguucggcaccaugcccagccucacccuggccugccugacgaagcagggccagguggaccucaacgacgucgugcuggcccugaccgaccucgggcugaucuacaccgccaaguaccccaacuccagcgaccuggaccgccucucccagagccacccgauccugaacaugguggacaccaagaaguccagccugaacaucagcggcuucaacuucucccucggggcggccgucaaggccggcgccugcaugcuggacgggggcaacaugcuggagacgaucaaggugacgccccagaccauggacggcauccucaagagcauccugaaggugaagaagucccuggggauguucgucagcgacacccccggcgagcggaaccccuacgagaacauccucuacaagaucugccuguccggggacggcuggccguacaucgccagccgcaccuccaucguggggcgggcgugggagaacaccaccguggaccuggagagcgacggcaagccccacaaggucggcaccgccggguccaacaagagccuccaguccgccggcuuccccacggggcugaccuacagccagcugaugacccugaaggacuccaugaugcagcucgaccccagcgccaagaccuggaucgacaucgagggccgcccggaggaccccguggagaucgcccuguaccagcccauguccgggugcuacauccacuucuuccgggagcccacggaccugaagcaguucaagcaggacgcgaaguacagccacggcaucgacgucgccgaccucuucccggcccagcccggccugaccuccgccgugaucgaggcccugccccgcaacauggugcugaccugccaggggagcgacgacaucaagcggcuccuggacagccagggccgcaaggacaucaagcucaucgacaucgcgcuguccaagaccgacagccgccgguucgagaacgccgucugggaccagugcaaggaccugugccacaugcacacgggggugguggucgagaagaagaagcgcggcgggaaggaggagaucacgccccacugcgcccucauggacugcaucauguacgacgccgccguguccggcggccugaacaucccggugcugcgggcgguccucccccgcgacaugguguuccggaccagcucccccaaggugguccugugaggacuagucccuguucccagagcccacuuuuuuuucuuuuuuugaaauaaaauagccugucuuucagaucucaaaggcucuuuucagagccaccaaaaaaaaaaaaaaaaaaaaaaaaaaaaaaaaaaaaaaaaaaaaaaaaaaaaaaaaaaaaaaaaaaaaaaaaaaaaaaaaaaaaaaaaaaaaaaaaaaaaa

SEQ ID NO: 18526 - RNA, 2064 nt, Artificial Sequence
  mRNA product Design a-2 (hSL-A100) comprising derived and/or modified sequence from LASV(LASV003-NIG-2008;Clade II)__AIT17581__SP-HsPLAT_NP(2-569) (opt1)
aggagaguccgcucagccagguugcagaagcggcuuagcguguguccuaaucuucucucugcguguagguaggccugugccgcaaacaagcuuaccauggacgccaugaagcgcggccugugcugcgugcuccugcugugcggggccgucuucgugagccccagcgccuccaaggaggugaaguccuuccuguggacccagagccuccgccgggagcugagcggcuacugcuccagcaucaagcugcaggucgugaaggacgcccaggcgcuccugcacgggcuggacuucuccgaggugagcaacguccagcgccucaugcggaagcagaagcgcgacgacuccgaccugaagcggcugcgcgaccucaaccaggccgugaacaaccugguggagcucaagagcacccagcagaaguccguccugcgggugggcacccugaccagcgacgaccugcucacccuggccgccgaccuggagaagcucaaguccaaggugauccgcaccgagcggccccugagcuccggggucuacaugggcaaccugagcgcccagcagcucgagcagcgccggacgcugcugaacaugaucgggauggugggcggcgcgcaggggacccagccgggccgcgacggggugguccgggugugggacgugaagaaccccgaccuccugaacaaccaguucggcaccaugcccucccugacccucgccugccugacgaagcaggggcaggucgaccugaacgacguggugcucgcccugaccgaccugggccucaucuacaccgccaaguaccccaacagcuccgaccuggaccgccugagccagagccacccgauccucuccauggucgacaccaagaaguccagccugaacaucagcggcuacaacuucucccugggggcggccgugaaggccggcgccugcaugcucgacgggggcaacaugcuggagacgaucaaggugacgccccagaccauggacggcauccucaagagcauccugaaggucaagaagucccuggggauguucgugagcgacacccccggcgagcggaaccccuacgagaacauccuguacaagaucugccucuccggggacggcuggccguacaucgccagccgcaccuccaucguggggcgggcgugggagaacaccaccgucgaccuggagagcgacggcaagccccagaaggugggcaccgccggguccaacaagagccugcaguccgccggcuuccccacggggcucaccuacagccagcugaugacccugaaggacuccaugaugcagcuggaccccagcgccaagaccuggaucgacaucgagggccgcccggaggaccccgucgagaucgcccucuaccagcccauguccgggugcuacauccacuucuuccgggagcccacggaccugaagcaguucaagcaggacgcgaaguacagccacggcaucgacgugaccgaccuguucccggcccagcccggccucaccagcgccgugaucgaggcccugccccgcaacaugguccugaccugccagggguccgacgacaucaagcggcuccuggacagccagggccgccgcgacaucaagcugaucgacaucgcccucuccaaggcggacagccggcgcuucgagaacgccgugugggaccagugcaaggaccugugccacaugcacacggggguggucguggagaagaagaagcggggcgggaaggaggagaucacgccccacugcgcccugauggacugcaucauguacgacgccgccguguccggcggccucaacaucccgguccugcgcgcggugcugccccgggacaugguguuccgcaccagcucccccaaggucgugcucugaggacuagucccuguucccagagcccacuuuuuuuucuuuuuuugaaauaaaauagccugucuuucagaucucaaaggcucuuuucagagccaccaaaaaaaaaaaaaaaaaaaaaaaaaaaaaaaaaaaaaaaaaaaaaaaaaaaaaaaaaaaaaaaaaaaaaaaaaaaaaaaaaaaaaaaaaaaaaaaaaaaaa

SEQ ID NO: 18527 - RNA, 2064 nt, Artificial Sequence
  mRNA product Design a-2 (hSL-A100) comprising derived and/or modified sequence from LASV(LASV035-NIG-2009;Clade II)__AIT17589__SP-HsPLAT_NP(2-569) (opt1)
aggagaguccgcucagccagguugcagaagcggcuuagcguguguccuaaucuucucucugcguguagguaggccugugccgcaaacaagcuuaccauggacgccaugaagcgcggccugugcugcgugcuccugcugugcggggccgucuucgugagccccagcgccuccaaggaggugaaguccuuccuguggacccagagccuccgccgggagcugagcggcuacugcuccagcaucaagcugcaggucgugaaggacgcccaggcgcuccugcacgggcuggacuucuccgaggugagcaacguccagcgccucaugcggaagcagaagcgcgacgacuccgaccugaagcggcugcgcgaccucaaccaggccgugaacaaccugguggagcucaagagcacccagcagaaguccauccugcgggucggcacgcugaccagcgacgaccugcucacccuggccgccgaccuggagaagcucaaguccaaggugauccgcaccgagcggccccugagcuccgggguguacaugggcaaccugagcgcccagcagcucgagcagcgccgggcgcugcugaacaugaucgggauggucggcggcgcccaggggacgcagccgggccgcgacgggguggugcgggucugggacgugaagaaccccgaccuccugaacaaccaguucggcaccaugcccucccugacccucgccugccugaccaagcagggccagguggaccugaacgacgccguccucgcgcugacggaccuggggcucaucuacaccgccaaguaccccaacagcuccgaccuggaccgccugagccagagccacccgauccucaacaugguggacaccaagaaguccagccugaacaucuccggcuacaacuucagccugggggccgccgugaaggccggcgcgugcaugcucgacgggggcaacaugcuggagaccaucaaggucacgccccagaccauggacggcauccugaaguccauccucaaggugaagcggagccuggggauguucguguccgacacccccggcgagcgcaaccccuacgagaacauccuguacaagaucugccucagcggggacggcuggccguacaucgccucccggaccagcaucgucgggcgcgccugggagaacacgaccguggaccuggaguccgacggcaagccccagaaggugggcaccaccgggagcaacaagucccugcagagcgccggcuuccccacggggcucaccuacucccagcugaugacccugaaggacagcaugaugcagcuggaccccuccgccaagaccuggaucgacaucgagggccggccggaggaccccgucgagaucgcgcucuaccagcccaugagcgggugcuacauccacuucuuccgcgagcccacggaccugaagcaguucaagcaggacgccaaguacucccacggcaucgacguggccgaccuguucccggcccagcccggccucaccagcgccgucaucgaggcgcugccccggaacauggugcugaccugccaggggagcgacgacaucaagaagcuccuggacucccagggccgccgcgacaucaagcugaucgacaucgcccucagcaaggccgacucccggaaguucgagaacgccgugugggaccagugcaaggaccugugccacaugcacaccggggucgugguggagaagaagaagcgcggcgggaaggaggagaucacgccccacugcgcccugauggacugcaucauguacgacgcggccgucagcggcggccucaacaucccggugcugcgggccgugcugccccgcgacauggucuuccggaccuccagccccaagguggugcucugaggacuagucccuguucccagagcccacuuuuuuuucuuuuuuugaaauaaaauagccugucuuucagaucucaaaggcucuuuucagagccaccaaaaaaaaaaaaaaaaaaaaaaaaaaaaaaaaaaaaaaaaaaaaaaaaaaaaaaaaaaaaaaaaaaaaaaaaaaaaaaaaaaaaaaaaaaaaaaaaaaaaa

SEQ ID NO: 18528 - RNA, 2064 nt, Artificial Sequence
  mRNA product Design a-2 (hSL-A100) comprising derived and/or modified sequence from LASV(LASV1000-NIG-2009;Clade II)__AIT17783__SP-HsPLAT_NP(2-569) (opt1)
aggagaguccgcucagccagguugcagaagcggcuuagcguguguccuaaucuucucucugcguguagguaggccugugccgcaaacaagcuuaccauggacgccaugaagcgcggccugugcugcgugcuccugcugugcggggccgucuucgugagccccagcgccuccaaggaggugaaguccuuccuguggacccagagccuccgccgggagcugagcggcuacugcuccaacaucaagcugcaggucgugaaggacgcccaggcgcuccugcacgggcuggacuucagcgagguguccaacguccagcgccucaugcggaagcagaagcgcgacgacagcgaccugaagcggcugcgcgaccucaaccaggccgugaacaaccugguggagcugaaguccacccagcagaaguccauccuccgggucggcacgcugaccagcgacgaccugcucacccuggccgccgaccuggagaagcucaagagcaaggugauccgcaccgagcggccccuguccagcgggguguacaugggcaaccuguccacgcagcagcucgagcagcgccgggcccugcugaacaugaucgggauggucggcggcgcgcaggggacccagccgggccgcgacgggguggugcgggucugggacgugaagaaccccgaccuccugaacaaccaguucggcaccaugcccagccugacccucgccugccugacgaagcagggccagguggaccugaacgacgucgugcucgcccugaccgaccuggggcucaucuacaccgccaaguaccccaacuccagcgaccuggaccgccugucccagagccacccgauccucaacaugguggacaccaagaaguccagccugaacaucagcggcuacaacuucucccugggggcggccgucaaggccggcgccugcaugcucgacgggggcaacaugcuggagacgaucaaggugacgccccagaccauggacggcauccucaagagcauccugaaggugaagaagucccuggggauguucgucagcgacacccccggcgagcggaaccccuacgagaacauccuguacaagaucugccucuccggggacggcuggccguacaucgccagccgcaccuccaucguggggcgggcgugggagaacaccaccguggaccuggagagcgacggcaagccccagaaggucggcaccgccggguccaacaagagccugcaguccgccggcuuccccacggggcucaccuacagccagcugaugacccugaaggacuccaugaugcagcuggaccccagcgccaagaccuggaucgacaucgagggccgcccggaggaccccguggagaucgcccucuaccagcccgucuccgggugcuacauccacuucuuccgggagcccacggaccugaagcaguucaagcaggacgcgaaguacagccacggcaucgacguggccgaccuguucccggcccagcccggccucaccuccgccgugaucgaggcccugccccgcaacaugguccugaccugccaggggagcgacgacaucaagcggcuccuggacagccagggccgccgcgacaucaagcugaucgacaucgcgcucuccaaggccgacagccggcgcuucgagaacgccgugugggaccagugcaaggaccugugccacaugcacaccgggguggucguggagaagaagaagcggggcgggaaggaggagaucacgccccacugcgcccugauggacugcaucauguacgacgccgcgguguccggcggccucaacaucccgguccugcgcgccgugcugccccgggacaugguguuccgcaccagcucccccaaggucgugcucugaggacuagucccuguucccagagcccacuuuuuuuucuuuuuuugaaauaaaauagccugucuuucagaucucaaaggcucuuuucagagccaccaaaaaaaaaaaaaaaaaaaaaaaaaaaaaaaaaaaaaaaaaaaaaaaaaaaaaaaaaaaaaaaaaaaaaaaaaaaaaaaaaaaaaaaaaaaaaaaaaaaaa

SEQ ID NO: 18529 - RNA, 2064 nt, Artificial Sequence
  mRNA product Design a-2 (hSL-A100) comprising derived and/or modified sequence from LASV(LASV221-NIG-2010;Clade II)__AIT17625__SP-HsPLAT_NP(2-569) (opt1)
aggagaguccgcucagccagguugcagaagcggcuuagcguguguccuaaucuucucucugcguguagguaggccugugccgcaaacaagcuuaccauggacgccaugaagcgcggccugugcugcgugcuccugcugugcggggccgucuucgugagccccagcgccuccaaggaggugaaguccuuccuguggacccagagccuccgccgggagcugagcggcuacugcuccagcaucaagcugcaggucgugaaggacgcccaggcgcuccugcacgggcuggacuucuccgaggugagcaacguccagcgccucaugcggaagcagcgccgggacgacuccgaccugaagcgccugcgggaccucaaccaggccgugaacaaccugguggagcucaagagcacccagcagaaguccauccugcgcgucggcacgcugaccagcgacgaccugcucacccuggccgccgaccuggagaagcucaaguccaaggugauccggaccgagcgcccccugagcuccgggguguacaugggcaaccugagcacgcagcagcucgagcagcggcgcgcccugcugaacaugaucgggauggucggcggcgcgcaggggacccagccgggccgggacgggguggugcgcgucugggacgugaagaaccccgaccuccugaacaaccaguucggcaccaugcccucccugacccucgccugccugacgaagcagggccagguggaccugaacgacgccguccucgcccugaccgaccuggggcucaucuacaccgcgaaguaccccaacagcuccgaccuggaccggcugagccagagccacccgauccucaacaugguggacaccaagaaguccagccugaacaucuccggcuacaacuucagccugggggccgccgugaaggccggcgccugcaugcucgacgggggcaacaugcuggagacgaucaaggucacgccccagaccguggacggcauccugaaguccauccucaaggugaagcgcagccuggggauguucgucuccgacacccccggcgagcggaaccccuacgagaacauccuguacaagaucugccucagcggggacggcuggccguacaucgcgucccgcaccagcaucguggggcgggccugggagaacaccaccguggaccuggaguccgacggcaagccccagaaggucggcaccgccgggagcaacaagucccugcagagcgccggcuuccccacggggcucaccuacucccagcugaugacccugaaggacagcaugaugcagcuggaccccuccgccaagaccuggaucgacaucgagggccgcccggaggaccccguggagaucgcgcucuaccagcccaugagcgggugcuacauccacuucuuccgggagcccacggaccugaagcaguucaagcaggacgccaaguacucccacggcaucgacgucgccgaccuguucccggcccagcccggccucaccagcgccgugaucgaggcgcugccccgcaacauggugcugaccugccaggggagcgacgacaucaagcgccuccuggacucccagggccggcgcgacaucaagcugaucgacaucgcccucagcaaggccgacucccggaaguucgagaacgccgucugggaccagugcaaggaccugugccacaugcacaccggggugguggucgagaagaagaagcgcggcgggaaggaggagaucacgccccacugcgcccugauggacugcaucauguacgacgcggccgugagcggcggccucaacaucccggugcugcgggccguccugccccgcgacaugguguuccggaccuccagccccaaggugguccucugaggacuagucccuguucccagagcccacuuuuuuuucuuuuuuugaaauaaaauagccugucuuucagaucucaaaggcucuuuucagagccaccaaaaaaaaaaaaaaaaaaaaaaaaaaaaaaaaaaaaaaaaaaaaaaaaaaaaaaaaaaaaaaaaaaaaaaaaaaaaaaaaaaaaaaaaaaaaaaaaaaaaa

SEQ ID NO: 18530 - RNA, 2064 nt, Artificial Sequence
  mRNA product Design a-2 (hSL-A100) comprising derived and/or modified sequence from LASV(LASV237-NIG-2010;Clade II)__AIT17639__SP-HsPLAT_NP(2-569) (opt1)
aggagaguccgcucagccagguugcagaagcggcuuagcguguguccuaaucuucucucugcguguagguaggccugugccgcaaacaagcuuaccauggacgccaugaagcgcggccugugcugcgugcuccugcugugcggggccgucuucgugagccccagcgccuccaaggaggugaaguccuuccuguggacccagagccuccgccgggagcugagcggcuacugcuccaacaucaagcugcaggucgugaaggacgcccaggcgcuccugcacgggcuggacuucagcgagguguccaacguccagcgccucaugcggaagcagaagcgcgacgacagcgaccugaagcggcugcgcgaccucaaccaggccgugaacaaccugguggagcugaaguccacccagcagaaguccauccuccgggucggcacccugaccagcgacgaccugcucacccuggccgccgaccuggagaagcucaagagcaaggugauccgcaccgagcggccccuguccagcgggguguacaugggcaaccuguccacgcagcagcucgagcagcgccgggcccugcugaacaugaucgggauggucggcggcgcgcaggggacccagccgggccgcgacgggguggugcgggucugggacgugaagaaccccgaccuccugaacaaccaguucggcaccaugcccagccugacccucgccugccugacgaagcagggccagguggaccugaacgacgccguccucgcccugaccgaccuggggcucaucuacaccgcgaaguaccccaacuccagcgaccuggaccgccugucccagagccacccgauccucaacaugguggacaucaagaaguccagccugaacaucagcggcuacaacuucucccugggggccgccgugaaggccggcgccugcaugcucgacgggggcaacaugcuggagaccaucaaggucacgccccagaccauggacggcauccucaagagcauccugaaggugaagcggucccuggggauguucgugagcgacacccccggcgagcgcaaccccuacgagaacauccuguacaagaucugccucuccggggacggcuggccguacaucgcgagccggaccuccaucgucgggcgcgccugggagaacacgaccguggaccuggagagcgacggcaagccccagaaggugggcuccgccgggagcaacaagucccugcagagcgccggcuuccccaccgggcucaccuacucccagcugaugacgcugaaggacagcaugaugcagcuggaccccuccgccaagaccuggaucgacaucgagggccggccggaggaccccgucgagaucgcgcucuaccagcccaugagcgggugcuacauccacuucuuccgcgagcccaccgaccugaagcaguucaagcaggacgccaaguacucccacggcaucgacguggccgaccuguucccggcccagcccggccucaccagcgccgucaucgaggcgcugccccggaacauggugcugacgugccaggggagcgacgacaucaagcgccuccuggacucccagggccgccgggacaucaagcugaucgacaucgcccucagcaaggccgacucccgccgguucgagaacgccgugugggaccagugcaaggaccugugccacaugcacaccggggucgugguggagaagaagaagcgcggcgggaaggaggagaucacgccccacugcgcccugauggacugcaucauguacgacgcggccgucagcggcggccucaacaucccggugcugcgggccgugcugccccgcgacauggucuuccggaccuccagccccaagguggugcucugaggacuagucccuguucccagagcccacuuuuuuuucuuuuuuugaaauaaaauagccugucuuucagaucucaaaggcucuuuucagagccaccaaaaaaaaaaaaaaaaaaaaaaaaaaaaaaaaaaaaaaaaaaaaaaaaaaaaaaaaaaaaaaaaaaaaaaaaaaaaaaaaaaaaaaaaaaaaaaaaaaaaa

SEQ ID NO: 18531 - RNA, 2064 nt, Artificial Sequence
  mRNA product Design a-2 (hSL-A100) comprising derived and/or modified sequence from LASV(LASV253-NIG-2011;Clade II)__AIT17671__SP-HsPLAT_NP(2-569) (opt1)
aggagaguccgcucagccagguugcagaagcggcuuagcguguguccuaaucuucucucugcguguagguaggccugugccgcaaacaagcuuaccauggacgccaugaagcgcggccugugcugcgugcuccugcugugcggggccgucuucgugagccccagcgccuccaaggaggugaaguccuuccuguggacccagagccuccgccgggagcugagcggcuacugcuccagcaucaagcugcaggucgugaaggacgcccaggcgcuccugcacgggcuggacuucuccgaggugagcaacguccagcgccucaugcggaagcagaagcgcgacgacuccgaccugaagcggcugcgcgaccucaaccaggccgugaacaaccugguggagcucaagagcacccagcagaaguccguccugcgggugggcacccugaccagcgacgaccugcucacccuggccgccgaccuggagaagcucaaguccaaggugauccgcaccgagcggccccugagcuccggggucuacaugggcaaccugagcacgcagcagcucgagcagcgccgggcccugcugaacaugaucgggauggugggcggcgcgcaggggacccagccgggccgcgacggggugguccgggugugggacgugaagaaccccgaccuccugaacaaccaguucggcaccaugcccucccugacccucgccugccugacgaagcaggggcaggucgaccugaacgacguggugcucgcccugaccgaccugggccucaucuacaccgccaaguaccccaacagcuccgaccuggaccgccugagccagagccacccgauccucaacauggucgacaccaagaaguccagccugaacaucuccggcuacaacuucagccugggggcggccgugaaggccggcgccugcaugcucgacgggggcaacaugcuggagacgaucaaggugacgccccagaccauggacggcauccugaaguccauccucaaggucaagaagucccuggggauguucgugagcgacacccccggcgagcggaaccccuacgagaacauccuguacaagaucugccucagcggggacggcuggccguacaucgccucccgcaccagcaucguggggcgggcgugggagaacaccaccgucgaccuggaguccgacggcaagccccagaaggugggcaccgccgggagcaacaagucccugcagagcgccggcuuccccacggggcucaccuacucccagcugaugacccugaaggacagcaugaugcagcuggaccccuccgccaagaccuggaucgacaucgagggccgcccggaggaccccgucgagaucgcccucuaccagcccaugagcgggugcuacauccacuucuuccgggagcccacggaccugaagcaguucaagcaggacgcgaaguacucccacggcaucgacgugaccgaccuguucccggcccagcccggccucaccagcgccgugaucgaggcccugccccgcaacaugguccugaccugccaggggagcgacgacaucaagcggcuccuggacucccagggccgccgcgacaucaagcugaucgacaucgcccucagcaaggcggacucccggcgcuucgagaacgccgugugggaccagugcaaggaccugugccacaugcacacggggguggucguggagaagaagaagcggggcgggaaggaggagaucacgccccacugcgcccugauggacugcaucauguacgacgccgccgugagcggcggccucaacaucccgguccugcgcgcggugcugccccgggacaugguguuccgcaccuccagccccaaggucgugcucugaggacuagucccuguucccagagcccacuuuuuuuucuuuuuuugaaauaaaauagccugucuuucagaucucaaaggcucuuuucagagccaccaaaaaaaaaaaaaaaaaaaaaaaaaaaaaaaaaaaaaaaaaaaaaaaaaaaaaaaaaaaaaaaaaaaaaaaaaaaaaaaaaaaaaaaaaaaaaaaaaaaaa

SEQ ID NO: 18532 - RNA, 2064 nt, Artificial Sequence
  mRNA product Design a-2 (hSL-A100) comprising derived and/or modified sequence from LASV(LASV254-NIG-2011;Clade II)__AIT17675__SP-HsPLAT_NP(2-569) (opt1)
aggagaguccgcucagccagguugcagaagcggcuuagcguguguccuaaucuucucucugcguguagguaggccugugccgcaaacaagcuuaccauggacgccaugaagcgcggccugugcugcgugcuccugcugugcggggccgucuucgugagccccagcgccuccaaggaggugaaguccuuccuguggacccagagccuccgccgggagcugagcggcuacugcuccagcaucaagcugcaggucgugaaggacgcccaggcgcuccugcacgggcuggacuucuccgaggugagcaacguccagcgccucaugcggaagcagaagcgcgacgacuccgaccugaagcggcugcgcgaccucaaccaggccgugaacaaccugguggagcucaagagcacccagcagaaguccguccugcgggugggcacgcugaccagcgacgaccugcucacccuggccgccgaccuggagaagcucaaguccaaggugauccgcaccgagcggccccugagcuccggggucuacaugggcaaccugagcacgcagcagcucgagcagcgccgggcccugcugaacaugaucgggauggugggcggcgcgcaggggacccagccgggccgcgacggggugguccgggugugggacgugaagaaccccgaccuccugaacaaccaguucggcaccaugcccucccugacccucgccugccugacgaagcaggggcaggucgaccugaacgacgccgugcucgcccugaccgaccugggccucaucuacaccgcgaaguaccccaacagcuccgaccuggaccgccugagccagagccacccgauccucaacaugguggacaccaagaaguccagccugaacaucuccggcuacaacuucagccugggggccgccgucaaggccggcgccugcaugcucgacgggggcaacaugcuggagacgaucaaggugacgccccagaccauggacggcauccugaaguccauccucaaggugaagaagucccuggggauguucgucagcgacacccccggcgagcggaaccccuacgagaacauccuguacaagaucugccucagcggggacggcuggccguacaucgcgucccgcaccagcaucguggggcgggccugggagaacaccaucguggaccuggaguccgacggcaagccccagaaggucggcaccgccgggagcaacaagucccugcagagcgccggcuuccccaccgggcucacguacucccagcugaugacccugaaggacagcaugaugcagcuggaccccuccgccaagaccuggaucgacaucgagggccgcccggaggaccccguggagaucgcgcucuaccagcccaugagcgggugcuacauccacuucuuccgggagcccaccgaccugaagcaguucaagcaggacgccaaguacucccacggcaucgacgucgccgaccuguucccggcccagcccggccucacgagcgccgugaucgaggcgcugccccgcaacauggugcugaccugccaggggagcgacgacaucaagcggcuccuggacucccagggccgccgcgacaucaagcugaucgacaucgcccucagcaaggccgacucccggcgcuucgagaacgccgucugggaccagugcaaggaccugugccacaugcacaccggggugguggucgagaagaagaagcggggcgggaaggaggagaucacgccccacugcgcccugauggacugcaucauguacgacgcggccgugagcggcggccucaacaucccggugcugcgcgccguccugccccgggacaugguguuccgcaccuccagccccaaggugguccucugaggacuagucccuguucccagagcccacuuuuuuuucuuuuuuugaaauaaaauagccugucuuucagaucucaaaggcucuuuucagagccaccaaaaaaaaaaaaaaaaaaaaaaaaaaaaaaaaaaaaaaaaaaaaaaaaaaaaaaaaaaaaaaaaaaaaaaaaaaaaaaaaaaaaaaaaaaaaaaaaaaaaa

SEQ ID NO: 18533 - RNA, 2064 nt, Artificial Sequence
  mRNA product Design a-2 (hSL-A100) comprising derived and/or modified sequence from LASV(Nig08-04;Clade II)__ADU56611__SP-HsPLAT_NP(2-569) (opt1)
aggagaguccgcucagccagguugcagaagcggcuuagcguguguccuaaucuucucucugcguguagguaggccugugccgcaaacaagcuuaccauggacgccaugaagcgcggccugugcugcgugcuccugcugugcggggccgucuucgugagccccagcgccuccaaggaggugaaguccuuccuguggacccagagccuccgccgggagcugagcggcuacugcuccaacaucaagcugcaggucgugaaggacgcccaggcgcuccugcacgggcuggacuucagcgagguguccaacguccagcgccucaugcggaagcagaagcgcgacgacggcgaccugaagcggcugcgcgaccucaaccaggccgugaacaaccugguggagcucaagagcacccagcagaaguccguccugcggguggggacccugaccagcgacgaccugcucacccuggccgccgaccuggagaagcucaaguccaaggugauccgcaccgagcggccccugagcuccggcgucuacauggggaaccugagcacgcagcagcucgagcagcgcaaggcccugcuguccaugaucggcauggugggcggggcgcagggcacccagccggggcgggacggcgugguccgcgugugggacgugaagaaccccgaccuccugaacaaccaguucgggaccaugcccagccugacccucgccugccugacgaagcagggccaggucgaccugaacgacgccgugcucgcccugaccgaccugggccucaucuacaccgcgaaguaccccaacuccagcgaccuggaccggcugucccagagccacccgauccucaacaugguggacaccaagaaguccagccugaacaucagcggguacaacuucucccugggcgccgccgucaaggccggggccugcaugcucgacggcggcaacaugcuggagacgaucaaggugacgccccagaccauggacgggauccucaagagcauccugaaggugaagcgcucccugggcauguucgucagcgacacccccggggagcggaaccccuacgagaacauccuguacaagaucugccucuccggcgacggguggccguacaucgcgagccgcaccuccaucgugggccgggccugggagaacaccaccguggaccuggagagcgacggcaagccccagaaggucgggaccgccggcuccaacaagagccugcaguccgccggguuccccacgggccucaccuacagccagcugaugacccugaaggacuccaugaugcagcuggaccccagcgccaagaccuggaucgacaucgaggggcgcccggaggaccccguggagaucgcgcucuaccagcccauguccggcugcuacauccacuucuuccgggagcccacggaccugaagcaguucaagcaggacgccaaguacagccacggcaucgacgucaccgaccuguucuccgcccagccggggcucaccagcgccgugaucgaggcccugccccgcaacauggugcugaccugccagggcagcgacgacaucaagaagcuccuggacucccaggggcggcgcgacaucaagcugaucgacaucagccucaacaaggcggacucccgccgguucgagaacgccgucugggaccagugcaaggaccugugccacaugcacacgggcgugguggucgagaagaagaagcgcgggggcaaggaggagaucacgccccacugcgcccugauggacugcaucauguucgacgccgccgugagcggcgggcucaacauccccauccugcgggcggugcugccgcgcgacauggucuuccggaccuccagccccaagguggugcucugaggacuagucccuguucccagagcccacuuuuuuuucuuuuuuugaaauaaaauagccugucuuucagaucucaaaggcucuuuucagagccaccaaaaaaaaaaaaaaaaaaaaaaaaaaaaaaaaaaaaaaaaaaaaaaaaaaaaaaaaaaaaaaaaaaaaaaaaaaaaaaaaaaaaaaaaaaaaaaaaaaaaa

SEQ ID NO: 18534 - RNA, 2067 nt, Artificial Sequence
  mRNA product Design a-2 (hSL-A100) comprising derived and/or modified sequence from LASV(GA391;Clade III)__AAA46284__SP-HsPLAT_NP(2-570) (opt1)
aggagaguccgcucagccagguugcagaagcggcuuagcguguguccuaaucuucucucugcguguagguaggccugugccgcaaacaagcuuaccauggacgccaugaagcgcggccugugcugcgugcuccugcugugcggggccgucuucgugagccccagcgccuccaaggaggugcgcagcugccuguggacccagucccuccggcgcgagcugagcggcuacugcuccaacaucaagcugcaggucgugaaggacgcccaggcgcuccugcacgggcuggacuucagcgagguguccaacguccagcggcucaugcgcaagcagaagcgggacgacggcgaccugaagcgccugcgggaccucaaccaggccgugaacaaccugguggagcugaaguccacccagcagaaguccguccuccgcguggggacgcugagcuccgacgaccugcucauccuggccgccgaccuggagaagcucaagagcaaggugacccggaccgagcgcccccuguccagcggcgucuacauggggaaccuguccagccagcagcucgaccagcggcgcgcccugcugaacaugaucggcaugaccggcguguccgggggcgggaagggcgcgagcaacgggaucgugcgggucugggacgugaagaacgccgagcuccugaacaaccaguucggcacgaugccgucccugacccucgccugccugaccaagcagggccagguggaccugaacgacgccguccaggcgcucaccgaccuggggcugaucuacacggccaaguaccccaacagcagcgaccucgaccgccugucccagagccaccccauccugaacaugaucgacaccaagaaguccagccucaacaucuccggcuacaacuucagccugggggccgccgugaaggccggcgcgugcaugcuggacggcgggaacaugcucgagaccaucaaggugagcccccagaccauggacggcauccucaagagcauccugaaggucaagaagucccuggggauguucgugagcgacacgccgggcgagcggaaccccuacgagaacauccuguacaagaucugccuguccggggacggcuggagcuacaucgccucccgcaccagcaucgugggccgggccugggagaacaccgucguggaccucgagcaggacaacaagccccagaagaucgggaacggcggguccaacaagagccugcaguccgccggcuucgccgcggggcugaucuacagccagcucaugacccugaaggacuucaagugcuucaaccugauccccaacgccaagacguggauggacaucgagggccgcccggaggaccccguggagaucgcccuguaccagcccuccagcggcugcuacguccacuucuuccgggagcccaccgaccucaagcaguucaagcaggacgccaaguacagccacgggcgcgacgugaccgaccuguucgccgcgcagccgggccugaccuccgccgucaucgaggcccucccccggaacauggugaucacgugccaggggagcgaggacauccgcaagcugcuggagucccagggccgccgggacaucaagcucaucgacaucacccugagcaaggccgacucccgcaaguucgagaacgccgugugggaccaguucaaggaccugugccacaugcacaccggggucgugguggagaagaagaagcggggcggcaaggaggagaucacgccccacugcgcgcucauggacugcaucauguucgacgccgccgucagcgggggccuggacgccaaggugcugcgcgugguccucccccgggacaugguguuccgcaccuccaccccgaaggugguccugugaggacuagucccuguucccagagcccacuuuuuuuucuuuuuuugaaauaaaauagccugucuuucagaucucaaaggcucuuuucagagccaccaaaaaaaaaaaaaaaaaaaaaaaaaaaaaaaaaaaaaaaaaaaaaaaaaaaaaaaaaaaaaaaaaaaaaaaaaaaaaaaaaaaaaaaaaaaaaaaaaaaaa

SEQ ID NO: 18535 - RNA, 2064 nt, Artificial Sequence
  mRNA product Design a-2 (hSL-A100) comprising derived and/or modified sequence from LASV(Nig08-A19;Clade III)__ADU56619__SP-HsPLAT_NP(2-569) (opt1)
aggagaguccgcucagccagguugcagaagcggcuuagcguguguccuaaucuucucucugcguguagguaggccugugccgcaaacaagcuuaccauggacgccaugaagcgcggccugugcugcgugcuccugcugugcggggccgucuucgugagccccagcgccuccaaggaggugaaguccuuccuguggacccagucccuccgccgggagcugagcggcuacugcuccaacaucaagcugcaggucgugaaggacgcccaggcgcuccugcacgggcuggacuucagcgagguguccaacguccagcgccucaugcggaagcagaagcgcgacgacggcgaccugaagcggcugcgcgaccucaaccaggccgugaacaaccugguggagcucaagagcacccagcagaaguccguccugcggguggggacccugagcuccgacgaccugcucgugcuggccgccgaccuggagaagcucaagagcaaggucgugcgcaccgagcggccccuguccagcggcaucuacauggggaaccuguccagccagcagcucgaccagcgcaaggcccugcugaacaugaucggcaugaccggcgggaacggcgggcggaacaccacguccgacggcaucgugcgcgucugggacgugaagaacgcggagcuccugaacaaccaguucgggaccaugccgagccugacccucgccugccugaccaagcagggccagguggaccugaacgacgccguccaggcccucacggaccugggccugaucuacaccgcgaaguaccccaacuccagcgaccucgaccggcuggcccagagccaccccauccugaacaugaucgacaccaagaaguccagccucaacaucuccggguacaacuucagccugggcgccgccgugaaggccggggcgugcaugcuggacggcggcaacaugcucgagaccaucaaggugagcccccagacgauggacgggauccucaagagcauccugaaggucaagcgcucccugggcauguucaucagcgacaccccgggggagcggaaccccuacgagaacauccuguacaagaucugccuguccggcgacggguggcccuacaucgccagccgcaccuccaucgugggccgggccugggagaacaccguggucgaccucgagagcgacaacaagccccagaagacgggcaacgggggcuccaacaagagccugcaguccgccggguucgccgcgggccugaccuacagccagcucaugacccugaaggacuccaugcugcagcuggacccgaacgccaagaccuggauggacaucgaggggcgccccgaggaccccguggagaucgcccucuaccagcccagcuccggcugcuacauccacuucuuccgggagccgacggaccugaagcaguucaagcaggacgccaaguacagccacggcaucgacgugaccgaccuguucgccgcgcagcccgggcucaccagcgccgucaucgaggcccugccccgcaacauggugaucacgugccagggcuccgaggacauccggaagcugcucgagagccaggggcgccgcgacaucaagcugaucgacaucucccugagcaaggucgacucccggaaguucgagaacgccgugugggaccaguucaaggaccucugccacaugcacaccggcaucguggucgagaagaagaagcgcgggggcaaggaggagaucacgccccacugcgcccugauggacugcaucauguucgacgcggccgugagcggcgggguggacgccaagguccugcgggccgugcucccgcgcgacaugguguuccggaccuccacccccaaggucgugcugugaggacuagucccuguucccagagcccacuuuuuuuucuuuuuuugaaauaaaauagccugucuuucagaucucaaaggcucuuuucagagccaccaaaaaaaaaaaaaaaaaaaaaaaaaaaaaaaaaaaaaaaaaaaaaaaaaaaaaaaaaaaaaaaaaaaaaaaaaaaaaaaaaaaaaaaaaaaaaaaaaaaaa

SEQ ID NO: 18536 - RNA, 2064 nt, Artificial Sequence
  mRNA product Design a-2 (hSL-A100) comprising derived and/or modified sequence from LASV(G1180-SLE-2010;Clade IV)__AIT17169__SP-HsPLAT_NP(2-569) (opt1)
aggagaguccgcucagccagguugcagaagcggcuuagcguguguccuaaucuucucucugcguguagguaggccugugccgcaaacaagcuuaccauggacgccaugaagcgcggccugugcugcgugcuccugcugugcggggccgucuucgugagccccagcgccuccaaggagaucaagagcuuccuguggacccagucccuccgccgggagcugagcggcuacugcuccaacaucaagcuccagguggucaaggacgcccaggcgcugcugcacgggcuggacuucagcgagguguccaacgugcagcgccucaugcggaaggagcgccgggacgacaacgaccugaagcgccugcgggaccucaaccaggccgucaacaaccugguggagcucaagagcacccagcagaaguccauccugcgcgugggcacccugaccagcgacgaccugcucauccuggccgccgaccuggagaagcucaaguccaaggucauccggaccgagcgcccccugagcgccgggguguacaugggcaaccuguccagccagcagcucgaccagcggcgcgcgcugcuguccaugaucgggaugagcuccggcaaccagcgggcccaggccggccgcgacggggugguccgggugugggacgugaagaacgucgagcuccugaacaaccaguucggcaccaugccgagccugacgcucgccugccugaccaagcagggccagguggaccugaacgacgcggugcaggcccucaccgaccuggggcugaucuacaccgccaaguaccccaacacguccgaccucgaccgccugacccagagccaccccauccugaacaugaucgacaccaagaaguccagccucaacaucagcggguacaacuucucccugggcgccgccgucaaggcgggcgccugcaugcuggacgggggcaacaugcucgagaccaucaaggugagcccccagacgauggacgggauccugaaguccauccugaaggugaagaaggcccucggcauguucaucagcgacaccccgggcgagcggaaccccuacgagaacauccuguacaagaucugccuguccggggacggcuggcccuacaucgccagccgcaccuccaucaccgggcgggccugggagaacacggucguggaccucgagagcgacggcaagccccagaaggcgggguccaacaacagcaacaagucccugcagagcgugggcuucaccgccggccugaccuacucccagcucaugacccugaaggacgccaugcugcagcuggacccgaacgccaagacguggauggacaucgaggggcgccccgaggaccccgucgagaucgcccucuaccagcccagcuccggcugcuacauccacuucuuccgggagccgaccgaccugaagcaguucaagcaggacgcgaaguacagccacgggaucgacgugaccgaccuguucgccgcccagcccggccucaccuccgccgugaucgacgcccugccccgcaacauggucaucacgugccaggggagcgacgacauccgcaagcugcucgagagccagggccggaaggacaucaagcugaucgacaucgcgcuguccaagaccgacagccgcaaguacgagaacgccgugugggaccaguacaaggaccucugccacaugcacaccggcgucgugguggagaagaagaagcgcgggggcaaggaggagaucacgccccacugcgcccugauggacugcaucauguucgacgccgcggucuccgggggccugaacaccagcgugcuccgggccgugcugccgcgggacauggucuuccgcaccuccacgccccggguggugcugugaggacuagucccuguucccagagcccacuuuuuuuucuuuuuuugaaauaaaauagccugucuuucagaucucaaaggcucuuuucagagccaccaaaaaaaaaaaaaaaaaaaaaaaaaaaaaaaaaaaaaaaaaaaaaaaaaaaaaaaaaaaaaaaaaaaaaaaaaaaaaaaaaaaaaaaaaaaaaaaaaaaaa

SEQ ID NO: 18537 - RNA, 2064 nt, Artificial Sequence
  mRNA product Design a-2 (hSL-A100) comprising derived and/or modified sequence from LASV(G1442-SLE-2011;Clade IV)__AIT17181__SP-HsPLAT_NP(2-569) (opt1)
aggagaguccgcucagccagguugcagaagcggcuuagcguguguccuaaucuucucucugcguguagguaggccugugccgcaaacaagcuuaccauggacgccaugaagcgcggccugugcugcgugcuccugcugugcggggccgucuucgugagccccagcgccuccaaggaggugaaguccuuccuguggacccagagccuccgccgggagcugagcggcuacugcuccaacaucaagcugcaggucgugaaggacgcccaggcgcuccugcacgggcuggacuucagcgagguguccaacguccagcgccucaugcggaagcagcgccgggacgacaacgaccugaagcgccugcgggaccucaaccaggccgugaacaaccugguggagcucaagagcacccagcagaaguccguccugcgcgugggcacccugaccagcgacgaccugcucgugcuggccgccgaccuggagaagcucaaguccaaggucauccggaccgagcgcccccugagcgccgggguguacaugggcaaccuguccagccagcagcucgaccagcggcgcgcgcugcugaacaugaucgggauguccggcggcauccaggggacccggacgggccgcgacggggugguccgggugugggacgugaagaacgccgaccuccugaacaaccaguucggcaccaugccgagccugacccucgccugccugaccaagcaggggcaggucgaccugaacgacguggugcaggcccucacggaccugggccugaucuacaccgcgaaguaccccaacgccuccgaccucgaccgccugacccagagccaccccauccugaacaugaucgacaccaagaaguccagccucaacaucagcggcuacaacuucucccugggggccgccgucaaggccggcgcgugcaugcuggacgggggcaacaugcucgagacgaucaaggugagcccccagaccauggacggcauccugaaguccauccugaaggugaagaagacccucgggauguucaucagcgacaccccgggcgagcggaaccccuacgagaacauccuguacaagaucugccuguccggggacggcuggcccuacaucgccagccgcacguccaucaccgggcgggccugggagaacaccgucguggaccucgagagcgacggcaagccccagaaggccggcuccaacaacagcaacaagucccugcagagcgccggguucgcggccggccugaccuacucccagcucaugacgcugaaggacgccaugcugcagcuggacccgaacgccaagaccuggauggacaucgaggggcgccccgaggaccccguggagaucgcccucuaccagcccagcuccggcugcuacauccacuucuuccgggagccgaccgaccugaagcaguucaagcaggacgcgaaguacagccacgggaucgacgucaccgaccuguucgccgcccagcccggccucacguccgccgugaucgaggcccugccccgcaacauggucaucacgugccagggcagcgacgacaucaagaagcugcucgagucccaggggcgcaaggacaucaagcugaucgacaucgcgcugagcaagaccgacagccggaaguacgagaacgccgugugggaccaguacaaggaccucugccacaugcacaccggcguggucguggagaagaagaagcgcgggggcaaggaggagaucaccccgcacugcgcccugauggacugcaucauguucgacgccgcgguguccgggggccugaacacccucguccugcgggccgugcugccccgcgacaugguguuccggaccagcacgccccgcgucgugcucugaggacuagucccuguucccagagcccacuuuuuuuucuuuuuuugaaauaaaauagccugucuuucagaucucaaaggcucuuuucagagccaccaaaaaaaaaaaaaaaaaaaaaaaaaaaaaaaaaaaaaaaaaaaaaaaaaaaaaaaaaaaaaaaaaaaaaaaaaaaaaaaaaaaaaaaaaaaaaaaaaaaaa

SEQ ID NO: 18538 - RNA, 2064 nt, Artificial Sequence
  mRNA product Design a-2 (hSL-A100) comprising derived and/or modified sequence from LASV(G3010-SLE-2013;Clade IV)__AIT17345__SP-HsPLAT_NP(2-569) (opt1)
aggagaguccgcucagccagguugcagaagcggcuuagcguguguccuaaucuucucucugcguguagguaggccugugccgcaaacaagcuuaccauggacgccaugaagcgcggccugugcugcgugcuccugcugugcggggccgucuucgugagccccagcgccuccaaggagaucaagagcuuccuguggacccagucccuccgccgggagcugagcggcuacugcuccaacaucaagcuccagguggucaaggacgcccaggcgcugcugcacgggcuggacuucagcgagguguccaacgugcagcgccucaugcggaaggagcgccgggacgacaacgaccugaagcgccugcgggaccucaaccaggccgucaacaaccugguggagcucaagagcacccagcagaaguccauccugcgcgugggcacccugaccagcgacgaccugcucauccuggccgccgaccuggagaagcucaaguccaaggucacccggaccgagcgcccccugagcgccgggguguacaugggcaaccuguccagccagcagcucgaccagcggcgcgcgcugcuguccaugaucgggaugagcuccggcgugcagggcgcccgggccgggcgcgacggcgucgugcgggugugggacgucaagaacgccgagcuccugaacaaccaguucgggacgaugccgagccugacccucgcgugccugaccaagcagggccagguggaccugaacgacgugguccaggcccucaccgaccuggggcugaucuacacggccaaguaccccaacaccuccgaccucgaccgccugacccagagccaccccauccugaacaugaucgacaccaagaaguccagccucaacaucagcggcuacaacuucucccugggcgccgccgugaaggcgggggccugcaugcuggacggcgggaacaugcucgagacgaucaaggugagcccccagaccauggacggcauccugaaguccauccugaaggucaagaaggcccucggcauguucaucagcgagaccccgggggagcggaaccccuacgagaacauccuguacaagaucugccuguccggcgacggguggcccuacaucgccagccgcaccuccaucacgggccgggccugggagaacaccgugguggaccucgagagcgacgggaagccccagaaggcgggcuccaacaacagcaacaagucccugcagagcgccggcuucaccgccgggcugaccuacucccagcucaugacgcugaaggacgccaugcugcagcuggacccgaacgccaagaccuggauggacaucgagggccgccccgaggaccccgucgagguggcgcucuaccagcccagcuccgggugcuacauccacuucuuccgggagccgaccgaccugaagcaguucaagcaggacgccaaguacagccacggcaucgacgugaccgaccuguucgccgcccagcccgggcucacguccgccgucaucgacgcgcugccccgcaacauggugaucacgugccagggcagcgacgacaucaagaagcugcucgagagccagggccgcaaggacaucaagcugaucgacaucgcccuguccaagaccgacagccggaaguacgagaacgccgucugggaccaguacaaggaccucugccacaugcacaccggggugguggucgagaagaagaagcgcggcgggaaggaggagaucaccccgcacugcgcccugauggacugcaucauguucgacgcggccguguccggcgggcugaacaccagcgugcuccgggccguccugccccgcgacaugguguuccggaccuccacgccccgcgugguccugugaggacuagucccuguucccagagcccacuuuuuuuucuuuuuuugaaauaaaauagccugucuuucagaucucaaaggcucuuuucagagccaccaaaaaaaaaaaaaaaaaaaaaaaaaaaaaaaaaaaaaaaaaaaaaaaaaaaaaaaaaaaaaaaaaaaaaaaaaaaaaaaaaaaaaaaaaaaaaaaaaaaaa

SEQ ID NO: 18539 - RNA, 2064 nt, Artificial Sequence
  mRNA product Design a-2 (hSL-A100) comprising derived and/or modified sequence from LASV(G502-SLE-2009;Clade IV)__AIT17127__SP-HsPLAT_NP(2-569) (opt1)
aggagaguccgcucagccagguugcagaagcggcuuagcguguguccuaaucuucucucugcguguagguaggccugugccgcaaacaagcuuaccauggacgccaugaagcgcggccugugcugcgugcuccugcugugcggggccgucuucgugagccccagcgccuccaaggagaucaagagcuuccuguggacccagucccuccgccgggagcugagcggcuacugcuccaacaucaagcuccagguggucaaggacgcccaggcgcugcugcacgggcuggacuucagcgagguguccaacgugcagcgccucaugcggaaggagcgccgggacgacaacgaccugaagcgccugcgggaccucaaccaggccgucaacaaccugguggagcucaagagcacccagcagaaguccauccugcgcgugggcacccugaccagcgacgaccugcucauccuggccgccgaccuggagaagcucaaguccaaggucauccggaccgagcgcccccugagcgccgggguguacaugggcaaccuguccagccagcagcucgaccagcggcgcgcgcugcuguccaugaucgggaugagcggcggcaaccagggggugcgggccggcaaggacggggucgugcgcgugugggacgucaagaacgccgagcuccugaacaaccaguucggcaccaugccgucccugacgcucgccugccugaccaagcagggccagguggaccugaacgacgcggugcaggcccucaccgaccuggggcugaucuacaccgccaaguaccccaacacgagcgaccucgaccggcugacccagucccaccccauccugaacaugaucgacaccaagaaguccagccucaacaucuccggcuacaacuucagccugggggccgccgucaaggcgggcgccugcaugcuggacgggggcaacaugcucgagaccaucaaggugagcccccagacgauggacggcauccucaagagcauccugaaggugaagaaggcccuggggauguucaucuccgacaccccgggcgagcgcaaccccuacgagaacauccuguacaagaucugccugagcggggacggcuggcccuacaucgccucccggaccagcaucaccgggcgcgccugggagaacacggucguggaccucgaguccgacggcaagccccagaaggcgggcagcaacaacuccaacaagagccugcaguccgccggguucaccgccggccugaccuacagccagcucaugacccugaaggacgccaugcugcagcuggacccgaacacgaagaccuggauggacaucgaggggcggcccgaggaccccguggagaucgcccucuaccagcccuccagcggcugcuacauccacuucuuccgcgagccgaccgaccugaagcaguucaagcaggacgcgaaguacucccacgggaucgacgucaccgaccuguucgccgcccagcccggccucacgagcgccgugaucgacgcccugccccggaacauggugaucacgugccagggcuccgacgacauccgcaagcugcucgagagccaggggcgcaaggacaucaagcugaucgacaucgcgcugaacaagaccgacagccggaaguacgagaacgccgucugggaccaguacaaggaccucugccacaugcacaccggcguggucguggagaagaagaagcgcgggggcaaggaggagaucaccccgcacugcgcccugauggacugcaucauguucgacgccgcgguguccgggggccugaacaccagcguccuccgggccgugcugccccgcgacaugguguuccggaccuccacgccccgcgucgugcugugaggacuagucccuguucccagagcccacuuuuuuuucuuuuuuugaaauaaaauagccugucuuucagaucucaaaggcucuuuucagagccaccaaaaaaaaaaaaaaaaaaaaaaaaaaaaaaaaaaaaaaaaaaaaaaaaaaaaaaaaaaaaaaaaaaaaaaaaaaaaaaaaaaaaaaaaaaaaaaaaaaaaa

SEQ ID NO: 18540 - RNA, 2064 nt, Artificial Sequence
  mRNA product Design a-2 (hSL-A100) comprising derived and/or modified sequence from LASV(G733-SLE-2010;Clade IV)__AIT17155__SP-HsPLAT_NP(2-569) (opt1)
aggagaguccgcucagccagguugcagaagcggcuuagcguguguccuaaucuucucucugcguguagguaggccugugccgcaaacaagcuuaccauggacgccaugaagcgcggccugugcugcgugcuccugcugugcggggccgucuucgugagccccagcgccuccaaggagaucaagagcuuccuguggacccagucccuccgccgggagcugagcggcuacugcuccaacaucaagcuccagguggucaaggacgcccaggcgcugcugcacgggcuggacuucagcgagguguccaacgugcagcgccucaugcggaaggagcgccgggacgacaacgaccugaagcgccugcgggaccucaaccaggccgucaacaaccugguggagcucaagagcacccagcagaaguccgugcugcgcgucggcacccugaccagcgacgagcugcucgugcuggccgccgaccuggagaagcucaaguccaaggugauccggaccgagcgcccccugagcgccggggucuacaugggcaaccuguccagccagcagcucgaccagcggcgcgcgcugcuguccaugaucgggaugagcggcggcaaccagggggcccggaccggccgcgacgggguggugcgggucugggacgugaagaacgccgagcuccugaacaaccaguucggcaccaugccgucccugacccucgccugccugaccaagcagggccagguggaccugaacgacgcgguccaggcccucaccgaccuggggcugaucuacacggccaaguaccccaacaccagcgaccucgaccgccugacccagucccaccccauccugaacaugaucgacaccaagaaguccagccucaacaucuccggcuacaacuucagccugggggccgccgugaaggcgggcgccugcaugcuggacgggggcaacaugcucgagacgaucaaggugagcccccagaccauggacggcauccucaagagcauccugaaggucaagaaggcccuggggauguucaucuccgacaccccgggcgagcggaaccccuacgagaacauccuguacaagaucugccugagcggggacggcuggcccuacaucgccucccgcaccagcaucacggggcgggccugggagaacaccgugguggaccucgaguccgacggcaagccccagaaggcgggcagcaacaacuccaacaagagccugcaguccgccggguucaccgccggccugaccuacagccagcucaugacgcugaaggacgccaugcugcagcuggacccgaacgccaagaccuggauggacaucgaggggcgccccgaggaccccgucgagaucgcgcucuaccagcccuccagcggcugcuacauccacuucuuccgggagccgaccgaccugaagcaguucaagcaggacgccaaguacucccacgggaucgacgugaccgaccuguucgccgcccagcccggccucacgagcgccgugaucgacgcgcugccccgcaacauggucaucacgugccagggcuccgacgacauccgcaagcugcucgagagccaggggcggaaggacaucaagcugaucgacaucgcccugagcaagaucgacucccgcaaguacgagaacgccgugugggaccaguacaaggaccucugccacaugcacaccggcgucgugguggagaagaagaagcgcgggggcaaggaggagaucacgccccacugcgcccugauggacugcaucauguucgacgcggccgucagcgggggccugaacucccucgugcugcgggccgugcugccgcgggacauggucuuccgcaccagcacgccccggguggugcucugaggacuagucccuguucccagagcccacuuuuuuuucuuuuuuugaaauaaaauagccugucuuucagaucucaaaggcucuuuucagagccaccaaaaaaaaaaaaaaaaaaaaaaaaaaaaaaaaaaaaaaaaaaaaaaaaaaaaaaaaaaaaaaaaaaaaaaaaaaaaaaaaaaaaaaaaaaaaaaaaaaaaa

SEQ ID NO: 18541 - RNA, 2064 nt, Artificial Sequence
  mRNA product Design a-2 (hSL-A100) comprising derived and/or modified sequence from MOPV/LASV reassortant(IGS-1;Clade IV)__AFY05578__SP-HsPLAT_NP(2-569) (opt1)
aggagaguccgcucagccagguugcagaagcggcuuagcguguguccuaaucuucucucugcguguagguaggccugugccgcaaacaagcuuaccauggacgccaugaagcgcggccugugcugcgugcuccugcugugcggggccgucuucgugagccccagcgccuccaaggagaucaagagcuuccuguggacccagucccuccgccgggagcugagcggcuacugcuccaacaucaagcuccagguggucaaggacgcccaggcgcugcugcacgggcuggacuucagcgagguguccaacgugcagcgccucaugcggaaggagcgccgggacgacaacgaccugaagcgccugcgggaccucaaccaggccgucaacaaccugguggagcucaagagcacccagcagaaguccauccugcgcgugggcacccugaccagcgacgaccugcucauccuggccgccgaccuggagaagcuccgguccaaggucauccgcaccgagcggccccugagcgccgggguguacaugggcaaccuguccagccagcagcucgaccagcgccgggcgcugcugaacaugaucgggauguccggcggcaaccagggggcccgcgccggccgggacggggugguccgcgugugggacgugaagaacgccgagcuccugagcaaccaguucggcaccaugccgucccugacgcucgcgugccugaccaagcaggggcaggucgaccugaacgacgccgugcaggcccucaccgaccugggccugaucuacaccgccaaguaccccaacacgagcgaccucgaccggcugacccagucccaccccauccugaacaugaucgacaccaagaaguccagccucaacaucuccggcuacaacuucagccugggggccgcggugaaggccggcgccugcaugcuggacgggggcaacaugcucgagaccaucaaggucagcccccagacgauggacggcauccucaagagcauccugaaggugaagaaggcccuggggauguucaucuccgacaccccgggcgagcgcaaccccuacgagaacauccuguacaagaucugccugagcggggacggcuggcccuacaucgccucccggaccagcaucaccgggcgcgcgugggagaacacgguggucgaccucgaguccgacggcaagccccagaaggccgacagcaacaacuccagcaagucccugcagagcgccggcuucaccgccgggcugaccuacucccagcucaugacccugaaggacgccaugcugcagcuggacccgaacgcgaagacguggauggacaucgagggccggcccgaggaccccguggagaucgcccucuaccagcccagcuccgggugcuacauccacuucuuccgcgagccgaccgaccugaagcaguucaagcaggacgccaaguacagccacggcaucgacgugaccgaccuguucgccacccagcccgggcucacguccgccgucaucgacgcgcugccccgcaacauggugaucacgugccagggcagcgacgacauccggaagcugcucgagagccagggccgcaaggacaucaagcugaucgacaucgaccuguccaagaccgacagccggaaguacgagaacgccgugugggaccaguacaaggaccucugccacaugcacaccggggucguggucgagaagaagaagcgcggcgggaaggaggagaucaccccgcacugcgcccugauggacugcaucauguucgacgccgcgguguccggcgggcugaacaccagcgugcuccgggccguccugccccgcgacaugguguuccggaccuccacgccccgcgugguccugugaggacuagucccuguucccagagcccacuuuuuuuucuuuuuuugaaauaaaauagccugucuuucagaucucaaaggcucuuuucagagccaccaaaaaaaaaaaaaaaaaaaaaaaaaaaaaaaaaaaaaaaaaaaaaaaaaaaaaaaaaaaaaaaaaaaaaaaaaaaaaaaaaaaaaaaaaaaaaaaaaaaaa

SEQ ID NO: 18542 - RNA, 2064 nt, Artificial Sequence
  mRNA product Design a-2 (hSL-A100) comprising derived and/or modified sequence from LASV(LM765-SLE-2012;Clade IV)__AIT17815__SP-HsPLAT_NP(2-569) (opt1)
aggagaguccgcucagccagguugcagaagcggcuuagcguguguccuaaucuucucucugcguguagguaggccugugccgcaaacaagcuuaccauggacgccaugaagcgcggccugugcugcgugcuccugcugugcggggccgucuucgugagccccagcgccuccaaggagaucaagagcuuccuguggacccagucccuccgccgggagcugagcggcuacugcuccaacaucaagcuccagguggucaaggacgcccaggcgcugcugcacgggcuggacuucagcgagguguccaacgugcagcgccucaugcggaaggagcgccgggacgacaacgaccugaagcgccugcgggaccucaaccaggccgucaacaaccugguggagcucaagagcacccagcagaaguccauccugcgcgugggcacccugaccagcgacgaccugcucauccuggccgccgaccuggagaagcucaaguccaaggucacccggaccgagcgcccccugagcgccgggguguacaugggcaaccuguccagccagcagcucgaccagcggcgcgcgcugcuggacaugaucgggauguccggcagcaaccagggcgcccgggccgggcgcgacggcgugguccgggugugggacgugaagaacgccgagcuccugaacaaccaguucgggacgaugccgucccugacccucgcgugccugaccaagcagggccaggucgaccugaacgacgccgugcaggcccucaccgaccuggggcugaucuacacggccaaguaccccaacaccagcgaccucgaccgccugacccagucccaccccauccugaacaugaucgacaccaagaaguccagccucaacaucuccggcuacaacuucagccugggcgccgcggugaaggccggggccugcaugcuggacggcgggaacaugcucgagacgaucaaggucagcccccagaccauggacggcauccucaagagcauccugaaggugaagaaggcccugggcauguucaucuccgacgccccgggggagcggaaccccuacgagaacauccuguacaagaucugccugagcggcgacggguggcccuacaucgcgucccgcaccagcaucaccggccgggccugggagaacacgguggucgaccucgaguccgacgggaagccccagaaggccggcagcaacggcuccaacaagagccugcaguccgccggguucaccgccggccugaccuacagccagcucaugacccugaaggacgcgaugcugcagcuggacccgaacgccaagacguggauggacaucgaggggcgccccgaggaccccguggagaucgcccucuaccagcccuccagcggcugcuacauccacuucuuccgggagccgaccgaccugaagcaguucaagcaggacgccaaguacucccacgggaucgacgugaccgaccuguucgccgcgcagcccggccucaccagcgccgucaucgacgcccugccccgcaacauggugaucacgugccagggcuccgacgacauccgcaagcuguucgagagccaggggcggaaggacaucaagcucaucgacaucgcccugagcaagaccgacucccgcaaguacgagaacgcggugugggaccaguacaaggaccugugccacaugcacaccggcaucgucguggagaagaagaagcgcgggggcaaggaggagaucacgccccacugcgcccucauggacugcaucauguucgacgccgccgucagcgggggccugaacaccuccgugcugcgggccgugcucccgcgggacauggucuuccgcaccagcacgccccggguggugcugugaggacuagucccuguucccagagcccacuuuuuuuucuuuuuuugaaauaaaauagccugucuuucagaucucaaaggcucuuuucagagccaccaaaaaaaaaaaaaaaaaaaaaaaaaaaaaaaaaaaaaaaaaaaaaaaaaaaaaaaaaaaaaaaaaaaaaaaaaaaaaaaaaaaaaaaaaaaaaaaaaaaaa

SEQ ID NO: 18543 - RNA, 2064 nt, Artificial Sequence
  mRNA product Design a-2 (hSL-A100) comprising derived and/or modified sequence from LASV(LM776-SLE-2012;Clade IV)__AIT17825__SP-HsPLAT_NP(2-569) (opt1)
aggagaguccgcucagccagguugcagaagcggcuuagcguguguccuaaucuucucucugcguguagguaggccugugccgcaaacaagcuuaccauggacgccaugaagcgcggccugugcugcgugcuccugcugugcggggccgucuucgugagccccagcgccuccaaggagaucaagagcuuccuguggacccagucccuccgccgggagcugagcuccuacugcagcaacaucaagcuccagguggucaaggacgcccaggcgcugcugcacggccuggacuucuccgaggugagcaacgugcagcgccucaugcggaaggagcgccgggacgacaacgaccugaagcgccugcgggaccucaaccaggccgucaacaaccugguggagcugaaguccacccagcagaaguccauccuccgcguggggacccugaccuccgacgaccugcucauccuggccgccgaccuggagaagcucaagagcaaggucacccggaccgagcgcccccuguccgccggcguguacauggggaaccugagcucccagcagcucgaccagcggcgcgcgcugcugagcaugaucggcauguccgggagcaaccagggcgcccgggccggccgcgacggggugguccgggugugggacgugaagaacgccgagcuccugaacaaccaguucggcacgaugccgucccugacccucgcgugccugaccaagcaggggcaggucgaccugaacgacgccgugcaggcccucaccgaccugggccugaucuacacggccaaguaccccaacaccagcgaccucgaccgccugacccagagccaccccauccugaacaugaucgacaccaagaaguccagccucaacaucuccggguacaacuucagccugggcgccgcggugaaggccggcgccugcaugcuggacgggggcaacaugcucgagacgaucaaggucagcccccagaccauggacgggauccucaagagcauccugaaggugaagaaggcccugggcauguucaucuccgacaccccgggcgagcggaaccccuacgagaacauccuguacaagaucugccugagcggggacggcuggcccuacaucgccucccgcaccagcaucacggggcgggcgugggagaacaccguggucgaccucgaguccgacggcaagccccagaaggccgggagcaacaacuccaacaagagccugcaguccgccggcuucaccgccggccugaccuacagccagcucaugacgcugaaggacgccaugcugcagcuggacccgaacgcgaagaccuggauggacaucgaggggcgccccgaggaccccguggagguggcccucuaccagcccuccagcggcugcuacauccacuucuuccgggagccgaccgaccugaagcaguucaagcaggacgccaaguacucccacgggaucgacgucaccgaccuguucgccgcccagcccggccucacgagcgcggugaucgacgcccugccccgcaacauggugaucacgugccaggggagcgacgacauccgcaagcugcucgagucccagggccggaaggacaucaagcugaucgacaucgcccugagcaagaccgacucccgcaaguacgagaacgccgucugggaccaguacaaggaccucugccacaugcacaccggcguggucguggagaagaagaagcgcgggggcaaggaggagaucaccccgcacugcgcgcugauggacugcaucauguucgacgccgccgugagcgggggccugaacaccuccguccuccgggccgugcugccccgggacaugguguuccgcaccagcacgccccgggucgugcugugaggacuagucccuguucccagagcccacuuuuuuuucuuuuuuugaaauaaaauagccugucuuucagaucucaaaggcucuuuucagagccaccaaaaaaaaaaaaaaaaaaaaaaaaaaaaaaaaaaaaaaaaaaaaaaaaaaaaaaaaaaaaaaaaaaaaaaaaaaaaaaaaaaaaaaaaaaaaaaaaaaaaa

SEQ ID NO: 18544 - RNA, 2064 nt, Artificial Sequence
  mRNA product Design a-2 (hSL-A100) comprising derived and/or modified sequence from LASV(Mad39;Clade IV)__ANH09723__SP-HsPLAT_NP(2-569) (opt1)
aggagaguccgcucagccagguugcagaagcggcuuagcguguguccuaaucuucucucugcguguagguaggccugugccgcaaacaagcuuaccauggacgccaugaagcgcggccugugcugcgugcuccugcugugcggggccgucuucgugagccccagcgccuccaaggagaucaagagcuuccuguggacccagucccuccgccgggagcugagcggcuacugcuccaacaucaagcuccagguggucaaggacgcccaggcgcugcugcacgggcuggacuucagcgagguguccaacgugcagcgccucaugcggaagcagcgccgggacgacaacgaccugaagcgccugcgggaccucaaccaggccgucaacaaccugguggagcugaaguccacccagcagaaguccgugcuccgcgucggcacgcugaccagcgacgaccugcucacccuggccgccgaccuggagaagcucaaguccaaggugacccggacggagcgcccccugaccgccgggguguacaugggcaaccugagcucccagcagcucgaccagcggcgcgcgcugcugaacaugaucgggaugagcggcggcaaccagggggcccggaccggccgcgacggggucgugcgggugugggacgucaagaacgccgagcuccugaacaaccaguucggcaccaugccgucccugacgcucgccugccugaccaagcagggccagguggaccugaacgacgugguccaggcgcucaccgaccuggggcugaucuacaccgccaaguaccccaacacgagcgaccucgaccgccugacccagucccaccccauccugaacaugaucgacaccaacaagagcucccucaacaucagcggcuacaacuucagccugggggccgccgugaaggccggcgcgugcaugcuggacgggggcaacaugcucgagaccaucaaggugagcccccagacgauggacggcauccucaagagcauccugaaggucaagaagucccuggggauguucaucagcgacaccccgggcgagcggaaccccuacgagaacauccuguacaagaucugccuguccggggacggcuggcccuacaucgccagccgcaccuccaucaccgggcgggccugggagaacacggugguggaccucgagagcggcggcaagccccagaaggccggguccaacaacagcaacaagucccugcagagcgccggcuucgcggccgggcugaccuacucccagcucaugacccugaaggacgccaugcugcagcuggacccgaacgccaagaccuggauggacaucgagggccgccccgaggaccccgucgagaucgcccucuaccagcccaucagcgggugcuacauccacuucuuccgggagccgacggaccugaagcaguucaagcaggacgcgaaguacucccacggcaucgacgugaccgaccuguucgccgcccagcccggccucaccagcgccgugaucgaggcccugccccgcaacauggucaucacgugccagggguccgacgacauccgcaagcuguucgagagccagggccggaaggacaucaagcucaucgacaucgcgcuguccaagaccgacagccgcaaguacgagaacgccgugugggaccaguacaaggaccugugccacaugcacaccggggucgugguggagaagaagaagaagggcgggaaggaggagaucacgccccacugcgcccucauggacugcaucauguucgacgccgcggucagcggcggccugaacacccuggugcuccgggccgugcugccgcgcgacauggucuuccggaccuccacccccaagguggugcugugaggacuagucccuguucccagagcccacuuuuuuuucuuuuuuugaaauaaaauagccugucuuucagaucucaaaggcucuuuucagagccaccaaaaaaaaaaaaaaaaaaaaaaaaaaaaaaaaaaaaaaaaaaaaaaaaaaaaaaaaaaaaaaaaaaaaaaaaaaaaaaaaaaaaaaaaaaaaaaaaaaaaa

SEQ ID NO: 18545 - RNA, 2064 nt, Artificial Sequence
  mRNA product Design a-2 (hSL-A100) comprising derived and/or modified sequence from LASV(Z0947-SLE-2011;Clade IV)__AIT17841__SP-HsPLAT_NP(2-569) (opt1)
aggagaguccgcucagccagguugcagaagcggcuuagcguguguccuaaucuucucucugcguguagguaggccugugccgcaaacaagcuuaccauggacgccaugaagcgcggccugugcugcgugcuccugcugugcggggccgucuucgugagccccagcgccuccaaggagaucaagagcuuccuguggacccagucccuccgccgggagcugagcggcuacugcuccaacaucaagcuccagguggucaaggacgcccaggcgcugcugcacgggcuggacuucagcgagguguccaacgugcagcgccucaugcggaaggagcgccgggacgacaacgaccugaagcgccugcgggaccucaaccaggccgucaacaaccugguggagcucaagagcacccagcagaaguccauccugcgcgugggcacccugaccagcgacgaccugcucauccuggccgccgaccuggagaagcucaaguccaaggucacccggaccgagcgcccccugagcgccgggguguacaugggcaaccuguccagccagcagcucgaccagcggcgcgcgcugcugaacaugaucgggauguccggcagcaaccagggcgcccggacggggcgcgacggcgugguccgggugugggacgugaagaacgccgagcuccugaacaaccaguucgggaccaugccgucccugacccucgccugccugaccaagcagggccaggucgaccugaacgacgcggugcaggcccucacggaccuggggcugaucuacaccgccaaguaccccaacaccagcgaccucgaccgccugacccagucccaccccauccugaacaugaucgacacgaagaaguccagccucaacaucuccggcuacaacuucagccugggcgccgccgugaaggcgggggccugcaugcuggacggcgggaacaugcucgagaccaucaaggucagcccccagaccauggacggcauccucaagagcauccugaaggugaagaaggcccugggcauguucaucuccgacgccccgggggagcggaaccccuacgagaacauccuguacaagaucugccugagcggcgacggguggcccuacaucgccucccgcaccagcaucacgggccgggcgugggagaacaccguggucgaccucgaguccgacgggaagccccagaaggccggcagcaacggcuccaacaagagccugcaguccgccggguucaccgccggccugaccuacagccagcucaugacgcugaaggacgccaugcugcagcuggacccgaacgcgaagaccuggauggacaucgaggggcgccccgaggaccccguggagaucgcccucuaccagcccuccagcggcugcuacauccacuucuuccgggagccgaccgaccugaagcaguucaagcaggacgccaaguacucccacgggaucgacgugaccgaccuguucgccgcccagcccggccucacgagcgcggucaucgacgcccugccccgcaacauggugaucacgugccagggcuccgacgacauccgcaagcuguucgagagccaggggcggaaggacaucaagcucaucgacaucgcccugagcaagaccgacucccgcaaguacgagaacgccgugugggaccaguacaaggaccugugccacaugcacaccggcaucgucguggagaagaagaagcgcgggggcaaggaggagaucaccccgcacugcgcgcucauggacugcaucauguucgacgccgccgucagcgggggccugaacaccuccgugcugcgggccgugcucccccgggacauggucuuccgcaccagcacgccccggguggugcugugaggacuagucccuguucccagagcccacuuuuuuuucuuuuuuugaaauaaaauagccugucuuucagaucucaaaggcucuuuucagagccaccaaaaaaaaaaaaaaaaaaaaaaaaaaaaaaaaaaaaaaaaaaaaaaaaaaaaaaaaaaaaaaaaaaaaaaaaaaaaaaaaaaaaaaaaaaaaaaaaaaaaa

SEQ ID NO: 18546 - RNA, 2064 nt, Artificial Sequence
  mRNA product Design a-2 (hSL-A100) comprising derived and/or modified sequence from LASV(Josiah;Clade IV)__NP_694869__SP-HsPLAT_NP(2-569) (opt4)
aggagaguccgcucagccagguugcagaagcggcuuagcguguguccuaaucuucucucugcguguagguaggccugugccgcaaacaagcuuaccauggacgccaugaagagaggccugugcugcgugcugcugcugugcggcgccguguucgugagccccagcgccagcaaggagaucaagagcuuccuguggacccagagccugagaagagagcugagcggcuacugcagcaacaucaagcugcagguggugaaggacgcccaggcccugcugcacggccuggacuucagcgaggugagcaacgugcagagacugaugagaaaggagagaagagacgacaacgaccugaagagacugagagaccugaaccaggccgugaacaaccugguggagcugaagagcacccagcagaagagcauccugagagugggcacccugaccagcgacgaccugcugauccuggccgccgaccuggagaagcugaagagcaaggugaucagaaccgagagaccccugagcgccggcguguacaugggcaaccugagcagccagcagcuggaccagagaagagcccugcugaacaugaucggcaugagcggcggcaaccagggcgccagagccggcagagacggcguggugagagugugggacgugaagaacgccgagcugcugaacaaccaguucggcaccaugcccagccugacccuggccugccugaccaagcagggccagguggaccugaacgacgccgugcaggcccugaccgaccugggccugaucuacaccgccaaguaccccaacaccagcgaccuggacagacugacccagagccaccccauccugaacaugaucgacaccaagaagagcagccugaacaucagcggcuacaacuucagccugggcgccgccgugaaggccggcgccugcaugcuggacggcggcaacaugcuggagaccaucaaggugagcccccagaccauggacggcauccugaagagcauccugaaggugaagaaggcccugggcauguucaucagcgacacccccggcgagagaaaccccuacgagaacauccuguacaagaucugccugagcggcgacggcuggcccuacaucgccagcagaaccagcaucaccggcagagccugggagaacaccgugguggaccuggagagcgacggcaagccccagaaggccgacagcaacaacagcagcaagagccugcagagcgccggcuucaccgccggccugaccuacagccagcugaugacccugaaggacgccaugcugcagcuggaccccaacgccaagaccuggauggacaucgagggcagacccgaggaccccguggagaucgcccuguaccagcccagcagcggcugcuacauccacuucuucagagagcccaccgaccugaagcaguucaagcaggacgccaaguacagccacggcaucgacgugaccgaccuguucgccacccagcccggccugaccagcgccgugaucgacgcccugcccagaaacauggugaucaccugccagggcagcgacgacaucagaaagcugcuggagagccagggcagaaaggacaucaagcugaucgacaucgcccugagcaagaccgacagcagaaaguacgagaacgccgugugggaccaguacaaggaccugugccacaugcacaccggcguggugguggagaagaagaagagaggcggcaaggaggagaucaccccccacugcgcccugauggacugcaucauguucgacgccgccgugagcggcggccugaacaccagcgugcugagagccgugcugcccagagacaugguguucagaaccagcacccccagaguggugcugugaggacuagucccuguucccagagcccacuuuuuuuucuuuuuuugaaauaaaauagccugucuuucagaucucaaaggcucuuuucagagccaccaaaaaaaaaaaaaaaaaaaaaaaaaaaaaaaaaaaaaaaaaaaaaaaaaaaaaaaaaaaaaaaaaaaaaaaaaaaaaaaaaaaaaaaaaaaaaaaaaaaaa

SEQ ID NO: 18547 - RNA, 2064 nt, Artificial Sequence
  mRNA product Design a-2 (hSL-A100) comprising derived and/or modified sequence from LASV(LP;Clade I)__AAF86702__SP-HsPLAT_NP(2-569) (opt4)
aggagaguccgcucagccagguugcagaagcggcuuagcguguguccuaaucuucucucugcguguagguaggccugugccgcaaacaagcuuaccauggacgccaugaagagaggccugugcugcgugcugcugcugugcggcgccguguucgugagccccagcaacagcaaggagaucaagagcuuccuguggacccagagccugagaagagagcugagcggcuacugcagcaacaucaagcugcagguggugaaggacgcccaggcccugcugcacggccuggacuucagcgaggugagcaacgugcagagacugaugagaaagcagaagagagacgacgccgaccugaagagacugagagaccugaaccaggccgugaacaaccugguggagcugaagagcacccagcagaagaacgugcugagagugggcacccugagcagcgacgaccugaucacccuggccgccgaccuggagaagcugaagagcaaggugaucagaaccgagagaccccugagcagcggcguguacaugggcaaccugagcagccagcagcuggaccagagaagagcccugcugagcaugaucggcaugagcggcggcccccagggcaacagaaccggcggcgacggcguggugagagugugggacgugaagaacgccgagcugcugaacaaccaguucggcaccaugcccagccugacccuggccugccugaccaagcagggccagguggaccugaacgacgccgugcaggcccugaccgaccugggccugaucuacaccgccaaguaccccaacagcagcgaccuggacaugcugacccagagccaccccauccugggcaugguggacaccaagaagagcagccugaacaucagcggcuacaacuucagccugggcgccgccgugaaggccggcgccugcaugcuggacggcggcaacaugcuggagaccaucaaggugagcccccagaccauggacggcauccugaagagcauccugaaggugaagagaagccugggcauguucaucagcgacacccccggcgagagaaaccccuacgagaacauccuguacaagaucugccugagcggcgagggcuggcccuacaucgccagcagaaccagcaucaccggcagagccugggagaacacccugguggaccuggagagcgacaacaagccccccaagcugaacagcgccggcagcaacaagagccugcaggccgccggccugaacgccggccugaccuacagccagcugaugacccugaaggacugcaugcugcagcuggaccccagcagcaagaccuggaucgacaucgagggcagacccgaggaccccguggagaucgcccuguuccagcccagcagcggcugcuacauccacuucuucagagagcccaccgaccugaagcaguucaagcaggacgccaaguacagccacggcaucgacgugaccgaccuguucagcacccagcccggccugaccagcgccgugaucgaggcccugcccagaaacauggugcugaccugccagggcagcgacgacaucaagaagcugcuggagagccagggcagaagagacaucaagcugaucgacaucagccugagcaaggccgacagcagaaaguucgagaacgccgugugggaccaguacaaggaccugugccacaugcacaccggcguggugguggagaagaagaagagaggcggcaaggaggagaucaccccccacugcgcccugcuggacugcaucauguucgacgccgccaccaccggcagccugaacaucaccacccugagagccgugcugcccagagacaugguguucagaaccagcacccccaagguggugcugugaggacuagucccuguucccagagcccacuuuuuuuucuuuuuuugaaauaaaauagccugucuuucagaucucaaaggcucuuuucagagccaccaaaaaaaaaaaaaaaaaaaaaaaaaaaaaaaaaaaaaaaaaaaaaaaaaaaaaaaaaaaaaaaaaaaaaaaaaaaaaaaaaaaaaaaaaaaaaaaaaaaaa

SEQ ID NO: 18548 - RNA, 2064 nt, Artificial Sequence
  mRNA product Design a-2 (hSL-A100) comprising derived and/or modified sequence from LASV(803213;Clade II)__AAF86704__SP-HsPLAT_NP(2-569) (opt4)
aggagaguccgcucagccagguugcagaagcggcuuagcguguguccuaaucuucucucugcguguagguaggccugugccgcaaacaagcuuaccauggacgccaugaagagaggccugugcugcgugcugcugcugugcggcgccguguucgugagccccagcgccagcaaggaggugaagagcuuccuguggacccagagccugagaagagagcugagcggcuacugcagcaacaucaagcugcagguggugaaggacgcccaggcccugcugcacggccuggacuucagcgaggugaacaacgugcagagacugaugagaaagcagaagagagacgacggcgaccugaagagacugagagaccugaaccaggccgugaacaaccugguggagcugaagagcacccagcagaagagcauccugagagugggcacccugaccagcgacgaccugcugacccuggccgccgaccuggagaagcugaagagcaaggugaucagaaccgagagaccccugagcagcggcguguacaugggcaaccugagcacccagcagcuggagcagagaagagcccugcugaacaugaucggcauggugggcggcgcccagggcacccagcccggcagagacggcguggugagagugugggacgugaagaaccccgaccugcugaacaaccaguucggcaccaugcccagccugacccuggccugccugaccaagcagggccagguggaccugaacgacgccgugcuggcccugaccgaccugggccugaucuacaccgccaaguaccccaacagcagcgaccuggacagacugagccagagccaccccauccugaacaugguggacaccaagaagagcagccugaacaucagcggcuacaacuucagccugggcgccgccgugaaggccggcgccugcaugcuggacggcggcaacaugcuggagaccaucaaggugaccccccagaccauggacggcauccugaagagcauccugaaggugaagagaagccugggcauguucgugagcgacacccccggcgagagaaaccccuacgagaacauccuguacaagaucugccugagcggcgacggcuggcccuacaucgccagcagaaccagcaucgugggcagagccugggagaacaccaccguggaccuggagagcgacggcaagccccagaaggugggcaccgccggcagcaacaagagccugcagagcgccggcuuccccaccggccugaccuacagccagcugaugacccugaaggacagcaugaugcagcuggaccccagcgccaagaccuggaucgacaucgagggcagacccgaggaccccguggagaucgcccuguaccagcccaugagcggcugcuacauccacuucuucagagagcccaccgaccugaagcaguucaagcaggacgccaaguacagccacggcaucgacguggccgaccuguuccccgcccagcccggccugaccagcgccgugaucgaggcccugcccagaaacauggugcugaccugccagggcagcgacgacaucaagaagcugcuggacagccagggcagaagagacaucaagcugaucgacaucagccugagcaagguggacagcagaaaguucgagaacgccgugugggaccagugcaaggaccugugccacaugcacaccggcguggugguggagaagaagaagagaggcggcaaggaggagaucaccccccacugcgcccugauggacugcaucauguucgacgccgccgugagcggcggccugaacauccccgugcugagagccgugcugcccagagacaugguguucagaaccagcagccccaagguggugcugugaggacuagucccuguucccagagcccacuuuuuuuucuuuuuuugaaauaaaauagccugucuuucagaucucaaaggcucuuuucagagccaccaaaaaaaaaaaaaaaaaaaaaaaaaaaaaaaaaaaaaaaaaaaaaaaaaaaaaaaaaaaaaaaaaaaaaaaaaaaaaaaaaaaaaaaaaaaaaaaaaaaaa

SEQ ID NO: 18549 - RNA, 2067 nt, Artificial Sequence
  mRNA product Design a-2 (hSL-A100) comprising derived and/or modified sequence from LASV(GA391;Clade III)__CAA36646__SP-HsPLAT_NP(2-570) (opt4)
aggagaguccgcucagccagguugcagaagcggcuuagcguguguccuaaucuucucucugcguguagguaggccugugccgcaaacaagcuuaccauggacgccaugaagagaggccugugcugcgugcugcugcugugcggcgccguguucgugagccccagcgccagcaaggaggugagaagcuuccuguggacccagagccugagaagagagcugagcggcuacugcagcaacaucaagcugcagguggugaaggacgcccaggcccugcugcacggccuggacuucagcgaggugagcaacgugcagagacugaugagaaagcagaagagagacgacggcgaccugaagagacugagagaccugaaccaggccgugaacaaccugguggagcugaagagcacccagcagaagagcgugcugagagugggcacccugagcagcgacgaccugcugauccuggccgccgaccuggagaagcugaagagcaaggugaccagaaccgagagaccccugagcagcggcguguacaugggcaaccugagcagccagcagcuggaccagagaagagcccugcugaacaugaucggcaugaccggcgugagcggcggcggcaagggcgccagcgacggcaucgugagagugugggacgugaagaacgccgagcugcugaacaaccaguucggcaccaugcccagccugacccuggccugccugaccaagcagggccagguggaccugaacgacgccgugcaggcccugaccgaccugggccugaucuacaccgccaaguaccccaacagcagcgaccuggacagacugagccagagccaccccauccugaacaugaucgacaccaagaagagcagccugaacaucagcggcuacaacuucagccugggcgccgccgugaaggccggcgccugcaugcuggacggcggcaacaugcuggagaccaucaaggugagcccccagaccauggacggcauccugaagagcauccugaaggugaagaagagccugggcauguucgugagcgacacccccggcgagagaaaccccuacgagaacauccuguacaagaucugccugagcggcgacggcuggcccuacaucgccagcagaaccagcaucgugggcagagccugggagaacaccgugguggaccuggagcaggacaacaagccccagaagaucggcaacggcggcagcaacaagagccugcagagcgccggcuucgccgccggccugaccuacagccagcugaugacccugaaggacuucaagugcuucaaccugauccccaacgccaagaccuggauggacaucgagggcagacccgaggaccccguggagaucgcccuguaccagcccagcagcggcugcuacgugcacuucuucagagagcccaccgaccugaagcaguucaagcaggacgccaaguacagccacggcaucgacgugaccgaccuguucgccgcccagcccggccugaccagcgccgugaucgaggcccugcccagaaacauggugaucaccugccagggcagcgaggacaucagaaagcugcuggagagccagggcagaagagacaucaagcugaucgacaucacccugagcaaggccgacagcagaaaguucgagaacgccgugugggaccaguucaaggaccugugccacaugcacaccggcguggugguggagaagaagaagagaggcggcaaggaggagaucaccccccacugcgcccugauggacugcaucauguucgacgccgccgugagcggcggccuggacgccaaggugcugagaguggugcugcccagagacaugguguucagaaccagcacccccaagguggugcugugaggacuagucccuguucccagagcccacuuuuuuuucuuuuuuugaaauaaaauagccugucuuucagaucucaaaggcucuuuucagagccaccaaaaaaaaaaaaaaaaaaaaaaaaaaaaaaaaaaaaaaaaaaaaaaaaaaaaaaaaaaaaaaaaaaaaaaaaaaaaaaaaaaaaaaaaaaaaaaaaaaaaa

SEQ ID NO: 18550 - RNA, 2064 nt, Artificial Sequence
  mRNA product Design a-2 (hSL-A100) comprising derived and/or modified sequence from LASV(AV;Clade V)__CCA30315__SP-HsPLAT_NP(2-569) (opt4)
aggagaguccgcucagccagguugcagaagcggcuuagcguguguccuaaucuucucucugcguguagguaggccugugccgcaaacaagcuuaccauggacgccaugaagagaggccugugcugcgugcugcugcugugcggcgccguguucgugagccccagcgccagcaaggaggugaagagcuuccuguggacccagagccugagaagagagcugagcggcuacugcagcaacaucaagcugcagguggugaaggacgcccaggcccugcugcacggccuggacuucagcgaggugagcaacgugcagagacugaugagaaagcagagaagagacgacagcgaccugaagagacugagagaccugaaccaggccgugaacaaccugguggagcugaagagcacccagcagaagagcgugcugagagugggcacccugagcagcgacgaccugcugacccuggccgccgaccuggagaagcugaagagcaaggugaccagaaccgagagaccccugagcagcggcguguacaugggcaaccugagcagccagcagcuggaccagagaagagcccugcugaaccugaucggcaugaccaacggcagccagggcagccaggccggcagagacggcguggugagagugugggacgugaagaacgccgagcugcugaacaaccaguucggcaccaugcccagccugacccuggccugccugaccaagcagggccagguggaccugaacgacguggugcaggcccugaccgaccugggccugaucuacaccgccaaguaccccaacaccagcgaccuggacagacugacccagagccaccccauccugaacaugaucgacaccaagaagagcagccugaacaucagcggcuacaacuucagccugggcgccgccgugaaggccggcgccugcaugcuggacggcggcaacaugcuggagaccaucaaggugagcccccagagcauggacggcauccugaagagcauccugaaggugaagagagcccugggcauguucgugagcgacacccccggcgagagaaaccccuacgagaacauccuguacaagaucugccugagcggcgacggcuggcccuacaucgccagcagaaccagcaucgugggcagagccugggagaacaccgugguggaccuggagaccgacggcaagccccagaagaucggcagcggcaacagcaacaagagccugcagagcgccggcuucagcgccggccugaccuacagccagcugaugacccugaaggacgccaugcugcagcuggaccccaacgccaagaccuggauggacaucgagggcagacccgaggaccccguggagguggcccuguaccagcccaucagcggcugcuacauccacuucuucagagagcccaccgaccugaagcaguucaagcaggacgccaaguacagccacggcaucgacaucgccgaccuguucgccgcccagcccggccugaccagcgccgugaucgaggcccugcccagaaacauggugaucaccugccagggcagcgaggacaucaagaagcugcuggagagccagggcagaaaggacaucaagcugaucgacaucgcccugagcaagaucgacagcagaaaguucgagaacgccgugugggaccaguacaaggaccugugccacaugcacaccggcguggugguggagaagaagaagagaggcggcaaggaggagaucaccccccacugcgcccugauggacugcaucauguucgacgccgccgugagcggcggccugaacacccuggugcugagagccgugcugcccagagacaugguguucagaaccagcacccccagaguggugcugugaggacuagucccuguucccagagcccacuuuuuuuucuuuuuuugaaauaaaauagccugucuuucagaucucaaaggcucuuuucagagccaccaaaaaaaaaaaaaaaaaaaaaaaaaaaaaaaaaaaaaaaaaaaaaaaaaaaaaaaaaaaaaaaaaaaaaaaaaaaaaaaaaaaaaaaaaaaaaaaaaaaaa

SEQ ID NO: 18551 - RNA, 2064 nt, Artificial Sequence
  mRNA product Design a-2 (hSL-A100) comprising derived and/or modified sequence from LASV(Togo/2016/7082;Clade VI)__AMR44578__SP-HsPLAT_NP(2-569) (opt4)
aggagaguccgcucagccagguugcagaagcggcuuagcguguguccuaaucuucucucugcguguagguaggccugugccgcaaacaagcuuaccauggacgccaugaagagaggccugugcugcgugcugcugcugugcggcgccguguucgugagccccagcaacagcaaggaggugaagagcuuccuguggacccagagccugagaagagagcugagcggcuacugcagcaacaucaagcugcagguggugaaggacgcccaggcccugcugcacggccuggacuucagcgaggugagcaacgugcagagacugaugagaaagcagaagagagacgacggcgaccugaagagacugagagaccugaaccaggccgugaacaaccugguggagcugaagagcgugcagcagaagagcauccugagagugggcacccugaccagcgacgaccugcugacccuggccgccgaccuggagaagcugaagagcaaggugaccagaaccgagagaccccugagcagcggcguguacaugggcaaccugagcagccagcagcuggaccagagaagagcccugcugagcaugaucggcaugagcggcggcaaccagaacagccagcccaagggcgacggcguggugagagugugggacgugaagaacgccgaccugcugaacaaccaguucggcaccaugcccagccugacccuggccugccugaccaagcagggccagguggaccugaacgacgccgugcaggcccugaccgaccugggccugaucuacaccgccaaguaccccaacagcagcgaccuggacagacugagccagagccaccccauccugaacaugaucgacaccaagaagagcagccugaacaucagcggcuacaacuucagccugggcgccgccaucaagaccggcgccugcaugcuggacggcggcaacaugcuggagaccaucaaggugaccccccagaccauggacggcauccugaagagcauccugaaggugaagagaagccugggcauguucaucagcgacacccccggcgagagaaaccccuacgagaacauccuguacaagaucugccugagcggcgacggcuggcccuacaucgccagcagaaccgccaucaucggcagagccugggagaacaccgugguggaccuggagagcgacagcaagccccagaagaucggcagcaacggcagcaacaagagccugcagagcgccggcuucgcccccggccugaccuacagccagcugaugacccugaaggacagcaugcugcagcuggaccccaacgccaagaccuggaucgacaucgagggcagacccgaggaccccguggagguggcccuguuccagcccaucagcggcugcuacauccacuucuucagagagcccaccgaccugaagcaguucaagcaggacgccaaguacagccacggcaucgacgugaccgaccuguucgccgcccagcccggccugaccagcgccgugaucgaggcccugcccagaaacauggugcugaccugccagggcagcgacgacaucaagaagcugcuggacagccagggcagaagagacaucaagcugaucgacgugagccugaacaagaucgacagcagaaaguucgagaacgccgugugggaccaguacaaggaccugugccacaugcacaccggcguggugguggagaagaagaagaagggcggcaaggaggagaucaccccccacugcgcccugcuggacugcaucauguucgacgccgccgugagcggcggccugaacgccaccgugcugagagccgugcugcccagagacaugguguucagaaccagcagccccaagguggugcugugaggacuagucccuguucccagagcccacuuuuuuuucuuuuuuugaaauaaaauagccugucuuucagaucucaaaggcucuuuucagagccaccaaaaaaaaaaaaaaaaaaaaaaaaaaaaaaaaaaaaaaaaaaaaaaaaaaaaaaaaaaaaaaaaaaaaaaaaaaaaaaaaaaaaaaaaaaaaaaaaaaaaa

SEQ ID NO: 18552 - RNA, 2064 nt, Artificial Sequence
  mRNA product Design a-2 (hSL-A100) comprising derived and/or modified sequence from LASV(KAK-428;Clade n.d. (VII))__ANH09741__SP-HsPLAT_NP(2-569) (opt4)
aggagaguccgcucagccagguugcagaagcggcuuagcguguguccuaaucuucucucugcguguagguaggccugugccgcaaacaagcuuaccauggacgccaugaagagaggccugugcugcgugcugcugcugugcggcgccguguucgugagccccagcaacagcaaggaggugaagagcuuccuguggacccagagccugagaagagagcugagcggcuacugcaccaacaucaagcugcagguggugaaggacgcccaggcccugcugcacggccuggacuucagcgaggugagcaacgugcagagacugaugagaaagcagaagagagacgacaacgaccugaagagacugagagaccugaaccaggccgugaacaaccugguggagcugaagagcgugcagcagaagagcgugcugaaggugggcacccugaacagcgacgaccugcugacccuggccgccgaccuggagaagcugaagagcaagguggugagaaccgagagaccccugagcagcggcguguacaugggcaaccugagcagccagcagcuggaccagagaagagcccugcugaacaugaucggcauggccggcggcagccagggcaaccagcccagcagagacggcguggugagagugugggacgugaagaacgccgaccugcugaacaaccaguucggcaccaugcccagccugacccuggccugccugaccaagcagggccagguggaccugaacgacguggugcuggcccugaccgaccugggccugaucuacaccgccaaguaccccaacagcagcgaccuggacagacugagccagaaccaccccgugcugaacaugaucgacgugaacaagagcagccugaacaucagcggcuacaacuucagccugggcgccgccgugaaggccggcgccugcaugcuggacggcggcaacaugcuggagaccaucaagaucagcccccagaccguggacggcauccugaagagcauccugaaggugaagagagcccugggcauguucgugagcgacacccccggcgagagaaaccccuacgagaacauccuguacaaggugugccugagcggcaacggcuggcccuacaucgccagcagaaccagcaucgugggcagagccugggagaacaccgugguggaccuggagagcaacaagaaccagcccaaggugggcaacaacggcagcaacaagaugcugcagagcagcggcuucgccaccggccugaccuacagccagcugaugacccugagagacagcaugcugcagcuggaccccaccgccaagaccuggaucgacaucgagggcagacccgaggaccccguggagcuggcccuguuccagcccagcagcggcugcuacauccacuucuucagagagcccaccgaccugaagcaguucaagcaggacgccaaguacagccacggcaucgacgugaacgaccuguucagcgcccagcccggccugaccagcgccgugcuggaggcccugcccagaaacauggugcugaccugccagggcagcgacgacaucagaaagcugcuggacagccaggacagaaaggacaucaagcugaucgacaucagccugagcaaggccgacgccagaaaguucgagaacgacgugugggaccaguucaaggaccugugccacaugcacaccggcaucgugguggagaagaagaagaagggcggcaagcaggagaugaccccccacugcgcccugcuggacugcaucauguucgacgccgccgugagcggcggccugaacgugcccacccugagagccgugcugcccaccgacaugguguucagaaccaucaccaccaagguggugcugugaggacuagucccuguucccagagcccacuuuuuuuucuuuuuuugaaauaaaauagccugucuuucagaucucaaaggcucuuuucagagccaccaaaaaaaaaaaaaaaaaaaaaaaaaaaaaaaaaaaaaaaaaaaaaaaaaaaaaaaaaaaaaaaaaaaaaaaaaaaaaaaaaaaaaaaaaaaaaaaaaaaaa

SEQ ID NO: 18553 - RNA, 2064 nt, Artificial Sequence; identical to SEQ ID NO: 18547
  mRNA product Design a-2 (hSL-A100) comprising derived and/or modified sequence from LASV(Pinneo-NIG-1969;Clade I)__AIT17837__SP-HsPLAT_NP(2-569) (opt4)

SEQ ID NO: 18554 - RNA, 2064 nt, Artificial Sequence
  mRNA product Design a-2 (hSL-A100) comprising derived and/or modified sequence from LASV(ISTH0009-NIG-2011;Clade II)__AIT17405__SP-HsPLAT_NP(2-569) (opt4)
aggagaguccgcucagccagguugcagaagcggcuuagcguguguccuaaucuucucucugcguguagguaggccugugccgcaaacaagcuuaccauggacgccaugaagagaggccugugcugcgugcugcugcugugcggcgccguguucgugagccccagcgugagcaaggaggugaagagcuuccuguggacccagagccugagaagagagcugagcggcuacugcagcaacaucaagcugcagguggugaaggacgcccaggcccugcugcacggccuggacuucagcgaggugagcaacgugcagagacugaugagaaagcagaagagagacgacagcgaccugaagagacugagagaccugaaccaggccgugaacaaccugguggagcugaagagcacccagcagaagagcauccugagagugggcacccugaccagcgacgaccugcugacccuggccgccgaccuggagaagcugaagagcaaggugaucagaaccgagagaccccugagcagcggcguguacaugggcaaccugagcacccagcagcuggagcagagaagagcccugcugaacaugaucggcauggugggcggcgcccagggcacccagcccggcagagacggcguggugagagugugggacgugaagaaccccgaccugcugaacaaccaguucggcaccaugcccagccugacccuggccugccugaccaagcagggccagguggaccugaacgacgccgugcuggcccugaccgaccugggccugaucuacaccgccaaguaccccaacagcagcgaccuggacagacugagccagagccaccccauccugaacaugguggacaucaagaagagcagccugaacaucagcggcuacaacuucagccugggcgccgccgugaaggccggcgccugcaugcuggacggcggcaacaugcuggagaccaucaaggugaccccccagaccauggacggcauccugaagagcauccugaaggugaagagaagccugggcauguucgugagcgacacccccggcgagagaaaccccuacgagaacauccuguacaagaucugccugagcggcgacggcuggcccuacaucgccagcagaaccagcaucgugggcagagccugggagaacaccaccguggaccuggagagcgacggcaagccccagaaggugggcagcgccggcagcaacaagagccugcagagcgccggcuuccccaccggccugaccuacagccagcugaugacccugaaggacagcaugaugcagcuggaccccagcgccaagaccuggaucgacaucgagggcagacccgaggaccccguggagaucgcccuguaccagcccaugagcggcugcuacauccacuucuucagagagcccaccgaccugaagcaguucaagcaggacgccaaguacagccacggcaucgacguggccgaccuguuccccgcccagcccggccugaccagcgccgugaucgaggcccugcccagaaacauggugcugaccugccagggcagcgacgacaucaagagacugcuggacagccagggcagaagagacaucaagcugaucgacaucgcccugagcaaggccgacagcagaagauucgagaacgccgugugggaccagugcaaggaccugugccacaugcacaccggcguggugguggagaagaagaagagaggcggcaaggaggagaucaccccccacugcgcccugauggacugcaucauguacgacgccgccgugagcggcggccugaacauccccgugcugagagccgugcugcccagagacaugguguucagaaccagcagccccaagguggugcugugaggacuagucccuguucccagagcccacuuuuuuuucuuuuuuugaaauaaaauagccugucuuucagaucucaaaggcucuuuucagagccaccaaaaaaaaaaaaaaaaaaaaaaaaaaaaaaaaaaaaaaaaaaaaaaaaaaaaaaaaaaaaaaaaaaaaaaaaaaaaaaaaaaaaaaaaaaaaaaaaaaaaa

SEQ ID NO: 18555 - RNA, 2064 nt, Artificial Sequence
  mRNA product Design a-2 (hSL-A100) comprising derived and/or modified sequence from LASV(ISTH2010-NIG-2012;Clade II)__AIT17483__SP-HsPLAT_NP(2-569) (opt4)
aggagaguccgcucagccagguugcagaagcggcuuagcguguguccuaaucuucucucugcguguagguaggccugugccgcaaacaagcuuaccauggacgccaugaagagaggccugugcugcgugcugcugcugugcggcgccguguucgugagccccagcgccagcaaggaggugaagagcuuccuguggacccagagccugagaagagagcugagcggcuacugcagcaacaucaagcugcagguggugaaggacgcccaggcccugcugcacggccuggacuucagcgaggugagcaacgugcagagacugaugagaaagcagaagagagacgacagcgaccugaagagacugagagaccugaaccaggccgugaacaaccugguggagcugaagagcacccagcagaagagcauccugagagugggcacccugaccagcgacgaccugcugacccuggccgccgaccuggagaagcugaagagcaaggugaucagaaccgagagaccccugagcagcggcguguacaugggcaaccugagcacccagcagcuggagcagagaagagcccugcugaaccugaucggcauggugggcggcgcccagggcacccagcccggcagagacggcguggugagagugugggacgugaagaaccccgaccugcugaacaaccaguucggcaccaugcccagccugacccuggccugccugaccaagcagggccagguggaccugaacgacgccgugcuggcccugaccgaccugggccugaucuacaccgccaaguaccccaacagcagcgaccuggacagacugagccagagccaccccauccugaacaugguggacaccaagaagagcagccugaacaucagcggcuucaacuucagccugggcgccgccgugaaggccggcgccugcaugcuggacggcggcaacaugcuggagaccaucaaggugaccccccagaccauggacggcauccugaagagcauccugaaggugaagaagagccugggcauguucgugagcgacacccccggcgagagaaaccccuacgagaacauccuguacaagaucugccugagcggcgacggcuggcccuacaucgccagcagaaccagcaucgugggcagagccugggagaacaccaccguggaccuggagagcgacggcaagccccacaaggugggcaccgccggcagcaacaagagccugcagagcgccggcuuccccaccggccugaccuacagccagcugaugacccugaaggacagcaugaugcagcuggaccccagcgccaagaccuggaucgacaucgagggcagacccgaggaccccguggagaucgcccuguaccagcccaugagcggcugcuacauccacuucuucagagagcccaccgaccugaagcaguucaagcaggacgccaaguacagccacggcaucgacguggccgaccuguuccccgcccagcccggccugaccagcgccgugaucgaggcccugcccagaaacauggugcugaccugccagggcagcgacgacaucaagagacugcuggacagccagggcagaagagacaucaagcugaucgacaucgcccugagcaaggccgacagcagaagauucgagaacgccgugugggaccagugcaaggaccugugccacaugcacaccggcguggugguggagaagaagaagagaggcggcaaggaggagaucaccccccacugcgcccugauggacugcaucauguacgacgccgccgugagcggcggccugaacauccccgugcugagagccgugcugcccagagacaugguguucagaaccagcagccccaagguggugcugugaggacuagucccuguucccagagcccacuuuuuuuucuuuuuuugaaauaaaauagccugucuuucagaucucaaaggcucuuuucagagccaccaaaaaaaaaaaaaaaaaaaaaaaaaaaaaaaaaaaaaaaaaaaaaaaaaaaaaaaaaaaaaaaaaaaaaaaaaaaaaaaaaaaaaaaaaaaaaaaaaaaaa

SEQ ID NO: 18556 - RNA, 2064 nt, Artificial Sequence
  mRNA product Design a-2 (hSL-A100) comprising derived and/or modified sequence from LASV(Lassa virus/H.sapiens-wt/NGA/2015/ISTH_0543;Clade II)__AVO03640__SP-HsPLAT_NP(2-569) (opt4)
aggagaguccgcucagccagguugcagaagcggcuuagcguguguccuaaucuucucucugcguguagguaggccugugccgcaaacaagcuuaccauggacgccaugaagagaggccugugcugcgugcugcugcugugcggcgccguguucgugagccccagcgccagcaaggaggugaagagcuuccuguggacccagagccugagaagagagcugagcggcuacugcagcaacaucaagcugcagguggugaaggacgcccaggcccugcugcacggccuggacuucagcgaggugagcaacgugcagagacugaugagaaagcagaagagagacgacagcgaccugaagagacugagagaccugaaccaggccgugaacaaccugguggagcugaagagcacccagcagaagagcauccugagagugggcacccugaccagcgacgaccugcugacccuggccgccgaccuggagaagcugaagagcaaggugaucagaaccgagagaccccugagcagcggcguguacaugggcaaccugagcacccagcagcuggagcagagaagagcccugcugaacaugaucggcauggugggcggcgcccagggcacccagcccggcagagacggcguggugagagugugggacgugaagaaccccgaccugcugaacaaccaguucggcaccaugcccagccugacccuggccugccugaccaagcagggccagguggaccugaacgacgccgugcuggcccugaccgaccugggccugaucuacaccgccaaguaccccaacagcagcgaccuggacagacugagccagagccaccccauccugaacaugguggacaccaagaagagcagccugaacaucagcggcuacaacuucagccugggcgccgccgugaaggccggcgccugcaugcuggacggcggcaacaugcuggagaccaucaaggugaccccccagaccauggacggcauccugaagagcauccugaaggugaagaagagccugggcauguucgugagcgacacccccggcgagagaaaccccuacgagaacauccuguacaagaucugccugagcggcgacggcuggcccuacaucgccagcagaaccagcaucgugggcagagccugggagaacaccaccguggaccuggagagcgacggcaagccccagaaggugggcagcgccggcagcaacaagagccugcagagcgccggcuuccccaccggccugaccuacagccagcugaugacccugaaggacagcaugaugcagcuggaccccagcgccaagaccuggaucgacaucgagggcagacccgaggaccccguggagaucgcccuguaccagcccaugagcggcugcuacauccacuucuucagagagcccaccgaccugaagcaguucaagcaggacgccaaguacagccacggcaucgacguggccgaccuguuccccgcccagcccggccugaccagcgccgugaucgaggcccugcccagaaacauggugcugaccugccagggcagcgacgacaucaagagacugcuggacagccagggcagaaaggacaucaagcugaucgacaucgcccugagcaaggccgacagcagaagauucgagaacgccgugugggaccagugcaaggaccugugccacaugcacaccggcguggugguggagaagaagaagagaggcggcaaggaggagaucaccccccacugcgcccugauggacugcaucauguacgacgccgccgugagcggcggccugaacauccccgugcugagagccgugcugcccagagacaugguguucagaaccagcagccccaagguggugcugugaggacuagucccuguucccagagcccacuuuuuuuucuuuuuuugaaauaaaauagccugucuuucagaucucaaaggcucuuuucagagccaccaaaaaaaaaaaaaaaaaaaaaaaaaaaaaaaaaaaaaaaaaaaaaaaaaaaaaaaaaaaaaaaaaaaaaaaaaaaaaaaaaaaaaaaaaaaaaaaaaaaaa

SEQ ID NO: 18557 - RNA, 2064 nt, Artificial Sequence
  mRNA product Design a-2 (hSL-A100) comprising derived and/or modified sequence from LASV(Lassa virus/H.sapiens-wt/NGA/2016/ISTH_0009;Clade II)__AVO03572__SP-HsPLAT_NP(2-569) (opt4)
aggagaguccgcucagccagguugcagaagcggcuuagcguguguccuaaucuucucucugcguguagguaggccugugccgcaaacaagcuuaccauggacgccaugaagagaggccugugcugcgugcugcugcugugcggcgccguguucgugagccccagcgccagcaaggaggugaagagcuuccuguggacccagagccugagaagagagcugagcggcuacugcagcaacaucaagcugcagguggugaaggacgcccaggcccugcugcacggccuggacuucagcgaggugagcaacgugcagagacugaugagaaagcagaagagagacgacagcgaccugaagagacugagagaccugaaccaggccgugaacaaccugguggagcugaagagcacccagcagaagagcauccugagagugggcacccugaccagcgacgaccugcugacccuggccgccgaccuggagaagcugaagagcaaggugaucagaaccgagagaccccugagcagcggcguguacaugggcaaccugagcacccagcagcuggagcagagaagagcccugcugaacaugaucggcauggugggcggcgcccagggcacccagcccggcagagacggcguggugagagugugggacgugaagaaccccgaccugcugaacaaccaguucggcaccaugcccagccugacccuggccugccugaccaagcagggccagguggaccugaacgacgccgugcuggcccugaccgaccugggccugaucuacaccgccaaguaccccaacagcagcgaccuggacagacugagccagagccaccccauccugaacaugguggacaccaagaagagcagccugaacaucagcggcuacaacuucagccugggcgccgccgugaaggccggcgccugcaugcuggacggcggcaacaugcuggagaccaucaaggugaccccccagaccauggacggcauccugaagagcauccugaaggugaagaagagccugggcauguucgugagcgacacccccggcgagagaaaccccuacgagaacauccuguacaagaucugccugagcggcgacggcuggcccuacaucgccagcagaaccagcaucgugggcagagccugggagaacaccaccguggaccuggagagcgacggcaagccccagaaggugggcagcgccggcagcaacaagagccugcagagcgccggcuuccccaccggccugaccuacagccagcugaugacccugaaggacagcaugaugcagcuggaccccagcgccaagaccuggaucgacaucgagggcagacccgaggaccccguggagaucgcccuguaccagcccaugagcggcugcuacauccacuucuucagagagcccaccgaccugaagcaguucaagcaggacgccaaguacagccacggcaucgacguggccgaccuguuccccgcccagcccggccugaccagcgccgugaucgaggcccugcccagaaacauggugcugaccugccagggcagcgacgacaucaagagacugcuggacagccagggcagaagagacaucaagcugaucgacaucgcccugagcaaggccgacagcagaagauucgagaacgccgugugggaccagugcaaggaccugugccacaugcacaccggcguggugguggagaagaagaagagaggcggcaaggaggagaucaccccccacugcgcccugauggacugcaucauguacgacgccgccgugagcggcggccugaacauccccgugcugagagccgugcugcccagagacaugguguucagaaccagcagccccaagguggugcugugaggacuagucccuguucccagagcccacuuuuuuuucuuuuuuugaaauaaaauagccugucuuucagaucucaaaggcucuuuucagagccaccaaaaaaaaaaaaaaaaaaaaaaaaaaaaaaaaaaaaaaaaaaaaaaaaaaaaaaaaaaaaaaaaaaaaaaaaaaaaaaaaaaaaaaaaaaaaaaaaaaaaa

SEQ ID NO: 18558 - RNA, 2064 nt, Artificial Sequence
  mRNA product Design a-2 (hSL-A100) comprising derived and/or modified sequence from LASV(Lassa virus/H.sapiens-wt/NGA/2016/ISTH_0017;Clade II)__AVO03568__SP-HsPLAT_NP(2-569) (opt4)
aggagaguccgcucagccagguugcagaagcggcuuagcguguguccuaaucuucucucugcguguagguaggccugugccgcaaacaagcuuaccauggacgccaugaagagaggccugugcugcgugcugcugcugugcggcgccguguucgugagccccagcgccagcaaggaggugaagagcuuccuguggacccagagccugagaagagagcugagcggcuacugcagcagcaucaagcugcagguggugaaggacgcccaggcccugcugcacggccuggacuucagcgaggugagcaacgugcagagacugaugagaaagcagaagagagacgacagcgaccugaagagacugagagaccugaaccaggccgugaacaaccugguggagcugaagagcacccagcagaagagcauccugagagugggcacccugaccagcgacgaccugcugacccuggccgccgaccuggagaagcugaagagcaaggugaucagaaccgagagaccccugagcagcggcguguacaugggcaaccugagcacccagcagcuggagcagagaagagcccugcugaacaugaucggcauggccggcggcgcccagggcacccagcccggcagagacggcguggugagagugugggacgugaagaaccccgaccugcugaacaaccaguucggcaccaugcccagccugacccuggccugccugaccaagcagggccagguggaccugaacgacgccgugcuggcccugaccgaccugggccugaucuacaccgccaaguaccccaacagcagcgaccuggacagacugagccagagccaccccauccugaacaugguggacaccaagaagagcagccugaacaucagcggcuacaacuucagccugggcgccgccgugaaggccggcgccugcaugcuggacggcggcaacaugcuggagaccaucaaggugaccccccagaccauggacggcauccugaagagcauccugaaggugaagagaagccugggcauguucgugagcgacgcccccggcgagagaaaccccuacgagaacauccuguacaagaucugccugagcggcgacggcuggcccuacaucgccagcagaaccagcaucgugggcagagccugggagaacaccaccguggaccuggagagcgacggcaagccccagaaggugggcgccaccggcagcaacaagagccugcagagcgccggcuuccccaccggccugaccuacagccagcugaugacccugaaggacagcaugaugcagcuggaccccagcgccaagaccuggaucgacaucgagggcagacccgaggaccccguggagguggcccuguaccagcccgugagcggcugcuacauccacuucuucagagagcccaccgaccugaagcaguucaagcaggacgccaaguacagccacggcaucgacguggccgaccuguuccccgcccagcccggccugaccagcgccgugaucgaggcccugcccagaaacauggugcugaccugccagggcagcgacgacaucaagaagcugcuggacagccagggcagaaaggacaucaagcugaucgacaucgcccugagcaaggccgacagcagaagauucgagaacgccgugugggaccagugcaaggaccugugccacaugcacaccggcguggugguggagaagaagaagagaggcggcaaggaggagaucaccccccacugcgcccugauggacugcaucauguacgacgccgccgugagcggcggccugaacauccccgugcugagagccgugcugcccagagacaugguguucagaaccagcagccccaagguggugcugugaggacuagucccuguucccagagcccacuuuuuuuucuuuuuuugaaauaaaauagccugucuuucagaucucaaaggcucuuuucagagccaccaaaaaaaaaaaaaaaaaaaaaaaaaaaaaaaaaaaaaaaaaaaaaaaaaaaaaaaaaaaaaaaaaaaaaaaaaaaaaaaaaaaaaaaaaaaaaaaaaaaaa

SEQ ID NO: 18559 - RNA, 2064 nt, Artificial Sequence
  mRNA product Design a-2 (hSL-A100) comprising derived and/or modified sequence from LASV(Lassa virus/H.sapiens-wt/NGA/2018/ISTH_0959;Clade II)__AVV65100__SP-HsPLAT_NP(2-569) (opt4)
aggagaguccgcucagccagguugcagaagcggcuuagcguguguccuaaucuucucucugcguguagguaggccugugccgcaaacaagcuuaccauggacgccaugaagagaggccugugcugcgugcugcugcugugcggcgccguguucgugagccccagcgccagcaaggaggugaagagcuuccuguggacccagagccugagaagagagcugagcggcuacugcagcaacaucaagcugcagguggugaaggacgcccaggcccugcugcacggccuggacuucagcgaggugagcaacgugcagagacugaugagaaagcagaagagagacgacagcgaccugaagagacugagagaccugaaccaggccgugaacaaccugguggagcugaagagcacccagcagaagagcauccugagagugggcacccugaccagcgacgaccugcugacccuggccgccgaccuggagaagcugaagagcaaggugaucagaaccgagagaccccugagcagcggcguguacaugggcaaccugagcacccagcagcuggagcagagaagagcccugcugaaccugaucggcauggugggcggcgcccagggcacccagcccggcagagacggcguggugagagugugggacgugaagaaccccgaccugcugaacaaccaguucggcaccaugcccagccugacccuggccugccugaccaagcagggccagguggaccugaacgacguggugcuggcccugaccgaccugggccugaucuacaccgccaaguaccccaacagcagcgaccuggacagacugagccagagccaccccauccugaacaugguggacaccaagaagagcagccugaacaucagcggcuucaacuucagccugggcgccgccgugaaggccggcgccugcaugcuggacggcggcaacaugcuggagaccaucaaggugaccccccagaccauggacggcauccugaagagcauccugaaggugaagaagagccugggcauguucgugagcgacacccccggcgagagaaaccccuacgagaacauccuguacaagaucugccugagcggcgacggcuggcccuacaucgccagcagaaccagcaucgugggcagagccugggagaacaccaccguggaccuggagagcgacggcaagccccacaaggugggcaccgccggcagcaacaagagccugcagagcgccggcuuccccaccggccugaccuacagccagcugaugacccugaaggacagcaugaugcagcuggaccccagcgccaagaccuggaucgacaucgagggcagacccgaggaccccguggagaucgcccuguaccagcccaugagcggcugcuacauccacuucuucagagagcccaccgaccugaagcaguucaagcaggacgccaaguacagccacggcaucgacguggccgaccuguuccccgcccagcccggccugaccagcgccgugaucgaggcccugcccagaaacauggugcugaccugccagggcagcgacgacaucaagagacugcuggacagccagggcagaaaggacaucaagcugaucgacaucgcccugagcaagaccgacagcagaagauucgagaacgccgugugggaccagugcaaggaccugugccacaugcacaccggcguggugguggagaagaagaagagaggcggcaaggaggagaucaccccccacugcgcccugauggacugcaucauguacgacgccgccgugagcggcggccugaacauccccgugcugagagccgugcugcccagagacaugguguucagaaccagcagccccaagguggugcugugaggacuagucccuguucccagagcccacuuuuuuuucuuuuuuugaaauaaaauagccugucuuucagaucucaaaggcucuuuucagagccaccaaaaaaaaaaaaaaaaaaaaaaaaaaaaaaaaaaaaaaaaaaaaaaaaaaaaaaaaaaaaaaaaaaaaaaaaaaaaaaaaaaaaaaaaaaaaaaaaaaaaa

SEQ ID NO: 18560 - RNA, 2064 nt, Artificial Sequence
  mRNA product Design a-2 (hSL-A100) comprising derived and/or modified sequence from LASV(LASV003-NIG-2008;Clade II)__AIT17581__SP-HsPLAT_NP(2-569) (opt4)
aggagaguccgcucagccagguugcagaagcggcuuagcguguguccuaaucuucucucugcguguagguaggccugugccgcaaacaagcuuaccauggacgccaugaagagaggccugugcugcgugcugcugcugugcggcgccguguucgugagccccagcgccagcaaggaggugaagagcuuccuguggacccagagccugagaagagagcugagcggcuacugcagcagcaucaagcugcagguggugaaggacgcccaggcccugcugcacggccuggacuucagcgaggugagcaacgugcagagacugaugagaaagcagaagagagacgacagcgaccugaagagacugagagaccugaaccaggccgugaacaaccugguggagcugaagagcacccagcagaagagcgugcugagagugggcacccugaccagcgacgaccugcugacccuggccgccgaccuggagaagcugaagagcaaggugaucagaaccgagagaccccugagcagcggcguguacaugggcaaccugagcgcccagcagcuggagcagagaagaacccugcugaacaugaucggcauggugggcggcgcccagggcacccagcccggcagagacggcguggugagagugugggacgugaagaaccccgaccugcugaacaaccaguucggcaccaugcccagccugacccuggccugccugaccaagcagggccagguggaccugaacgacguggugcuggcccugaccgaccugggccugaucuacaccgccaaguaccccaacagcagcgaccuggacagacugagccagagccaccccauccugagcaugguggacaccaagaagagcagccugaacaucagcggcuacaacuucagccugggcgccgccgugaaggccggcgccugcaugcuggacggcggcaacaugcuggagaccaucaaggugaccccccagaccauggacggcauccugaagagcauccugaaggugaagaagagccugggcauguucgugagcgacacccccggcgagagaaaccccuacgagaacauccuguacaagaucugccugagcggcgacggcuggcccuacaucgccagcagaaccagcaucgugggcagagccugggagaacaccaccguggaccuggagagcgacggcaagccccagaaggugggcaccgccggcagcaacaagagccugcagagcgccggcuuccccaccggccugaccuacagccagcugaugacccugaaggacagcaugaugcagcuggaccccagcgccaagaccuggaucgacaucgagggcagacccgaggaccccguggagaucgcccuguaccagcccaugagcggcugcuacauccacuucuucagagagcccaccgaccugaagcaguucaagcaggacgccaaguacagccacggcaucgacgugaccgaccuguuccccgcccagcccggccugaccagcgccgugaucgaggcccugcccagaaacauggugcugaccugccagggcagcgacgacaucaagagacugcuggacagccagggcagaagagacaucaagcugaucgacaucgcccugagcaaggccgacagcagaagauucgagaacgccgugugggaccagugcaaggaccugugccacaugcacaccggcguggugguggagaagaagaagagaggcggcaaggaggagaucaccccccacugcgcccugauggacugcaucauguacgacgccgccgugagcggcggccugaacauccccgugcugagagccgugcugcccagagacaugguguucagaaccagcagccccaagguggugcugugaggacuagucccuguucccagagcccacuuuuuuuucuuuuuuugaaauaaaauagccugucuuucagaucucaaaggcucuuuucagagccaccaaaaaaaaaaaaaaaaaaaaaaaaaaaaaaaaaaaaaaaaaaaaaaaaaaaaaaaaaaaaaaaaaaaaaaaaaaaaaaaaaaaaaaaaaaaaaaaaaaaaa

SEQ ID NO: 18561 - RNA, 2064 nt, Artificial Sequence
  mRNA product Design a-2 (hSL-A100) comprising derived and/or modified sequence from LASV(LASV035-NIG-2009;Clade II)__AIT17589__SP-HsPLAT_NP(2-569) (opt4)
aggagaguccgcucagccagguugcagaagcggcuuagcguguguccuaaucuucucucugcguguagguaggccugugccgcaaacaagcuuaccauggacgccaugaagagaggccugugcugcgugcugcugcugugcggcgccguguucgugagccccagcgccagcaaggaggugaagagcuuccuguggacccagagccugagaagagagcugagcggcuacugcagcagcaucaagcugcagguggugaaggacgcccaggcccugcugcacggccuggacuucagcgaggugagcaacgugcagagacugaugagaaagcagaagagagacgacagcgaccugaagagacugagagaccugaaccaggccgugaacaaccugguggagcugaagagcacccagcagaagagcauccugagagugggcacccugaccagcgacgaccugcugacccuggccgccgaccuggagaagcugaagagcaaggugaucagaaccgagagaccccugagcagcggcguguacaugggcaaccugagcgcccagcagcuggagcagagaagagcccugcugaacaugaucggcauggugggcggcgcccagggcacccagcccggcagagacggcguggugagagugugggacgugaagaaccccgaccugcugaacaaccaguucggcaccaugcccagccugacccuggccugccugaccaagcagggccagguggaccugaacgacgccgugcuggcccugaccgaccugggccugaucuacaccgccaaguaccccaacagcagcgaccuggacagacugagccagagccaccccauccugaacaugguggacaccaagaagagcagccugaacaucagcggcuacaacuucagccugggcgccgccgugaaggccggcgccugcaugcuggacggcggcaacaugcuggagaccaucaaggugaccccccagaccauggacggcauccugaagagcauccugaaggugaagagaagccugggcauguucgugagcgacacccccggcgagagaaaccccuacgagaacauccuguacaagaucugccugagcggcgacggcuggcccuacaucgccagcagaaccagcaucgugggcagagccugggagaacaccaccguggaccuggagagcgacggcaagccccagaaggugggcaccaccggcagcaacaagagccugcagagcgccggcuuccccaccggccugaccuacagccagcugaugacccugaaggacagcaugaugcagcuggaccccagcgccaagaccuggaucgacaucgagggcagacccgaggaccccguggagaucgcccuguaccagcccaugagcggcugcuacauccacuucuucagagagcccaccgaccugaagcaguucaagcaggacgccaaguacagccacggcaucgacguggccgaccuguuccccgcccagcccggccugaccagcgccgugaucgaggcccugcccagaaacauggugcugaccugccagggcagcgacgacaucaagaagcugcuggacagccagggcagaagagacaucaagcugaucgacaucgcccugagcaaggccgacagcagaaaguucgagaacgccgugugggaccagugcaaggaccugugccacaugcacaccggcguggugguggagaagaagaagagaggcggcaaggaggagaucaccccccacugcgcccugauggacugcaucauguacgacgccgccgugagcggcggccugaacauccccgugcugagagccgugcugcccagagacaugguguucagaaccagcagccccaagguggugcugugaggacuagucccuguucccagagcccacuuuuuuuucuuuuuuugaaauaaaauagccugucuuucagaucucaaaggcucuuuucagagccaccaaaaaaaaaaaaaaaaaaaaaaaaaaaaaaaaaaaaaaaaaaaaaaaaaaaaaaaaaaaaaaaaaaaaaaaaaaaaaaaaaaaaaaaaaaaaaaaaaaaaa

SEQ ID NO: 18562 - RNA, 2064 nt, Artificial Sequence
  mRNA product Design a-2 (hSL-A100) comprising derived and/or modified sequence from LASV(LASV1000-NIG-2009;Clade II)__AIT17783__SP-HsPLAT_NP(2-569) (opt4)
aggagaguccgcucagccagguugcagaagcggcuuagcguguguccuaaucuucucucugcguguagguaggccugugccgcaaacaagcuuaccauggacgccaugaagagaggccugugcugcgugcugcugcugugcggcgccguguucgugagccccagcgccagcaaggaggugaagagcuuccuguggacccagagccugagaagagagcugagcggcuacugcagcaacaucaagcugcagguggugaaggacgcccaggcccugcugcacggccuggacuucagcgaggugagcaacgugcagagacugaugagaaagcagaagagagacgacagcgaccugaagagacugagagaccugaaccaggccgugaacaaccugguggagcugaagagcacccagcagaagagcauccugagagugggcacccugaccagcgacgaccugcugacccuggccgccgaccuggagaagcugaagagcaaggugaucagaaccgagagaccccugagcagcggcguguacaugggcaaccugagcacccagcagcuggagcagagaagagcccugcugaacaugaucggcauggugggcggcgcccagggcacccagcccggcagagacggcguggugagagugugggacgugaagaaccccgaccugcugaacaaccaguucggcaccaugcccagccugacccuggccugccugaccaagcagggccagguggaccugaacgacguggugcuggcccugaccgaccugggccugaucuacaccgccaaguaccccaacagcagcgaccuggacagacugagccagagccaccccauccugaacaugguggacaccaagaagagcagccugaacaucagcggcuacaacuucagccugggcgccgccgugaaggccggcgccugcaugcuggacggcggcaacaugcuggagaccaucaaggugaccccccagaccauggacggcauccugaagagcauccugaaggugaagaagagccugggcauguucgugagcgacacccccggcgagagaaaccccuacgagaacauccuguacaagaucugccugagcggcgacggcuggcccuacaucgccagcagaaccagcaucgugggcagagccugggagaacaccaccguggaccuggagagcgacggcaagccccagaaggugggcaccgccggcagcaacaagagccugcagagcgccggcuuccccaccggccugaccuacagccagcugaugacccugaaggacagcaugaugcagcuggaccccagcgccaagaccuggaucgacaucgagggcagacccgaggaccccguggagaucgcccuguaccagcccgugagcggcugcuacauccacuucuucagagagcccaccgaccugaagcaguucaagcaggacgccaaguacagccacggcaucgacguggccgaccuguuccccgcccagcccggccugaccagcgccgugaucgaggcccugcccagaaacauggugcugaccugccagggcagcgacgacaucaagagacugcuggacagccagggcagaagagacaucaagcugaucgacaucgcccugagcaaggccgacagcagaagauucgagaacgccgugugggaccagugcaaggaccugugccacaugcacaccggcguggugguggagaagaagaagagaggcggcaaggaggagaucaccccccacugcgcccugauggacugcaucauguacgacgccgccgugagcggcggccugaacauccccgugcugagagccgugcugcccagagacaugguguucagaaccagcagccccaagguggugcugugaggacuagucccuguucccagagcccacuuuuuuuucuuuuuuugaaauaaaauagccugucuuucagaucucaaaggcucuuuucagagccaccaaaaaaaaaaaaaaaaaaaaaaaaaaaaaaaaaaaaaaaaaaaaaaaaaaaaaaaaaaaaaaaaaaaaaaaaaaaaaaaaaaaaaaaaaaaaaaaaaaaaa

SEQ ID NO: 18563 - RNA, 2064 nt, Artificial Sequence
  mRNA product Design a-2 (hSL-A100) comprising derived and/or modified sequence from LASV(LASV221-NIG-2010;Clade II)__AIT17625__SP-HsPLAT_NP(2-569) (opt4)
aggagaguccgcucagccagguugcagaagcggcuuagcguguguccuaaucuucucucugcguguagguaggccugugccgcaaacaagcuuaccauggacgccaugaagagaggccugugcugcgugcugcugcugugcggcgccguguucgugagccccagcgccagcaaggaggugaagagcuuccuguggacccagagccugagaagagagcugagcggcuacugcagcagcaucaagcugcagguggugaaggacgcccaggcccugcugcacggccuggacuucagcgaggugagcaacgugcagagacugaugagaaagcagagaagagacgacagcgaccugaagagacugagagaccugaaccaggccgugaacaaccugguggagcugaagagcacccagcagaagagcauccugagagugggcacccugaccagcgacgaccugcugacccuggccgccgaccuggagaagcugaagagcaaggugaucagaaccgagagaccccugagcagcggcguguacaugggcaaccugagcacccagcagcuggagcagagaagagcccugcugaacaugaucggcauggugggcggcgcccagggcacccagcccggcagagacggcguggugagagugugggacgugaagaaccccgaccugcugaacaaccaguucggcaccaugcccagccugacccuggccugccugaccaagcagggccagguggaccugaacgacgccgugcuggcccugaccgaccugggccugaucuacaccgccaaguaccccaacagcagcgaccuggacagacugagccagagccaccccauccugaacaugguggacaccaagaagagcagccugaacaucagcggcuacaacuucagccugggcgccgccgugaaggccggcgccugcaugcuggacggcggcaacaugcuggagaccaucaaggugaccccccagaccguggacggcauccugaagagcauccugaaggugaagagaagccugggcauguucgugagcgacacccccggcgagagaaaccccuacgagaacauccuguacaagaucugccugagcggcgacggcuggcccuacaucgccagcagaaccagcaucgugggcagagccugggagaacaccaccguggaccuggagagcgacggcaagccccagaaggugggcaccgccggcagcaacaagagccugcagagcgccggcuuccccaccggccugaccuacagccagcugaugacccugaaggacagcaugaugcagcuggaccccagcgccaagaccuggaucgacaucgagggcagacccgaggaccccguggagaucgcccuguaccagcccaugagcggcugcuacauccacuucuucagagagcccaccgaccugaagcaguucaagcaggacgccaaguacagccacggcaucgacguggccgaccuguuccccgcccagcccggccugaccagcgccgugaucgaggcccugcccagaaacauggugcugaccugccagggcagcgacgacaucaagagacugcuggacagccagggcagaagagacaucaagcugaucgacaucgcccugagcaaggccgacagcagaaaguucgagaacgccgugugggaccagugcaaggaccugugccacaugcacaccggcguggugguggagaagaagaagagaggcggcaaggaggagaucaccccccacugcgcccugauggacugcaucauguacgacgccgccgugagcggcggccugaacauccccgugcugagagccgugcugcccagagacaugguguucagaaccagcagccccaagguggugcugugaggacuagucccuguucccagagcccacuuuuuuuucuuuuuuugaaauaaaauagccugucuuucagaucucaaaggcucuuuucagagccaccaaaaaaaaaaaaaaaaaaaaaaaaaaaaaaaaaaaaaaaaaaaaaaaaaaaaaaaaaaaaaaaaaaaaaaaaaaaaaaaaaaaaaaaaaaaaaaaaaaaaa

SEQ ID NO: 18564 - RNA, 2064 nt, Artificial Sequence
  mRNA product Design a-2 (hSL-A100) comprising derived and/or modified sequence from LASV(LASV237-NIG-2010;Clade II)__AIT17639__SP-HsPLAT_NP(2-569) (opt4)
aggagaguccgcucagccagguugcagaagcggcuuagcguguguccuaaucuucucucugcguguagguaggccugugccgcaaacaagcuuaccauggacgccaugaagagaggccugugcugcgugcugcugcugugcggcgccguguucgugagccccagcgccagcaaggaggugaagagcuuccuguggacccagagccugagaagagagcugagcggcuacugcagcaacaucaagcugcagguggugaaggacgcccaggcccugcugcacggccuggacuucagcgaggugagcaacgugcagagacugaugagaaagcagaagagagacgacagcgaccugaagagacugagagaccugaaccaggccgugaacaaccugguggagcugaagagcacccagcagaagagcauccugagagugggcacccugaccagcgacgaccugcugacccuggccgccgaccuggagaagcugaagagcaaggugaucagaaccgagagaccccugagcagcggcguguacaugggcaaccugagcacccagcagcuggagcagagaagagcccugcugaacaugaucggcauggugggcggcgcccagggcacccagcccggcagagacggcguggugagagugugggacgugaagaaccccgaccugcugaacaaccaguucggcaccaugcccagccugacccuggccugccugaccaagcagggccagguggaccugaacgacgccgugcuggcccugaccgaccugggccugaucuacaccgccaaguaccccaacagcagcgaccuggacagacugagccagagccaccccauccugaacaugguggacaucaagaagagcagccugaacaucagcggcuacaacuucagccugggcgccgccgugaaggccggcgccugcaugcuggacggcggcaacaugcuggagaccaucaaggugaccccccagaccauggacggcauccugaagagcauccugaaggugaagagaagccugggcauguucgugagcgacacccccggcgagagaaaccccuacgagaacauccuguacaagaucugccugagcggcgacggcuggcccuacaucgccagcagaaccagcaucgugggcagagccugggagaacaccaccguggaccuggagagcgacggcaagccccagaaggugggcagcgccggcagcaacaagagccugcagagcgccggcuuccccaccggccugaccuacagccagcugaugacccugaaggacagcaugaugcagcuggaccccagcgccaagaccuggaucgacaucgagggcagacccgaggaccccguggagaucgcccuguaccagcccaugagcggcugcuacauccacuucuucagagagcccaccgaccugaagcaguucaagcaggacgccaaguacagccacggcaucgacguggccgaccuguuccccgcccagcccggccugaccagcgccgugaucgaggcccugcccagaaacauggugcugaccugccagggcagcgacgacaucaagagacugcuggacagccagggcagaagagacaucaagcugaucgacaucgcccugagcaaggccgacagcagaagauucgagaacgccgugugggaccagugcaaggaccugugccacaugcacaccggcguggugguggagaagaagaagagaggcggcaaggaggagaucaccccccacugcgcccugauggacugcaucauguacgacgccgccgugagcggcggccugaacauccccgugcugagagccgugcugcccagagacaugguguucagaaccagcagccccaagguggugcugugaggacuagucccuguucccagagcccacuuuuuuuucuuuuuuugaaauaaaauagccugucuuucagaucucaaaggcucuuuucagagccaccaaaaaaaaaaaaaaaaaaaaaaaaaaaaaaaaaaaaaaaaaaaaaaaaaaaaaaaaaaaaaaaaaaaaaaaaaaaaaaaaaaaaaaaaaaaaaaaaaaaaa

SEQ ID NO: 18565 - RNA, 2064 nt, Artificial Sequence
  mRNA product Design a-2 (hSL-A100) comprising derived and/or modified sequence from LASV(LASV253-NIG-2011;Clade II)__AIT17671__SP-HsPLAT_NP(2-569) (opt4)
aggagaguccgcucagccagguugcagaagcggcuuagcguguguccuaaucuucucucugcguguagguaggccugugccgcaaacaagcuuaccauggacgccaugaagagaggccugugcugcgugcugcugcugugcggcgccguguucgugagccccagcgccagcaaggaggugaagagcuuccuguggacccagagccugagaagagagcugagcggcuacugcagcagcaucaagcugcagguggugaaggacgcccaggcccugcugcacggccuggacuucagcgaggugagcaacgugcagagacugaugagaaagcagaagagagacgacagcgaccugaagagacugagagaccugaaccaggccgugaacaaccugguggagcugaagagcacccagcagaagagcgugcugagagugggcacccugaccagcgacgaccugcugacccuggccgccgaccuggagaagcugaagagcaaggugaucagaaccgagagaccccugagcagcggcguguacaugggcaaccugagcacccagcagcuggagcagagaagagcccugcugaacaugaucggcauggugggcggcgcccagggcacccagcccggcagagacggcguggugagagugugggacgugaagaaccccgaccugcugaacaaccaguucggcaccaugcccagccugacccuggccugccugaccaagcagggccagguggaccugaacgacguggugcuggcccugaccgaccugggccugaucuacaccgccaaguaccccaacagcagcgaccuggacagacugagccagagccaccccauccugaacaugguggacaccaagaagagcagccugaacaucagcggcuacaacuucagccugggcgccgccgugaaggccggcgccugcaugcuggacggcggcaacaugcuggagaccaucaaggugaccccccagaccauggacggcauccugaagagcauccugaaggugaagaagagccugggcauguucgugagcgacacccccggcgagagaaaccccuacgagaacauccuguacaagaucugccugagcggcgacggcuggcccuacaucgccagcagaaccagcaucgugggcagagccugggagaacaccaccguggaccuggagagcgacggcaagccccagaaggugggcaccgccggcagcaacaagagccugcagagcgccggcuuccccaccggccugaccuacagccagcugaugacccugaaggacagcaugaugcagcuggaccccagcgccaagaccuggaucgacaucgagggcagacccgaggaccccguggagaucgcccuguaccagcccaugagcggcugcuacauccacuucuucagagagcccaccgaccugaagcaguucaagcaggacgccaaguacagccacggcaucgacgugaccgaccuguuccccgcccagcccggccugaccagcgccgugaucgaggcccugcccagaaacauggugcugaccugccagggcagcgacgacaucaagagacugcuggacagccagggcagaagagacaucaagcugaucgacaucgcccugagcaaggccgacagcagaagauucgagaacgccgugugggaccagugcaaggaccugugccacaugcacaccggcguggugguggagaagaagaagagaggcggcaaggaggagaucaccccccacugcgcccugauggacugcaucauguacgacgccgccgugagcggcggccugaacauccccgugcugagagccgugcugcccagagacaugguguucagaaccagcagccccaagguggugcugugaggacuagucccuguucccagagcccacuuuuuuuucuuuuuuugaaauaaaauagccugucuuucagaucucaaaggcucuuuucagagccaccaaaaaaaaaaaaaaaaaaaaaaaaaaaaaaaaaaaaaaaaaaaaaaaaaaaaaaaaaaaaaaaaaaaaaaaaaaaaaaaaaaaaaaaaaaaaaaaaaaaaa

SEQ ID NO: 18566 - RNA, 2064 nt, Artificial Sequence
  mRNA product Design a-2 (hSL-A100) comprising derived and/or modified sequence from LASV(LASV254-NIG-2011;Clade II)__AIT17675__SP-HsPLAT_NP(2-569) (opt4)
aggagaguccgcucagccagguugcagaagcggcuuagcguguguccuaaucuucucucugcguguagguaggccugugccgcaaacaagcuuaccauggacgccaugaagagaggccugugcugcgugcugcugcugugcggcgccguguucgugagccccagcgccagcaaggaggugaagagcuuccuguggacccagagccugagaagagagcugagcggcuacugcagcagcaucaagcugcagguggugaaggacgcccaggcccugcugcacggccuggacuucagcgaggugagcaacgugcagagacugaugagaaagcagaagagagacgacagcgaccugaagagacugagagaccugaaccaggccgugaacaaccugguggagcugaagagcacccagcagaagagcgugcugagagugggcacccugaccagcgacgaccugcugacccuggccgccgaccuggagaagcugaagagcaaggugaucagaaccgagagaccccugagcagcggcguguacaugggcaaccugagcacccagcagcuggagcagagaagagcccugcugaacaugaucggcauggugggcggcgcccagggcacccagcccggcagagacggcguggugagagugugggacgugaagaaccccgaccugcugaacaaccaguucggcaccaugcccagccugacccuggccugccugaccaagcagggccagguggaccugaacgacgccgugcuggcccugaccgaccugggccugaucuacaccgccaaguaccccaacagcagcgaccuggacagacugagccagagccaccccauccugaacaugguggacaccaagaagagcagccugaacaucagcggcuacaacuucagccugggcgccgccgugaaggccggcgccugcaugcuggacggcggcaacaugcuggagaccaucaaggugaccccccagaccauggacggcauccugaagagcauccugaaggugaagaagagccugggcauguucgugagcgacacccccggcgagagaaaccccuacgagaacauccuguacaagaucugccugagcggcgacggcuggcccuacaucgccagcagaaccagcaucgugggcagagccugggagaacaccaucguggaccuggagagcgacggcaagccccagaaggugggcaccgccggcagcaacaagagccugcagagcgccggcuuccccaccggccugaccuacagccagcugaugacccugaaggacagcaugaugcagcuggaccccagcgccaagaccuggaucgacaucgagggcagacccgaggaccccguggagaucgcccuguaccagcccaugagcggcugcuacauccacuucuucagagagcccaccgaccugaagcaguucaagcaggacgccaaguacagccacggcaucgacguggccgaccuguuccccgcccagcccggccugaccagcgccgugaucgaggcccugcccagaaacauggugcugaccugccagggcagcgacgacaucaagagacugcuggacagccagggcagaagagacaucaagcugaucgacaucgcccugagcaaggccgacagcagaagauucgagaacgccgugugggaccagugcaaggaccugugccacaugcacaccggcguggugguggagaagaagaagagaggcggcaaggaggagaucaccccccacugcgcccugauggacugcaucauguacgacgccgccgugagcggcggccugaacauccccgugcugagagccgugcugcccagagacaugguguucagaaccagcagccccaagguggugcugugaggacuagucccuguucccagagcccacuuuuuuuucuuuuuuugaaauaaaauagccugucuuucagaucucaaaggcucuuuucagagccaccaaaaaaaaaaaaaaaaaaaaaaaaaaaaaaaaaaaaaaaaaaaaaaaaaaaaaaaaaaaaaaaaaaaaaaaaaaaaaaaaaaaaaaaaaaaaaaaaaaaaa

SEQ ID NO: 18567 - RNA, 2064 nt, Artificial Sequence
  mRNA product Design a-2 (hSL-A100) comprising derived and/or modified sequence from LASV(Nig08-04;Clade II)__ADU56611__SP-HsPLAT_NP(2-569) (opt4)
aggagaguccgcucagccagguugcagaagcggcuuagcguguguccuaaucuucucucugcguguagguaggccugugccgcaaacaagcuuaccauggacgccaugaagagaggccugugcugcgugcugcugcugugcggcgccguguucgugagccccagcgccagcaaggaggugaagagcuuccuguggacccagagccugagaagagagcugagcggcuacugcagcaacaucaagcugcagguggugaaggacgcccaggcccugcugcacggccuggacuucagcgaggugagcaacgugcagagacugaugagaaagcagaagagagacgacggcgaccugaagagacugagagaccugaaccaggccgugaacaaccugguggagcugaagagcacccagcagaagagcgugcugagagugggcacccugaccagcgacgaccugcugacccuggccgccgaccuggagaagcugaagagcaaggugaucagaaccgagagaccccugagcagcggcguguacaugggcaaccugagcacccagcagcuggagcagagaaaggcccugcugagcaugaucggcauggugggcggcgcccagggcacccagcccggcagagacggcguggugagagugugggacgugaagaaccccgaccugcugaacaaccaguucggcaccaugcccagccugacccuggccugccugaccaagcagggccagguggaccugaacgacgccgugcuggcccugaccgaccugggccugaucuacaccgccaaguaccccaacagcagcgaccuggacagacugagccagagccaccccauccugaacaugguggacaccaagaagagcagccugaacaucagcggcuacaacuucagccugggcgccgccgugaaggccggcgccugcaugcuggacggcggcaacaugcuggagaccaucaaggugaccccccagaccauggacggcauccugaagagcauccugaaggugaagagaagccugggcauguucgugagcgacacccccggcgagagaaaccccuacgagaacauccuguacaagaucugccugagcggcgacggcuggcccuacaucgccagcagaaccagcaucgugggcagagccugggagaacaccaccguggaccuggagagcgacggcaagccccagaaggugggcaccgccggcagcaacaagagccugcagagcgccggcuuccccaccggccugaccuacagccagcugaugacccugaaggacagcaugaugcagcuggaccccagcgccaagaccuggaucgacaucgagggcagacccgaggaccccguggagaucgcccuguaccagcccaugagcggcugcuacauccacuucuucagagagcccaccgaccugaagcaguucaagcaggacgccaaguacagccacggcaucgacgugaccgaccuguucagcgcccagcccggccugaccagcgccgugaucgaggcccugcccagaaacauggugcugaccugccagggcagcgacgacaucaagaagcugcuggacagccagggcagaagagacaucaagcugaucgacaucagccugaacaaggccgacagcagaagauucgagaacgccgugugggaccagugcaaggaccugugccacaugcacaccggcguggugguggagaagaagaagagaggcggcaaggaggagaucaccccccacugcgcccugauggacugcaucauguucgacgccgccgugagcggcggccugaacauccccauccugagagccgugcugcccagagacaugguguucagaaccagcagccccaagguggugcugugaggacuagucccuguucccagagcccacuuuuuuuucuuuuuuugaaauaaaauagccugucuuucagaucucaaaggcucuuuucagagccaccaaaaaaaaaaaaaaaaaaaaaaaaaaaaaaaaaaaaaaaaaaaaaaaaaaaaaaaaaaaaaaaaaaaaaaaaaaaaaaaaaaaaaaaaaaaaaaaaaaaaa

SEQ ID NO: 18568 - RNA, 2067 nt, Artificial Sequence
  mRNA product Design a-2 (hSL-A100) comprising derived and/or modified sequence from LASV(GA391;Clade III)__AAA46284__SP-HsPLAT_NP(2-570) (opt4)
aggagaguccgcucagccagguugcagaagcggcuuagcguguguccuaaucuucucucugcguguagguaggccugugccgcaaacaagcuuaccauggacgccaugaagagaggccugugcugcgugcugcugcugugcggcgccguguucgugagccccagcgccagcaaggaggugagaagcugccuguggacccagagccugagaagagagcugagcggcuacugcagcaacaucaagcugcagguggugaaggacgcccaggcccugcugcacggccuggacuucagcgaggugagcaacgugcagagacugaugagaaagcagaagagagacgacggcgaccugaagagacugagagaccugaaccaggccgugaacaaccugguggagcugaagagcacccagcagaagagcgugcugagagugggcacccugagcagcgacgaccugcugauccuggccgccgaccuggagaagcugaagagcaaggugaccagaaccgagagaccccugagcagcggcguguacaugggcaaccugagcagccagcagcuggaccagagaagagcccugcugaacaugaucggcaugaccggcgugagcggcggcggcaagggcgccagcaacggcaucgugagagugugggacgugaagaacgccgagcugcugaacaaccaguucggcaccaugcccagccugacccuggccugccugaccaagcagggccagguggaccugaacgacgccgugcaggcccugaccgaccugggccugaucuacaccgccaaguaccccaacagcagcgaccuggacagacugagccagagccaccccauccugaacaugaucgacaccaagaagagcagccugaacaucagcggcuacaacuucagccugggcgccgccgugaaggccggcgccugcaugcuggacggcggcaacaugcuggagaccaucaaggugagcccccagaccauggacggcauccugaagagcauccugaaggugaagaagagccugggcauguucgugagcgacacccccggcgagagaaaccccuacgagaacauccuguacaagaucugccugagcggcgacggcuggagcuacaucgccagcagaaccagcaucgugggcagagccugggagaacaccgugguggaccuggagcaggacaacaagccccagaagaucggcaacggcggcagcaacaagagccugcagagcgccggcuucgccgccggccugaucuacagccagcugaugacccugaaggacuucaagugcuucaaccugauccccaacgccaagaccuggauggacaucgagggcagacccgaggaccccguggagaucgcccuguaccagcccagcagcggcugcuacgugcacuucuucagagagcccaccgaccugaagcaguucaagcaggacgccaaguacagccacggcagagacgugaccgaccuguucgccgcccagcccggccugaccagcgccgugaucgaggcccugcccagaaacauggugaucaccugccagggcagcgaggacaucagaaagcugcuggagagccagggcagaagagacaucaagcugaucgacaucacccugagcaaggccgacagcagaaaguucgagaacgccgugugggaccaguucaaggaccugugccacaugcacaccggcguggugguggagaagaagaagagaggcggcaaggaggagaucaccccccacugcgcccugauggacugcaucauguucgacgccgccgugagcggcggccuggacgccaaggugcugagaguggugcugcccagagacaugguguucagaaccagcacccccaagguggugcugugaggacuagucccuguucccagagcccacuuuuuuuucuuuuuuugaaauaaaauagccugucuuucagaucucaaaggcucuuuucagagccaccaaaaaaaaaaaaaaaaaaaaaaaaaaaaaaaaaaaaaaaaaaaaaaaaaaaaaaaaaaaaaaaaaaaaaaaaaaaaaaaaaaaaaaaaaaaaaaaaaaaaa

SEQ ID NO: 18569 - RNA, 2064 nt, Artificial Sequence
  mRNA product Design a-2 (hSL-A100) comprising derived and/or modified sequence from LASV(Nig08-A19;Clade III)__ADU56619__SP-HsPLAT_NP(2-569) (opt4)
aggagaguccgcucagccagguugcagaagcggcuuagcguguguccuaaucuucucucugcguguagguaggccugugccgcaaacaagcuuaccauggacgccaugaagagaggccugugcugcgugcugcugcugugcggcgccguguucgugagccccagcgccagcaaggaggugaagagcuuccuguggacccagagccugagaagagagcugagcggcuacugcagcaacaucaagcugcagguggugaaggacgcccaggcccugcugcacggccuggacuucagcgaggugagcaacgugcagagacugaugagaaagcagaagagagacgacggcgaccugaagagacugagagaccugaaccaggccgugaacaaccugguggagcugaagagcacccagcagaagagcgugcugagagugggcacccugagcagcgacgaccugcuggugcuggccgccgaccuggagaagcugaagagcaagguggugagaaccgagagaccccugagcagcggcaucuacaugggcaaccugagcagccagcagcuggaccagagaaaggcccugcugaacaugaucggcaugaccggcggcaacggcggcagaaacaccaccagcgacggcaucgugagagugugggacgugaagaacgccgagcugcugaacaaccaguucggcaccaugcccagccugacccuggccugccugaccaagcagggccagguggaccugaacgacgccgugcaggcccugaccgaccugggccugaucuacaccgccaaguaccccaacagcagcgaccuggacagacuggcccagagccaccccauccugaacaugaucgacaccaagaagagcagccugaacaucagcggcuacaacuucagccugggcgccgccgugaaggccggcgccugcaugcuggacggcggcaacaugcuggagaccaucaaggugagcccccagaccauggacggcauccugaagagcauccugaaggugaagagaagccugggcauguucaucagcgacacccccggcgagagaaaccccuacgagaacauccuguacaagaucugccugagcggcgacggcuggcccuacaucgccagcagaaccagcaucgugggcagagccugggagaacaccgugguggaccuggagagcgacaacaagccccagaagaccggcaacggcggcagcaacaagagccugcagagcgccggcuucgccgccggccugaccuacagccagcugaugacccugaaggacagcaugcugcagcuggaccccaacgccaagaccuggauggacaucgagggcagacccgaggaccccguggagaucgcccuguaccagcccagcagcggcugcuacauccacuucuucagagagcccaccgaccugaagcaguucaagcaggacgccaaguacagccacggcaucgacgugaccgaccuguucgccgcccagcccggccugaccagcgccgugaucgaggcccugcccagaaacauggugaucaccugccagggcagcgaggacaucagaaagcugcuggagagccagggcagaagagacaucaagcugaucgacaucagccugagcaagguggacagcagaaaguucgagaacgccgugugggaccaguucaaggaccugugccacaugcacaccggcaucgugguggagaagaagaagagaggcggcaaggaggagaucaccccccacugcgcccugauggacugcaucauguucgacgccgccgugagcggcggcguggacgccaaggugcugagagccgugcugcccagagacaugguguucagaaccagcacccccaagguggugcugugaggacuagucccuguucccagagcccacuuuuuuuucuuuuuuugaaauaaaauagccugucuuucagaucucaaaggcucuuuucagagccaccaaaaaaaaaaaaaaaaaaaaaaaaaaaaaaaaaaaaaaaaaaaaaaaaaaaaaaaaaaaaaaaaaaaaaaaaaaaaaaaaaaaaaaaaaaaaaaaaaaaaa

SEQ ID NO: 18570 - RNA, 2064 nt, Artificial Sequence
  mRNA product Design a-2 (hSL-A100) comprising derived and/or modified sequence from LASV(G1180-SLE-2010;Clade IV)__AIT17169__SP-HsPLAT_NP(2-569) (opt4)
aggagaguccgcucagccagguugcagaagcggcuuagcguguguccuaaucuucucucugcguguagguaggccugugccgcaaacaagcuuaccauggacgccaugaagagaggccugugcugcgugcugcugcugugcggcgccguguucgugagccccagcgccagcaaggagaucaagagcuuccuguggacccagagccugagaagagagcugagcggcuacugcagcaacaucaagcugcagguggugaaggacgcccaggcccugcugcacggccuggacuucagcgaggugagcaacgugcagagacugaugagaaaggagagaagagacgacaacgaccugaagagacugagagaccugaaccaggccgugaacaaccugguggagcugaagagcacccagcagaagagcauccugagagugggcacccugaccagcgacgaccugcugauccuggccgccgaccuggagaagcugaagagcaaggugaucagaaccgagagaccccugagcgccggcguguacaugggcaaccugagcagccagcagcuggaccagagaagagcccugcugagcaugaucggcaugagcagcggcaaccagagagcccaggccggcagagacggcguggugagagugugggacgugaagaacguggagcugcugaacaaccaguucggcaccaugcccagccugacccuggccugccugaccaagcagggccagguggaccugaacgacgccgugcaggcccugaccgaccugggccugaucuacaccgccaaguaccccaacaccagcgaccuggacagacugacccagagccaccccauccugaacaugaucgacaccaagaagagcagccugaacaucagcggcuacaacuucagccugggcgccgccgugaaggccggcgccugcaugcuggacggcggcaacaugcuggagaccaucaaggugagcccccagaccauggacggcauccugaagagcauccugaaggugaagaaggcccugggcauguucaucagcgacacccccggcgagagaaaccccuacgagaacauccuguacaagaucugccugagcggcgacggcuggcccuacaucgccagcagaaccagcaucaccggcagagccugggagaacaccgugguggaccuggagagcgacggcaagccccagaaggccggcagcaacaacagcaacaagagccugcagagcgugggcuucaccgccggccugaccuacagccagcugaugacccugaaggacgccaugcugcagcuggaccccaacgccaagaccuggauggacaucgagggcagacccgaggaccccguggagaucgcccuguaccagcccagcagcggcugcuacauccacuucuucagagagcccaccgaccugaagcaguucaagcaggacgccaaguacagccacggcaucgacgugaccgaccuguucgccgcccagcccggccugaccagcgccgugaucgacgcccugcccagaaacauggugaucaccugccagggcagcgacgacaucagaaagcugcuggagagccagggcagaaaggacaucaagcugaucgacaucgcccugagcaagaccgacagcagaaaguacgagaacgccgugugggaccaguacaaggaccugugccacaugcacaccggcguggugguggagaagaagaagagaggcggcaaggaggagaucaccccccacugcgcccugauggacugcaucauguucgacgccgccgugagcggcggccugaacaccagcgugcugagagccgugcugcccagagacaugguguucagaaccagcacccccagaguggugcugugaggacuagucccuguucccagagcccacuuuuuuuucuuuuuuugaaauaaaauagccugucuuucagaucucaaaggcucuuuucagagccaccaaaaaaaaaaaaaaaaaaaaaaaaaaaaaaaaaaaaaaaaaaaaaaaaaaaaaaaaaaaaaaaaaaaaaaaaaaaaaaaaaaaaaaaaaaaaaaaaaaaaa

SEQ ID NO: 18571 - RNA, 2064 nt, Artificial Sequence
  mRNA product Design a-2 (hSL-A100) comprising derived and/or modified sequence from LASV(G1442-SLE-2011;Clade IV)__AIT17181__SP-HsPLAT_NP(2-569) (opt4)
aggagaguccgcucagccagguugcagaagcggcuuagcguguguccuaaucuucucucugcguguagguaggccugugccgcaaacaagcuuaccauggacgccaugaagagaggccugugcugcgugcugcugcugugcggcgccguguucgugagccccagcgccagcaaggaggugaagagcuuccuguggacccagagccugagaagagagcugagcggcuacugcagcaacaucaagcugcagguggugaaggacgcccaggcccugcugcacggccuggacuucagcgaggugagcaacgugcagagacugaugagaaagcagagaagagacgacaacgaccugaagagacugagagaccugaaccaggccgugaacaaccugguggagcugaagagcacccagcagaagagcgugcugagagugggcacccugaccagcgacgaccugcuggugcuggccgccgaccuggagaagcugaagagcaaggugaucagaaccgagagaccccugagcgccggcguguacaugggcaaccugagcagccagcagcuggaccagagaagagcccugcugaacaugaucggcaugagcggcggcauccagggcaccagaaccggcagagacggcguggugagagugugggacgugaagaacgccgaccugcugaacaaccaguucggcaccaugcccagccugacccuggccugccugaccaagcagggccagguggaccugaacgacguggugcaggcccugaccgaccugggccugaucuacaccgccaaguaccccaacgccagcgaccuggacagacugacccagagccaccccauccugaacaugaucgacaccaagaagagcagccugaacaucagcggcuacaacuucagccugggcgccgccgugaaggccggcgccugcaugcuggacggcggcaacaugcuggagaccaucaaggugagcccccagaccauggacggcauccugaagagcauccugaaggugaagaagacccugggcauguucaucagcgacacccccggcgagagaaaccccuacgagaacauccuguacaagaucugccugagcggcgacggcuggcccuacaucgccagcagaaccagcaucaccggcagagccugggagaacaccgugguggaccuggagagcgacggcaagccccagaaggccggcagcaacaacagcaacaagagccugcagagcgccggcuucgccgccggccugaccuacagccagcugaugacccugaaggacgccaugcugcagcuggaccccaacgccaagaccuggauggacaucgagggcagacccgaggaccccguggagaucgcccuguaccagcccagcagcggcugcuacauccacuucuucagagagcccaccgaccugaagcaguucaagcaggacgccaaguacagccacggcaucgacgugaccgaccuguucgccgcccagcccggccugaccagcgccgugaucgaggcccugcccagaaacauggugaucaccugccagggcagcgacgacaucaagaagcugcuggagagccagggcagaaaggacaucaagcugaucgacaucgcccugagcaagaccgacagcagaaaguacgagaacgccgugugggaccaguacaaggaccugugccacaugcacaccggcguggugguggagaagaagaagagaggcggcaaggaggagaucaccccccacugcgcccugauggacugcaucauguucgacgccgccgugagcggcggccugaacacccuggugcugagagccgugcugcccagagacaugguguucagaaccagcacccccagaguggugcugugaggacuagucccuguucccagagcccacuuuuuuuucuuuuuuugaaauaaaauagccugucuuucagaucucaaaggcucuuuucagagccaccaaaaaaaaaaaaaaaaaaaaaaaaaaaaaaaaaaaaaaaaaaaaaaaaaaaaaaaaaaaaaaaaaaaaaaaaaaaaaaaaaaaaaaaaaaaaaaaaaaaaa

SEQ ID NO: 18572 - RNA, 2064 nt, Artificial Sequence
  mRNA product Design a-2 (hSL-A100) comprising derived and/or modified sequence from LASV(G3010-SLE-2013;Clade IV)__AIT17345__SP-HsPLAT_NP(2-569) (opt4)
aggagaguccgcucagccagguugcagaagcggcuuagcguguguccuaaucuucucucugcguguagguaggccugugccgcaaacaagcuuaccauggacgccaugaagagaggccugugcugcgugcugcugcugugcggcgccguguucgugagccccagcgccagcaaggagaucaagagcuuccuguggacccagagccugagaagagagcugagcggcuacugcagcaacaucaagcugcagguggugaaggacgcccaggcccugcugcacggccuggacuucagcgaggugagcaacgugcagagacugaugagaaaggagagaagagacgacaacgaccugaagagacugagagaccugaaccaggccgugaacaaccugguggagcugaagagcacccagcagaagagcauccugagagugggcacccugaccagcgacgaccugcugauccuggccgccgaccuggagaagcugaagagcaaggugaccagaaccgagagaccccugagcgccggcguguacaugggcaaccugagcagccagcagcuggaccagagaagagcccugcugagcaugaucggcaugagcagcggcgugcagggcgccagagccggcagagacggcguggugagagugugggacgugaagaacgccgagcugcugaacaaccaguucggcaccaugcccagccugacccuggccugccugaccaagcagggccagguggaccugaacgacguggugcaggcccugaccgaccugggccugaucuacaccgccaaguaccccaacaccagcgaccuggacagacugacccagagccaccccauccugaacaugaucgacaccaagaagagcagccugaacaucagcggcuacaacuucagccugggcgccgccgugaaggccggcgccugcaugcuggacggcggcaacaugcuggagaccaucaaggugagcccccagaccauggacggcauccugaagagcauccugaaggugaagaaggcccugggcauguucaucagcgagacccccggcgagagaaaccccuacgagaacauccuguacaagaucugccugagcggcgacggcuggcccuacaucgccagcagaaccagcaucaccggcagagccugggagaacaccgugguggaccuggagagcgacggcaagccccagaaggccggcagcaacaacagcaacaagagccugcagagcgccggcuucaccgccggccugaccuacagccagcugaugacccugaaggacgccaugcugcagcuggaccccaacgccaagaccuggauggacaucgagggcagacccgaggaccccguggagguggcccuguaccagcccagcagcggcugcuacauccacuucuucagagagcccaccgaccugaagcaguucaagcaggacgccaaguacagccacggcaucgacgugaccgaccuguucgccgcccagcccggccugaccagcgccgugaucgacgcccugcccagaaacauggugaucaccugccagggcagcgacgacaucaagaagcugcuggagagccagggcagaaaggacaucaagcugaucgacaucgcccugagcaagaccgacagcagaaaguacgagaacgccgugugggaccaguacaaggaccugugccacaugcacaccggcguggugguggagaagaagaagagaggcggcaaggaggagaucaccccccacugcgcccugauggacugcaucauguucgacgccgccgugagcggcggccugaacaccagcgugcugagagccgugcugcccagagacaugguguucagaaccagcacccccagaguggugcugugaggacuagucccuguucccagagcccacuuuuuuuucuuuuuuugaaauaaaauagccugucuuucagaucucaaaggcucuuuucagagccaccaaaaaaaaaaaaaaaaaaaaaaaaaaaaaaaaaaaaaaaaaaaaaaaaaaaaaaaaaaaaaaaaaaaaaaaaaaaaaaaaaaaaaaaaaaaaaaaaaaaaa

SEQ ID NO: 18573 - RNA, 2064 nt, Artificial Sequence
  mRNA product Design a-2 (hSL-A100) comprising derived and/or modified sequence from LASV(G502-SLE-2009;Clade IV)__AIT17127__SP-HsPLAT_NP(2-569) (opt4)
aggagaguccgcucagccagguugcagaagcggcuuagcguguguccuaaucuucucucugcguguagguaggccugugccgcaaacaagcuuaccauggacgccaugaagagaggccugugcugcgugcugcugcugugcggcgccguguucgugagccccagcgccagcaaggagaucaagagcuuccuguggacccagagccugagaagagagcugagcggcuacugcagcaacaucaagcugcagguggugaaggacgcccaggcccugcugcacggccuggacuucagcgaggugagcaacgugcagagacugaugagaaaggagagaagagacgacaacgaccugaagagacugagagaccugaaccaggccgugaacaaccugguggagcugaagagcacccagcagaagagcauccugagagugggcacccugaccagcgacgaccugcugauccuggccgccgaccuggagaagcugaagagcaaggugaucagaaccgagagaccccugagcgccggcguguacaugggcaaccugagcagccagcagcuggaccagagaagagcccugcugagcaugaucggcaugagcggcggcaaccagggcgugagagccggcaaggacggcguggugagagugugggacgugaagaacgccgagcugcugaacaaccaguucggcaccaugcccagccugacccuggccugccugaccaagcagggccagguggaccugaacgacgccgugcaggcccugaccgaccugggccugaucuacaccgccaaguaccccaacaccagcgaccuggacagacugacccagagccaccccauccugaacaugaucgacaccaagaagagcagccugaacaucagcggcuacaacuucagccugggcgccgccgugaaggccggcgccugcaugcuggacggcggcaacaugcuggagaccaucaaggugagcccccagaccauggacggcauccugaagagcauccugaaggugaagaaggcccugggcauguucaucagcgacacccccggcgagagaaaccccuacgagaacauccuguacaagaucugccugagcggcgacggcuggcccuacaucgccagcagaaccagcaucaccggcagagccugggagaacaccgugguggaccuggagagcgacggcaagccccagaaggccggcagcaacaacagcaacaagagccugcagagcgccggcuucaccgccggccugaccuacagccagcugaugacccugaaggacgccaugcugcagcuggaccccaacaccaagaccuggauggacaucgagggcagacccgaggaccccguggagaucgcccuguaccagcccagcagcggcugcuacauccacuucuucagagagcccaccgaccugaagcaguucaagcaggacgccaaguacagccacggcaucgacgugaccgaccuguucgccgcccagcccggccugaccagcgccgugaucgacgcccugcccagaaacauggugaucaccugccagggcagcgacgacaucagaaagcugcuggagagccagggcagaaaggacaucaagcugaucgacaucgcccugaacaagaccgacagcagaaaguacgagaacgccgugugggaccaguacaaggaccugugccacaugcacaccggcguggugguggagaagaagaagagaggcggcaaggaggagaucaccccccacugcgcccugauggacugcaucauguucgacgccgccgugagcggcggccugaacaccagcgugcugagagccgugcugcccagagacaugguguucagaaccagcacccccagaguggugcugugaggacuagucccuguucccagagcccacuuuuuuuucuuuuuuugaaauaaaauagccugucuuucagaucucaaaggcucuuuucagagccaccaaaaaaaaaaaaaaaaaaaaaaaaaaaaaaaaaaaaaaaaaaaaaaaaaaaaaaaaaaaaaaaaaaaaaaaaaaaaaaaaaaaaaaaaaaaaaaaaaaaaa

SEQ ID NO: 18574 - RNA, 2064 nt, Artificial Sequence
  mRNA product Design a-2 (hSL-A100) comprising derived and/or modified sequence from LASV(G733-SLE-2010;Clade IV)__AIT17155__SP-HsPLAT_NP(2-569) (opt4)
aggagaguccgcucagccagguugcagaagcggcuuagcguguguccuaaucuucucucugcguguagguaggccugugccgcaaacaagcuuaccauggacgccaugaagagaggccugugcugcgugcugcugcugugcggcgccguguucgugagccccagcgccagcaaggagaucaagagcuuccuguggacccagagccugagaagagagcugagcggcuacugcagcaacaucaagcugcagguggugaaggacgcccaggcccugcugcacggccuggacuucagcgaggugagcaacgugcagagacugaugagaaaggagagaagagacgacaacgaccugaagagacugagagaccugaaccaggccgugaacaaccugguggagcugaagagcacccagcagaagagcgugcugagagugggcacccugaccagcgacgagcugcuggugcuggccgccgaccuggagaagcugaagagcaaggugaucagaaccgagagaccccugagcgccggcguguacaugggcaaccugagcagccagcagcuggaccagagaagagcccugcugagcaugaucggcaugagcggcggcaaccagggcgccagaaccggcagagacggcguggugagagugugggacgugaagaacgccgagcugcugaacaaccaguucggcaccaugcccagccugacccuggccugccugaccaagcagggccagguggaccugaacgacgccgugcaggcccugaccgaccugggccugaucuacaccgccaaguaccccaacaccagcgaccuggacagacugacccagagccaccccauccugaacaugaucgacaccaagaagagcagccugaacaucagcggcuacaacuucagccugggcgccgccgugaaggccggcgccugcaugcuggacggcggcaacaugcuggagaccaucaaggugagcccccagaccauggacggcauccugaagagcauccugaaggugaagaaggcccugggcauguucaucagcgacacccccggcgagagaaaccccuacgagaacauccuguacaagaucugccugagcggcgacggcuggcccuacaucgccagcagaaccagcaucaccggcagagccugggagaacaccgugguggaccuggagagcgacggcaagccccagaaggccggcagcaacaacagcaacaagagccugcagagcgccggcuucaccgccggccugaccuacagccagcugaugacccugaaggacgccaugcugcagcuggaccccaacgccaagaccuggauggacaucgagggcagacccgaggaccccguggagaucgcccuguaccagcccagcagcggcugcuacauccacuucuucagagagcccaccgaccugaagcaguucaagcaggacgccaaguacagccacggcaucgacgugaccgaccuguucgccgcccagcccggccugaccagcgccgugaucgacgcccugcccagaaacauggugaucaccugccagggcagcgacgacaucagaaagcugcuggagagccagggcagaaaggacaucaagcugaucgacaucgcccugagcaagaucgacagcagaaaguacgagaacgccgugugggaccaguacaaggaccugugccacaugcacaccggcguggugguggagaagaagaagagaggcggcaaggaggagaucaccccccacugcgcccugauggacugcaucauguucgacgccgccgugagcggcggccugaacagccuggugcugagagccgugcugcccagagacaugguguucagaaccagcacccccagaguggugcugugaggacuagucccuguucccagagcccacuuuuuuuucuuuuuuugaaauaaaauagccugucuuucagaucucaaaggcucuuuucagagccaccaaaaaaaaaaaaaaaaaaaaaaaaaaaaaaaaaaaaaaaaaaaaaaaaaaaaaaaaaaaaaaaaaaaaaaaaaaaaaaaaaaaaaaaaaaaaaaaaaaaaa

SEQ ID NO: 18575 - RNA, 2064 nt, Artificial Sequence
  mRNA product Design a-2 (hSL-A100) comprising derived and/or modified sequence from MOPV/LASV reassortant(IGS-1;Clade IV)__AFY05578__SP-HsPLAT_NP(2-569) (opt4)
aggagaguccgcucagccagguugcagaagcggcuuagcguguguccuaaucuucucucugcguguagguaggccugugccgcaaacaagcuuaccauggacgccaugaagagaggccugugcugcgugcugcugcugugcggcgccguguucgugagccccagcgccagcaaggagaucaagagcuuccuguggacccagagccugagaagagagcugagcggcuacugcagcaacaucaagcugcagguggugaaggacgcccaggcccugcugcacggccuggacuucagcgaggugagcaacgugcagagacugaugagaaaggagagaagagacgacaacgaccugaagagacugagagaccugaaccaggccgugaacaaccugguggagcugaagagcacccagcagaagagcauccugagagugggcacccugaccagcgacgaccugcugauccuggccgccgaccuggagaagcugagaagcaaggugaucagaaccgagagaccccugagcgccggcguguacaugggcaaccugagcagccagcagcuggaccagagaagagcccugcugaacaugaucggcaugagcggcggcaaccagggcgccagagccggcagagacggcguggugagagugugggacgugaagaacgccgagcugcugagcaaccaguucggcaccaugcccagccugacccuggccugccugaccaagcagggccagguggaccugaacgacgccgugcaggcccugaccgaccugggccugaucuacaccgccaaguaccccaacaccagcgaccuggacagacugacccagagccaccccauccugaacaugaucgacaccaagaagagcagccugaacaucagcggcuacaacuucagccugggcgccgccgugaaggccggcgccugcaugcuggacggcggcaacaugcuggagaccaucaaggugagcccccagaccauggacggcauccugaagagcauccugaaggugaagaaggcccugggcauguucaucagcgacacccccggcgagagaaaccccuacgagaacauccuguacaagaucugccugagcggcgacggcuggcccuacaucgccagcagaaccagcaucaccggcagagccugggagaacaccgugguggaccuggagagcgacggcaagccccagaaggccgacagcaacaacagcagcaagagccugcagagcgccggcuucaccgccggccugaccuacagccagcugaugacccugaaggacgccaugcugcagcuggaccccaacgccaagaccuggauggacaucgagggcagacccgaggaccccguggagaucgcccuguaccagcccagcagcggcugcuacauccacuucuucagagagcccaccgaccugaagcaguucaagcaggacgccaaguacagccacggcaucgacgugaccgaccuguucgccacccagcccggccugaccagcgccgugaucgacgcccugcccagaaacauggugaucaccugccagggcagcgacgacaucagaaagcugcuggagagccagggcagaaaggacaucaagcugaucgacaucgaccugagcaagaccgacagcagaaaguacgagaacgccgugugggaccaguacaaggaccugugccacaugcacaccggcguggugguggagaagaagaagagaggcggcaaggaggagaucaccccccacugcgcccugauggacugcaucauguucgacgccgccgugagcggcggccugaacaccagcgugcugagagccgugcugcccagagacaugguguucagaaccagcacccccagaguggugcugugaggacuagucccuguucccagagcccacuuuuuuuucuuuuuuugaaauaaaauagccugucuuucagaucucaaaggcucuuuucagagccaccaaaaaaaaaaaaaaaaaaaaaaaaaaaaaaaaaaaaaaaaaaaaaaaaaaaaaaaaaaaaaaaaaaaaaaaaaaaaaaaaaaaaaaaaaaaaaaaaaaaaa

SEQ ID NO: 18576 - RNA, 2064 nt, Artificial Sequence
  mRNA product Design a-2 (hSL-A100) comprising derived and/or modified sequence from LASV(LM765-SLE-2012;Clade IV)__AIT17815__SP-HsPLAT_NP(2-569) (opt4)
aggagaguccgcucagccagguugcagaagcggcuuagcguguguccuaaucuucucucugcguguagguaggccugugccgcaaacaagcuuaccauggacgccaugaagagaggccugugcugcgugcugcugcugugcggcgccguguucgugagccccagcgccagcaaggagaucaagagcuuccuguggacccagagccugagaagagagcugagcggcuacugcagcaacaucaagcugcagguggugaaggacgcccaggcccugcugcacggccuggacuucagcgaggugagcaacgugcagagacugaugagaaaggagagaagagacgacaacgaccugaagagacugagagaccugaaccaggccgugaacaaccugguggagcugaagagcacccagcagaagagcauccugagagugggcacccugaccagcgacgaccugcugauccuggccgccgaccuggagaagcugaagagcaaggugaccagaaccgagagaccccugagcgccggcguguacaugggcaaccugagcagccagcagcuggaccagagaagagcccugcuggacaugaucggcaugagcggcagcaaccagggcgccagagccggcagagacggcguggugagagugugggacgugaagaacgccgagcugcugaacaaccaguucggcaccaugcccagccugacccuggccugccugaccaagcagggccagguggaccugaacgacgccgugcaggcccugaccgaccugggccugaucuacaccgccaaguaccccaacaccagcgaccuggacagacugacccagagccaccccauccugaacaugaucgacaccaagaagagcagccugaacaucagcggcuacaacuucagccugggcgccgccgugaaggccggcgccugcaugcuggacggcggcaacaugcuggagaccaucaaggugagcccccagaccauggacggcauccugaagagcauccugaaggugaagaaggcccugggcauguucaucagcgacgcccccggcgagagaaaccccuacgagaacauccuguacaagaucugccugagcggcgacggcuggcccuacaucgccagcagaaccagcaucaccggcagagccugggagaacaccgugguggaccuggagagcgacggcaagccccagaaggccggcagcaacggcagcaacaagagccugcagagcgccggcuucaccgccggccugaccuacagccagcugaugacccugaaggacgccaugcugcagcuggaccccaacgccaagaccuggauggacaucgagggcagacccgaggaccccguggagaucgcccuguaccagcccagcagcggcugcuacauccacuucuucagagagcccaccgaccugaagcaguucaagcaggacgccaaguacagccacggcaucgacgugaccgaccuguucgccgcccagcccggccugaccagcgccgugaucgacgcccugcccagaaacauggugaucaccugccagggcagcgacgacaucagaaagcuguucgagagccagggcagaaaggacaucaagcugaucgacaucgcccugagcaagaccgacagcagaaaguacgagaacgccgugugggaccaguacaaggaccugugccacaugcacaccggcaucgugguggagaagaagaagagaggcggcaaggaggagaucaccccccacugcgcccugauggacugcaucauguucgacgccgccgugagcggcggccugaacaccagcgugcugagagccgugcugcccagagacaugguguucagaaccagcacccccagaguggugcugugaggacuagucccuguucccagagcccacuuuuuuuucuuuuuuugaaauaaaauagccugucuuucagaucucaaaggcucuuuucagagccaccaaaaaaaaaaaaaaaaaaaaaaaaaaaaaaaaaaaaaaaaaaaaaaaaaaaaaaaaaaaaaaaaaaaaaaaaaaaaaaaaaaaaaaaaaaaaaaaaaaaaa

SEQ ID NO: 18577 - RNA, 2064 nt, Artificial Sequence
  mRNA product Design a-2 (hSL-A100) comprising derived and/or modified sequence from LASV(LM776-SLE-2012;Clade IV)__AIT17825__SP-HsPLAT_NP(2-569) (opt4)
aggagaguccgcucagccagguugcagaagcggcuuagcguguguccuaaucuucucucugcguguagguaggccugugccgcaaacaagcuuaccauggacgccaugaagagaggccugugcugcgugcugcugcugugcggcgccguguucgugagccccagcgccagcaaggagaucaagagcuuccuguggacccagagccugagaagagagcugagcagcuacugcagcaacaucaagcugcagguggugaaggacgcccaggcccugcugcacggccuggacuucagcgaggugagcaacgugcagagacugaugagaaaggagagaagagacgacaacgaccugaagagacugagagaccugaaccaggccgugaacaaccugguggagcugaagagcacccagcagaagagcauccugagagugggcacccugaccagcgacgaccugcugauccuggccgccgaccuggagaagcugaagagcaaggugaccagaaccgagagaccccugagcgccggcguguacaugggcaaccugagcagccagcagcuggaccagagaagagcccugcugagcaugaucggcaugagcggcagcaaccagggcgccagagccggcagagacggcguggugagagugugggacgugaagaacgccgagcugcugaacaaccaguucggcaccaugcccagccugacccuggccugccugaccaagcagggccagguggaccugaacgacgccgugcaggcccugaccgaccugggccugaucuacaccgccaaguaccccaacaccagcgaccuggacagacugacccagagccaccccauccugaacaugaucgacaccaagaagagcagccugaacaucagcggcuacaacuucagccugggcgccgccgugaaggccggcgccugcaugcuggacggcggcaacaugcuggagaccaucaaggugagcccccagaccauggacggcauccugaagagcauccugaaggugaagaaggcccugggcauguucaucagcgacacccccggcgagagaaaccccuacgagaacauccuguacaagaucugccugagcggcgacggcuggcccuacaucgccagcagaaccagcaucaccggcagagccugggagaacaccgugguggaccuggagagcgacggcaagccccagaaggccggcagcaacaacagcaacaagagccugcagagcgccggcuucaccgccggccugaccuacagccagcugaugacccugaaggacgccaugcugcagcuggaccccaacgccaagaccuggauggacaucgagggcagacccgaggaccccguggagguggcccuguaccagcccagcagcggcugcuacauccacuucuucagagagcccaccgaccugaagcaguucaagcaggacgccaaguacagccacggcaucgacgugaccgaccuguucgccgcccagcccggccugaccagcgccgugaucgacgcccugcccagaaacauggugaucaccugccagggcagcgacgacaucagaaagcugcuggagagccagggcagaaaggacaucaagcugaucgacaucgcccugagcaagaccgacagcagaaaguacgagaacgccgugugggaccaguacaaggaccugugccacaugcacaccggcguggugguggagaagaagaagagaggcggcaaggaggagaucaccccccacugcgcccugauggacugcaucauguucgacgccgccgugagcggcggccugaacaccagcgugcugagagccgugcugcccagagacaugguguucagaaccagcacccccagaguggugcugugaggacuagucccuguucccagagcccacuuuuuuuucuuuuuuugaaauaaaauagccugucuuucagaucucaaaggcucuuuucagagccaccaaaaaaaaaaaaaaaaaaaaaaaaaaaaaaaaaaaaaaaaaaaaaaaaaaaaaaaaaaaaaaaaaaaaaaaaaaaaaaaaaaaaaaaaaaaaaaaaaaaaa

SEQ ID NO: 18578 - RNA, 2064 nt, Artificial Sequence
  mRNA product Design a-2 (hSL-A100) comprising derived and/or modified sequence from LASV(Mad39;Clade IV)__ANH09723__SP-HsPLAT_NP(2-569) (opt4)
aggagaguccgcucagccagguugcagaagcggcuuagcguguguccuaaucuucucucugcguguagguaggccugugccgcaaacaagcuuaccauggacgccaugaagagaggccugugcugcgugcugcugcugugcggcgccguguucgugagccccagcgccagcaaggagaucaagagcuuccuguggacccagagccugagaagagagcugagcggcuacugcagcaacaucaagcugcagguggugaaggacgcccaggcccugcugcacggccuggacuucagcgaggugagcaacgugcagagacugaugagaaagcagagaagagacgacaacgaccugaagagacugagagaccugaaccaggccgugaacaaccugguggagcugaagagcacccagcagaagagcgugcugagagugggcacccugaccagcgacgaccugcugacccuggccgccgaccuggagaagcugaagagcaaggugaccagaaccgagagaccccugaccgccggcguguacaugggcaaccugagcagccagcagcuggaccagagaagagcccugcugaacaugaucggcaugagcggcggcaaccagggcgccagaaccggcagagacggcguggugagagugugggacgugaagaacgccgagcugcugaacaaccaguucggcaccaugcccagccugacccuggccugccugaccaagcagggccagguggaccugaacgacguggugcaggcccugaccgaccugggccugaucuacaccgccaaguaccccaacaccagcgaccuggacagacugacccagagccaccccauccugaacaugaucgacaccaacaagagcagccugaacaucagcggcuacaacuucagccugggcgccgccgugaaggccggcgccugcaugcuggacggcggcaacaugcuggagaccaucaaggugagcccccagaccauggacggcauccugaagagcauccugaaggugaagaagagccugggcauguucaucagcgacacccccggcgagagaaaccccuacgagaacauccuguacaagaucugccugagcggcgacggcuggcccuacaucgccagcagaaccagcaucaccggcagagccugggagaacaccgugguggaccuggagagcggcggcaagccccagaaggccggcagcaacaacagcaacaagagccugcagagcgccggcuucgccgccggccugaccuacagccagcugaugacccugaaggacgccaugcugcagcuggaccccaacgccaagaccuggauggacaucgagggcagacccgaggaccccguggagaucgcccuguaccagcccaucagcggcugcuacauccacuucuucagagagcccaccgaccugaagcaguucaagcaggacgccaaguacagccacggcaucgacgugaccgaccuguucgccgcccagcccggccugaccagcgccgugaucgaggcccugcccagaaacauggugaucaccugccagggcagcgacgacaucagaaagcuguucgagagccagggcagaaaggacaucaagcugaucgacaucgcccugagcaagaccgacagcagaaaguacgagaacgccgugugggaccaguacaaggaccugugccacaugcacaccggcguggugguggagaagaagaagaagggcggcaaggaggagaucaccccccacugcgcccugauggacugcaucauguucgacgccgccgugagcggcggccugaacacccuggugcugagagccgugcugcccagagacaugguguucagaaccagcacccccaagguggugcugugaggacuagucccuguucccagagcccacuuuuuuuucuuuuuuugaaauaaaauagccugucuuucagaucucaaaggcucuuuucagagccaccaaaaaaaaaaaaaaaaaaaaaaaaaaaaaaaaaaaaaaaaaaaaaaaaaaaaaaaaaaaaaaaaaaaaaaaaaaaaaaaaaaaaaaaaaaaaaaaaaaaaa

SEQ ID NO: 18579 - RNA, 2064 nt, Artificial Sequence
  mRNA product Design a-2 (hSL-A100) comprising derived and/or modified sequence from LASV(Z0947-SLE-2011;Clade IV)__AIT17841__SP-HsPLAT_NP(2-569) (opt4)
aggagaguccgcucagccagguugcagaagcggcuuagcguguguccuaaucuucucucugcguguagguaggccugugccgcaaacaagcuuaccauggacgccaugaagagaggccugugcugcgugcugcugcugugcggcgccguguucgugagccccagcgccagcaaggagaucaagagcuuccuguggacccagagccugagaagagagcugagcggcuacugcagcaacaucaagcugcagguggugaaggacgcccaggcccugcugcacggccuggacuucagcgaggugagcaacgugcagagacugaugagaaaggagagaagagacgacaacgaccugaagagacugagagaccugaaccaggccgugaacaaccugguggagcugaagagcacccagcagaagagcauccugagagugggcacccugaccagcgacgaccugcugauccuggccgccgaccuggagaagcugaagagcaaggugaccagaaccgagagaccccugagcgccggcguguacaugggcaaccugagcagccagcagcuggaccagagaagagcccugcugaacaugaucggcaugagcggcagcaaccagggcgccagaaccggcagagacggcguggugagagugugggacgugaagaacgccgagcugcugaacaaccaguucggcaccaugcccagccugacccuggccugccugaccaagcagggccagguggaccugaacgacgccgugcaggcccugaccgaccugggccugaucuacaccgccaaguaccccaacaccagcgaccuggacagacugacccagagccaccccauccugaacaugaucgacaccaagaagagcagccugaacaucagcggcuacaacuucagccugggcgccgccgugaaggccggcgccugcaugcuggacggcggcaacaugcuggagaccaucaaggugagcccccagaccauggacggcauccugaagagcauccugaaggugaagaaggcccugggcauguucaucagcgacgcccccggcgagagaaaccccuacgagaacauccuguacaagaucugccugagcggcgacggcuggcccuacaucgccagcagaaccagcaucaccggcagagccugggagaacaccgugguggaccuggagagcgacggcaagccccagaaggccggcagcaacggcagcaacaagagccugcagagcgccggcuucaccgccggccugaccuacagccagcugaugacccugaaggacgccaugcugcagcuggaccccaacgccaagaccuggauggacaucgagggcagacccgaggaccccguggagaucgcccuguaccagcccagcagcggcugcuacauccacuucuucagagagcccaccgaccugaagcaguucaagcaggacgccaaguacagccacggcaucgacgugaccgaccuguucgccgcccagcccggccugaccagcgccgugaucgacgcccugcccagaaacauggugaucaccugccagggcagcgacgacaucagaaagcuguucgagagccagggcagaaaggacaucaagcugaucgacaucgcccugagcaagaccgacagcagaaaguacgagaacgccgugugggaccaguacaaggaccugugccacaugcacaccggcaucgugguggagaagaagaagagaggcggcaaggaggagaucaccccccacugcgcccugauggacugcaucauguucgacgccgccgugagcggcggccugaacaccagcgugcugagagccgugcugcccagagacaugguguucagaaccagcacccccagaguggugcugugaggacuagucccuguucccagagcccacuuuuuuuucuuuuuuugaaauaaaauagccugucuuucagaucucaaaggcucuuuucagagccaccaaaaaaaaaaaaaaaaaaaaaaaaaaaaaaaaaaaaaaaaaaaaaaaaaaaaaaaaaaaaaaaaaaaaaaaaaaaaaaaaaaaaaaaaaaaaaaaaaaaaa

SEQ ID NO: 18580 - RNA, 2064 nt, Artificial Sequence
  mRNA product Design a-2 (hSL-A100) comprising derived and/or modified sequence from LASV(Josiah;Clade IV)__NP_694869__SP-HsPLAT_NP(2-569) (opt5)
aggagaguccgcucagccagguugcagaagcggcuuagcguguguccuaaucuucucucugcguguagguaggccugugccgcaaacaagcuuaccauggacgccaugaagagaggccugugcugugugcuccugcuuugcggggcugucuucguuagccccagcgccuccaaggagaucaaaucuuuccuguggacccagagccucagacgggaacuguccggcuacugcucuaacauuaagcugcaaguggucaaagacgcucaggcccugcuccacgggcuggauuuuagcgagguuuccaaugugcagcgccuuaugagaaaggaacggcgcgacgauaacgaccugaaaagacuccgggaucugaaucaggcggugaacaaucuggucgagcucaagucuacacaacaaaagagcauccugcgcgugggaacgcuuaccuccgacgaucugcucauucuggcugccgaccuugaaaaacuuaagagcaaaguuaucagaacagagcggccccucucugccggcguguauauggggaaccuguccagccagcagcuggaucagcgcagagcucuccugaauaugauuggaaugucuggcgggaaccagggagcccgggcuggccgcgacggcgucgugagaguuugggaugugaagaaugccgagcuucugaacaaucaguucgggaccaugccuucccucacacuggcgugucuuaccaaacagggacaagucgaccugaacgaugccgugcaggcucucacagaccugggccugaucuacaccgccaaguauccgaauacgagcgaccucgaucggcugacccagucucaucccauccuuaacaugauugacacaaagaaauccagccugaauaucuccggguacaacuuuucucucggagcugccgugaaggcgggcgccugcaugcuggaugggggaaacaugcuugaaaccauuaaagucagcccucaaacaauggacggcauccugaaguccauucucaaaguuaagaaagcucugggcauguucaucagcgauacccccggggagcgcaauccuuaugaaaacauucuguacaagaucugucucucuggagacggcuggcccuauaucgccuccagaacgagcauuacagggcgggcuugggagaauaccgugguggaucuggagucugacggaaagccucagaaagccgauagcaacaauuccucuaagagccuucaguccgccggcuuuacagcugggcugaccuacagccagcucaugacccugaaagacgcgaugcugcaacuugauccgaacgccaagacauggauggacaucgaaggaagacccgaggacccugucgaaauugcucucuaccagcccucuuccggcugcuauauccacuucuuucgcgagccuacggaucugaaacaguucaagcaggacgccaaguacagccauggcauugaugugaccgaccuguuugccacacaacccgggcucaccucugcuguuaucgaugcccugccgcggaauauggugaucacaugucagggauccgacgauauuagaaaacuucuggaaagccagggccgcaaggacaucaaacucauugauaucgcgcuguccaagaccgacucucggaaauaugagaacgcugucugggaucaguacaaggaccugugccacaugcauacgggggugguuguggagaagaaaaagagaggaggcaaagaagagauuacaccucacugugcccuuauggauugcaucauguucgacgccgcugucagcgggggccucaauaccuccgugcugcgcgccguccugccccgggacaugguguuuagaaccucuacaccucgcguugugcucugaggacuagucccuguucccagagcccacuuuuuuuucuuuuuuugaaauaaaauagccugucuuucagaucucaaaggcucuuuucagagccaccaaaaaaaaaaaaaaaaaaaaaaaaaaaaaaaaaaaaaaaaaaaaaaaaaaaaaaaaaaaaaaaaaaaaaaaaaaaaaaaaaaaaaaaaaaaaaaaaaaaaa

SEQ ID NO: 18581 - RNA, 2064 nt, Artificial Sequence
  mRNA product Design a-2 (hSL-A100) comprising derived and/or modified sequence from LASV(LP;Clade I)__AAF86702__SP-HsPLAT_NP(2-569) (opt5)
aggagaguccgcucagccagguugcagaagcggcuuagcguguguccuaaucuucucucugcguguagguaggccugugccgcaaacaagcuuaccauggacgccaugaagagaggccugugcugugugcuccugcuuugcggggcugucuucguuagccccagcaacuccaaggagaucaaaucuuuccuguggacccagagccucagacgggaacuguccggcuacugcucuaauauuaagcuccaaguggucaaagacgcccaggcucugcuccacgggcuggauuuuagcgagguuuccaacgugcagcgccuuaugagaaagcagaaacgggacgaugccgaccugaagcgccucagagaucugaaucaagcggugaacaaucuggucgaacucaagucuacacagcagaaaaacgugcugcggguuggaacgcuuagcuccgacgaucugaucacccucgcugccgaccuggagaaacuuaaaagcaaggugauucgcacagaaagaccccugucuuccggcgucuauauggggaaucucagcucucagcaacuggaucagcggcgcgcccugcucuccaugaucggaaugagcggcgggccucagggaaacagaaccggcggcgacggggugguucgggugugggaugucaaaaaugcugagcugcuuaacaaucaguucggaacaaugccgucucugacccucgccugucugacaaagcaaggccagguggaccuuaacgaugcugugcaggcccugaccgaccucgggcugauuuacacggcgaaguaucccaauuccagcgaccuggauaugcucacccaaucccauccuauccugggaauggucgacacaaagaagucuagccuuaacaucuccggcuacaauuuuagccugggggccgcuguuaaagccggagcuugcaugcucgauggcggcaacaugcuggagaccauuaaggugucuccccagacaauggacgggauccuuaaauccauucugaaggugaaacgcagccucggaauguucaucucugauaccccuggcgaaagaaaccccuaugagaauauucuguacaagaucugucugagcggggaaggauggccuuauauugccucccggacgucuaucacaggccgcgcgugggagaacacccucgucgaccuggagagcgauaauaagccgcccaaacuuaacuccgccgggagcaauaagucucugcaggcugccggacucaacgcuggccugacauacucccagcugaugacccuuaaagacugcaugcuccaacuggauccuagcucuaagaccuggaucgacauugaaggcagacccgaggauccuguggaaaucgcccuguuucagcccuccagcggguguuacauucacuucuuucgggagccgacagaccucaaacaguucaagcaggacgccaaguauucccauggaaucgauguuacggaccuguuuucuacccaaccuggccuuacaagcgcugugauugaagcgcugcccagaaauaugguccuuaccugccagggguccgaugacaucaaaaagcugcuggagucucagggacgccgggauaucaaacuuauugacaucagccucuccaaggccgauagcagaaaauucgagaacgcugugugggaccaguacaaggaucugugucacaugcauacaggcguuguggucgaaaagaaaaagcgcgggggcaaagaggaaauuaccccucacugcgcccugcucgacuguaucauguuugaugccgcuacgacaggaucucugaauauuaccacccuucgggccgugcugcccagagacauggucuuccgcacauccacccccaaggugguucucugaggacuagucccuguucccagagcccacuuuuuuuucuuuuuuugaaauaaaauagccugucuuucagaucucaaaggcucuuuucagagccaccaaaaaaaaaaaaaaaaaaaaaaaaaaaaaaaaaaaaaaaaaaaaaaaaaaaaaaaaaaaaaaaaaaaaaaaaaaaaaaaaaaaaaaaaaaaaaaaaaaaaa

SEQ ID NO: 18582 - RNA, 2064 nt, Artificial Sequence
  mRNA product Design a-2 (hSL-A100) comprising derived and/or modified sequence from LASV(803213;Clade II)__AAF86704__SP-HsPLAT_NP(2-569) (opt5)
aggagaguccgcucagccagguugcagaagcggcuuagcguguguccuaaucuucucucugcguguagguaggccugugccgcaaacaagcuuaccauggacgccaugaagagaggccugugcugugugcuccugcuuugcggggcugucuucguuagccccagcgccuccaaggaggugaaaucuuuccuguggacccagagccucagacgggaacuguccggcuacugcucuaacaucaaacuucaagucguuaaggacgcucaggcccugcuccacgggcuggauuuuagcgaggugaauaacgugcagcgccuuaugagaaagcagaaacgggacgauggagaccugaagcgccucagagaucugaaucaagcggucaacaaucugguggaacucaaguccacacagcagaaaucuauucugcggguuggcacgcuuaccagcgacgaucugcucacacuggcugccgaccuugagaagcugaaauccaaggugauccgcaccgaaagaccccucagcucuggggucuauaugggaaaccuguccacacagcaacuggagcagcggcgcgcccuccugaauaugauuggcauggugggaggagcucagggcacccagccuggcagagaugggguugugcgggucugggacgugaaaaacccggaucuucugaauaaccaauucggaacaaugcccagccucacccuggccugucuuacgaagcagggccagguggaccugaaugaugcuguccucgcccugaccgaccuggggcucaucuacacagcgaaguauccuaacucuuccgaccuggaucgccuuagccaaucucaucccauucugaauaugguugacaccaaaaaguccagccucaacaucuccggauacaauuuuucucugggcgccgcugugaaagccggggcuugcaugcuugauggaggcaacaugcuggagacaaucaaggugaccccucagacgauggacggcauucucaaaagcauccugaaggucaaaagaucccuggggauguucgugagcgauacacccggagaacggaacccuuaugagaauauucucuacaagaucugucugucuggcgacggguggccguauauugccucccgcaccagcaucguugggagagcgugggaaaacacaaccguggaucuugagucugacggcaagccccagaaagucgggaccgccggaagcaauaagucccugcagucugcuggcuuuccuacaggccucacguacagccaacugaugacccugaaagauuccaugaugcagcuugaccccagcgccaagacauggauugauaucgaggggcggccugaagaccccguggagaucgcucucuaccagccgaugucuggaugcuauauucacuucuuuagagaaccuaccgaccugaaacaguucaagcaagaugccaaguacucccauggcaucgacguugccgaucuguuucccgcucagccugggcucacaagcgcggugauugaggcccugccccgcaacaugguccuuaccugucagggaucugacgauaucaaaaagcugcucgacucccagggccggagagauauuaaacugaucgacaucagccuguccaagguggauucucgcaaauucgaaaaugcugucugggaccaaugcaaggaucuuugucacaugcauacgggggugguuguggagaagaaaaagcggggcggaaaagaggaaauuacaccccacugcgcccucauggacuguaucauguuugaugccgcugucagcggcgggcugaacauuccugugcugagagccguucucccgcgcgacaugguguuccggaccuccucucccaaggucgugcugugaggacuagucccuguucccagagcccacuuuuuuuucuuuuuuugaaauaaaauagccugucuuucagaucucaaaggcucuuuucagagccaccaaaaaaaaaaaaaaaaaaaaaaaaaaaaaaaaaaaaaaaaaaaaaaaaaaaaaaaaaaaaaaaaaaaaaaaaaaaaaaaaaaaaaaaaaaaaaaaaaaaaa

SEQ ID NO: 18583 - RNA, 2067 nt, Artificial Sequence
  mRNA product Design a-2 (hSL-A100) comprising derived and/or modified sequence from LASV(GA391;Clade III)__CAA36646__SP-HsPLAT_NP(2-570) (opt5)
aggagaguccgcucagccagguugcagaagcggcuuagcguguguccuaaucuucucucugcguguagguaggccugugccgcaaacaagcuuaccauggacgccaugaagagaggccugugcugugugcuccugcuuugcggggcugucuucguuagccccagcgccuccaaggaggugagaucuuuccuguggacccagagccuccggcgcgaacuguccggcuacugcucuaacaucaaacuucaagucguuaaggacgcucaggcccugcuccacgggcuggauuuuagcgagguguccaaugugcagagacuuaugcggaaacagaagcgcgacgauggagaccugaaaagacuccgggaucugaaccaagcggucaauaaccugguggaacucaagucuacacagcagaaaagcguucugcgcgugggcacgcuuuccagcgacgaucugcucauucuggcugccgaccuugagaaacugaagucuaaagucaccagaacagaacggccccucuccagcgggguguauaugggaaaucugucuucccagcaacuggaucagcgcagagcccuccugaacaugaucggcaugaccgggguuagcggaggcggcaagggggcuucugacggaauugugcgggucugggaugugaaaaaugccgagcuucugaacaaucaguucggcacaaugccuucccucacccuggcuugucuuacaaagcaggggcaaguggaccugaacgaugccguccaggcgcucaccgaccugggacugaucuacacggccaaguauccgaauagcuccgaccucgaucgccugucucagagccaucccauucuuaacaugaucgacaccaaaaaguccagccugaauaucucuggcuacaacuuuucccucggggcugccguuaaagcuggagccugcaugcuggauggcggcaauaugcuugagacaauuaaggugagcccucaaaccauggacgggauccugaaaucuauucucaaggugaaaaagagccugggaauguucgucuccgauacacccggcgaaagaaacccuuaugagaacauccuguacaagauuugucucucuggggacggauggcccuauaucgcgagccggaccuccauugugggccgcgccugggaaaauacgguuguggaucuggagcaggacaacaaaccucagaagaucgggaauggaggcagcaacaaaucucuucaguccgcuggcuuugccgcugggcugacauacagccaacucaugacccugaaggauuucaaaugcuuuaaucugaucccgaacgccaagacauggauggacauugagggaagacccgaagauccugucgagaucgcccuuuaccagcccucuuccggcuguuaugugcacuucuuucgggaaccuaccgaccucaagcaguucaaacaggacgcuaaguacagccaugggauugauguuaccgaccuguuugcggcccaacccggacugacauccgcugugaucgaggcccucccgagaaauauggucauuacgugccagggcucugaagauauccgcaaacugcuugagagccaggggcggagagacaucaagcugauugauaucacccucuccaaagccgacucucgcaaguucgagaacgcugugugggaucaguuuaaggaccugugucacaugcauacaggcgucgugguugaaaagaagaaacggggaggcaaggaggaaauuaccccucacugcgcccugauggauuguaucauguucgacgcggcugugagcgggggacuugaugccaaaguccucagagugguucugccccgcgacaugguguuccggacauccaccccuaaggucgugcugugaggacuagucccuguucccagagcccacuuuuuuuucuuuuuuugaaauaaaauagccugucuuucagaucucaaaggcucuuuucagagccaccaaaaaaaaaaaaaaaaaaaaaaaaaaaaaaaaaaaaaaaaaaaaaaaaaaaaaaaaaaaaaaaaaaaaaaaaaaaaaaaaaaaaaaaaaaaaaaaaaaaaa

SEQ ID NO: 18584 - RNA, 2064 nt, Artificial Sequence
  mRNA product Design a-2 (hSL-A100) comprising derived and/or modified sequence from LASV(AV;Clade V)__CCA30315__SP-HsPLAT_NP(2-569) (opt5)
aggagaguccgcucagccagguugcagaagcggcuuagcguguguccuaaucuucucucugcguguagguaggccugugccgcaaacaagcuuaccauggacgccaugaagagaggccugugcugugugcuccugcuuugcggggcugucuucguuagccccagcgccuccaaggaggugaaaucuuuccuguggacccagagccucagacgggaacuguccggcuacugcucuaacaucaaacuucaagucguuaaggacgcucaggcccugcuccacgggcuggauuuuagcgagguguccaaugugcagcgccuuaugagaaagcagcggcgcgacgauucugaccugaaaagacuccgggaucugaaccaagcggucaauaaccugguggaacucaagagcacacagcagaaguccguucugcgcgugggaacgcuuagcucugacgaucugcucacccuggcugccgaccuugagaaacugaaguccaaagucacaagaaccgaacggccccucagcucuggcguguauauggggaaucuguccagccagcaacuggaucagcgcagagcccuccugaaccuuauuggaaugacaaauggcucucaggggucccaggcuggacgggacggcguugugcgcgucugggaugugaagaacgccgagcugcucaauaaccaauucggcaccaugccuagccugacacuugcuugucugaccaaacagggacagguggaccucaaugaugucguucaagcccugacggaccuggggcucaucuacaccgcgaaguauccgaacacauccgaccuggauagacuuacccagucucaucccauucugaauaugaucgacacaaagaaaagcucccucaacauuagcggcuacaauuuuucucugggggccgcugugaaggccggagcuugcaugcuugauggcgggaacaugcuggagaccaucaaaguguccccucagagcauggacggaauccucaagucuauucugaaagucaagcgggcccugggcauguucgugagcgauacgcccggcgaacgcaacccuuaugagaauauccucuacaaaauuugucuguccggggacggauggcccuauaucgcgucuagaacaagcauuguuggccgggccugggaaaacaccguggucgaucuugagacagacgggaagccucagaagaucggauccggcaauagcaacaaaucucugcaauccgcuggguuuagcgccggacucaccuacucucagcugaugacccugaaggaugcuaugcuucagcucgacccgaaugccaaaacauggauggauauugagggcagacccgaagacccuguggagguugcccuguaccagcccaucuccggcugcuauauccacuucuuucgcgaaccuacggaccugaagcaauucaaacaggaugcuaaguacagccaugggauugacaucgcggaucucuuugccgcucagcccggacugaccuccgccgugauugaggcccuuccgcggaacauggucaucacaugucagggcucugaagacauuaagaaacugcucgagagccaagggagaaaggauaucaaacugaucgacauugcucuguccaagaucgauucucgcaaauucgagaaugccgugugggaccaguauaaggaucuuugccacaugcauaccggagucgugguugaaaagaaaaagcggggcgggaaagaggaaauuacaccucacugugcgcucauggacugcaucauguuugaugcugccgugagcggcggacugaacacccugguccucagagccgugcugccccgcgacaugguuuuccggacguccacaccuagagugguccuuugaggacuagucccuguucccagagcccacuuuuuuuucuuuuuuugaaauaaaauagccugucuuucagaucucaaaggcucuuuucagagccaccaaaaaaaaaaaaaaaaaaaaaaaaaaaaaaaaaaaaaaaaaaaaaaaaaaaaaaaaaaaaaaaaaaaaaaaaaaaaaaaaaaaaaaaaaaaaaaaaaaaaa

SEQ ID NO: 18585 - RNA, 2064 nt, Artificial Sequence
  mRNA product Design a-2 (hSL-A100) comprising derived and/or modified sequence from LASV(Togo/2016/7082;Clade VI)__AMR44578__SP-HsPLAT_NP(2-569) (opt5)
aggagaguccgcucagccagguugcagaagcggcuuagcguguguccuaaucuucucucugcguguagguaggccugugccgcaaacaagcuuaccauggacgccaugaagagaggccugugcugugugcuccugcuuugcggggcugucuucguuagccccagcaacuccaaggaggugaaaucuuuccuguggacccagagccucagacgggaacuguccggcuacugcucuaauaucaaacuucaagucguuaaagacgcccaggcucugcuccacgggcuggauuuuagcgagguguccaacgugcagcgccuuaugagaaagcagaaacgggacgauggagaccugaagcgccucagagaucugaaucaagccgucaacaaucugguggaacucaagucuguucagcagaaaagcauucugcgggugggcacacuuacguccgacgaucugcucacccuggcggcugaccuugagaagcugaaaagcaaggucacacgcaccgaaagaccccucucuuccgggguguauaugggaaaccugagcucucagcaacuggaucagcggcgcgcccuccuguccaugaucggcaugagcgggggaaaucagaacucucagccuaaaggcgacggcguugugagagucugggaugugaagaaugccgaccuucugaacaaucaauucgggacaaugccgucccucacccuggcuugucuuacaaagcagggacagguggaucugaacgacgccguccaagcucucaccgaccugggccugauuuacacggccaaauaucccaauagcuccgaucucgaccggcugucucagagccauccuauccuuaacaugauugauaccaagaaauccagccugaauaucucuggguacaacuuuucccucggagcggccaucaagacaggcgcuugcaugcuggacgggggaaacaugcuugagaccauuaaaguuacaccccagaccauggauggcauccucaagagcauucugaaagugaagcgcucucugggcauguucaucagcgacacgccuggggagagaaaucccuaugaaaacauucuguacaagaucugucucuccggagauggcuggccuuauauugccucucggacagcuaucaucgggcgcgccugggagaauaccguggucgaccuggaaagcgauuccaaaccgcagaagauuggaagcaacggcucuaauaaaucccuucaaagcgcgggguuugcccccggacugacauacucucagcucaugacccugaaggacuccaugcugcagcuugauccuaacgcuaaaaccuggaucgacauugagggcagacccgaggacccuguggaaguugcccucuuccagcccaucagcggcugcuacauucacuuuuuccgggagccgacagaucugaagcaauuuaagcaggacgcuaaauauucccaugggaucgaugugacggaccuguucgccgcccagccuggacucaccucugcugucaucgaagcgcugcccagaaauauggugcuuacaugucagggcagcgaugacauuaagaaacugcucgauucccaagggcgccgggacaucaagcugauugauguuucucugaacaaaaucgacagcagaaaguuugagaaugccgugugggaucaguacaaggaccuuugccacaugcauaccggagucguggucgaaaagaagaaaaagggcgggaaagaggagauuacaccucacugugcucuccuggauugcaucauguucgacgccgccguguccggcggacugaacgcuaccguucuccgcgccgugcugccccgggacauggucuuuagaacgagcucucccaaggugguucuuugaggacuagucccuguucccagagcccacuuuuuuuucuuuuuuugaaauaaaauagccugucuuucagaucucaaaggcucuuuucagagccaccaaaaaaaaaaaaaaaaaaaaaaaaaaaaaaaaaaaaaaaaaaaaaaaaaaaaaaaaaaaaaaaaaaaaaaaaaaaaaaaaaaaaaaaaaaaaaaaaaaaaa

SEQ ID NO: 18586 - RNA, 2064 nt, Artificial Sequence
  mRNA product Design a-2 (hSL-A100) comprising derived and/or modified sequence from LASV(KAK-428;Clade n.d. (VII))__ANH09741__SP-HsPLAT_NP(2-569) (opt5)
aggagaguccgcucagccagguugcagaagcggcuuagcguguguccuaaucuucucucugcguguagguaggccugugccgcaaacaagcuuaccauggacgccaugaagagaggccugugcugugugcuccugcuuugcggggcugucuucguuagccccagcaacuccaaggaggugaaaucuuuccuguggacccagagccucagacgggaacuguccggcuacugcacaaauaucaaacuucaagucguuaaggacgcccaggcucugcuccacgggcuggauuuuucugaggugagcaacgugcagcgccuuaugagaaagcagaaacgggacgauaaugaccugaagcgccucagagaucugaaccaagccgucaauaaccugguggaacucaaguccguucagcagaaaucugugcugaaggucggaacgcuuaauagcgacgaucugcucacccuggcggcugaccuugagaaacugaaguccaaagugguucggacagaacgcccccucagcucuggcguguauauggggaaccuguccagccagcaacuggaucagagacgggcccuccugaauaugauuggaauggccggcgggucucagggaaaccagccuucccgcgacggcgucgugagagugugggaugucaagaaugcugaccuucugaacaaucaauucggcaccaugccgagccucacacuggccugucuuaccaagcaggggcagguugaucugaacgacguggugcucgcucugacagaccugggacucaucuacaccgccaaauaucccaauucuuccgaucuggaccggcuuagccaaaaccauccuguccugaacaugauugaugugaauaaguccucucucaacaucagcggcuacaauuuuucccugggggcggccguuaaagcuggagccugcaugcuugacggcgggaacaugcuggagacgauuaagaucagcccccagaccguggauggaauccucaaaucuauucugaaggucaaacgcgcucugggcauguucguguccgacacaccuggcgagagaaaucccuaugaaaacauccucuacaagguuugucugagcgggaauggauggccuuauauugccucucggaccagcaucgugggccgcgcgugggagaacacagucguggaucuugaauccaauaagaaccagccgaaagucgggaauaacggaucuaauaagaugcugcagagcuccggcuuugccaccgggcucacguacagccaacugaugacacugagagacucuaugcuucagcucgaucccaccgcuaaaacauggauugacaucgagggacggccugaggaucccguggaacuggcccuguuccagccuuccagcggcugcuacauucacuuuuucagagagcccaccgaccucaagcaguuuaaacaagacgcuaaguauucucauggcaucgauguuaacgaccuguucuccgcccagccggggcuuaccagcgccgugcuggaagcucucccucgcaauaugguccugacaugucagggauccgaugacauccggaagcugcuugauucucaggacagaaaagauauuaagcucaucgacauuagccuguccaaagcggaugcccgcaaguuugagaacgacgugugggaucaauucaaagaccugugccacaugcauacgggcaucguuguggaaaagaagaaaaagggagggaaacaggagaugacaccccacugugcucuccuggauugcauuauguuugacgccgccgucucuggcgggcuuaacgugccuacccugcgggcugugcuccccaccgacaugguuuucagaacaaucaccacgaaggucgugcugugaggacuagucccuguucccagagcccacuuuuuuuucuuuuuuugaaauaaaauagccugucuuucagaucucaaaggcucuuuucagagccaccaaaaaaaaaaaaaaaaaaaaaaaaaaaaaaaaaaaaaaaaaaaaaaaaaaaaaaaaaaaaaaaaaaaaaaaaaaaaaaaaaaaaaaaaaaaaaaaaaaaaa

SEQ ID NO: 18587 - RNA, 2064 nt, Artificial Sequence; identical to SEQ ID NO: 18581
  mRNA product Design a-2 (hSL-A100) comprising derived and/or modified sequence from LASV(Pinneo-NIG-1969;Clade I)__AIT17837__SP-HsPLAT_NP(2-569) (opt5)

SEQ ID NO: 18588 - RNA, 2064 nt, Artificial Sequence
  mRNA product Design a-2 (hSL-A100) comprising derived and/or modified sequence from LASV(ISTH0009-NIG-2011;Clade II)__AIT17405__SP-HsPLAT_NP(2-569) (opt5)
aggagaguccgcucagccagguugcagaagcggcuuagcguguguccuaaucuucucucugcguguagguaggccugugccgcaaacaagcuuaccauggacgccaugaagagaggccugugcugugugcuccugcuuugcggggcugucuucguuagccccagcguguccaaggaggucaaaucuuuccuguggacccagagccucagacgggaacuguccggcuacugcucuaacaucaaacuucaaguugugaaggacgcccaggcucugcuccacgggcuggauuuuagcgagguguccaauguccagcgccuuaugagaaagcagaaacgggacgauucugaccugaagcgccucagagaucugaaccaagccgugaauaaccugguugaacucaagagcacacagcagaaauccauucugcgggugggaacgcuuaccagcgacgaucugcucacacuggcggcugaccuugagaagcugaaaucuaaggucauccgcaccgaaagaccccucuccagcggcguguauauggggaaucugucuacacagcaacuggagcagcggcgcgcccuccugaacaugauuggaaugguuggcggggcccagggaacccagccuggcagagauggcgugguccgggugugggacgugaaaaauccggaucuucugaacaaucaauucgggacaaugcccucccucacccuggcuugucuuacgaagcagggacaggucgaccugaacgaugccguucucgcucugaccgaccugggccucaucuacacagccaaguauccuaauagcucugaccuggaucgccuuucccaaagccaucccauucugaacaugguggacaucaaaaaguccucucucaauaucagcggguacaacuuuucccugggagcggccgugaaagcuggcgccugcaugcuugaugggggaaauaugcuggagaccauuaaggucacaccucagaccauggacggcauccucaaaagcauucugaaggugaaaagaucucugggcauguucguuuccgauacgcccggggaacggaacccuuaugagaacauccucuacaagauuugucugagcggagacggcuggccguauaucgcuucucgcacaagcauuguggggagagccugggaaaauaccacagucgaucuugaguccgacggaaagccccagaaagugggcucugcggggagcaacaagucccugcagagcgccggauuuccuaccggccucaccuacucucaacugaugacacugaaagauuccaugaugcagcuugaccccagcgcuaagacguggaucgauaucgagggccggccugaagaccccguugagauugcccucuaccagccgaugucugggugcuauauccacuucuuuagagaaccuaccgaccugaaacaguucaagcaagaugcuaaguacucccauggaauugacguggccgaucuguuucccgcccagccuggccucacaagcgcugucaucgaggcgcugccccgcaauauggugcuuaccugucagggguccgacgauauuaaacggcugcucgacucucagggaagacgcgauaucaagcugaucgacauugcccugagcaaagcugauucccggagauucgaaaacgccgucugggaccaaugcaaggaucuuugucacaugcauacaggcgugguuguggagaaaaagaagcgcgggggcaaagaggaaaucacgccccacugcgcccucauggacuguauuauguaugaugcugccgucucuggaggccugaauaucccugugcugcgggcgguucucccgagagacaugguguuucgcaccagcucccccaaggucgugcugugaggacuagucccuguucccagagcccacuuuuuuuucuuuuuuugaaauaaaauagccugucuuucagaucucaaaggcucuuuucagagccaccaaaaaaaaaaaaaaaaaaaaaaaaaaaaaaaaaaaaaaaaaaaaaaaaaaaaaaaaaaaaaaaaaaaaaaaaaaaaaaaaaaaaaaaaaaaaaaaaaaaaa

SEQ ID NO: 18589 - RNA, 2064 nt, Artificial Sequence
  mRNA product Design a-2 (hSL-A100) comprising derived and/or modified sequence from LASV(ISTH2010-NIG-2012;Clade II)__AIT17483__SP-HsPLAT_NP(2-569) (opt5)
aggagaguccgcucagccagguugcagaagcggcuuagcguguguccuaaucuucucucugcguguagguaggccugugccgcaaacaagcuuaccauggacgccaugaagagaggccugugcugugugcuccugcuuugcggggcugucuucguuagccccagcgccuccaaggaggugaaaucuuuccuguggacccagagccucagacgggaacuguccggcuacugcucuaacaucaaacuucaagucguuaaggacgcucaggcccugcuccacgggcuggauuuuagcgagguguccaaugugcagcgccuuaugagaaagcagaaacgggacgauucugaccugaagcgccucagagaucugaaccaagcggucaauaaccugguggaacucaagagcacacagcagaaauccauucugcggguuggaacgcuuaccagcgacgaucugcucacacuggcugccgaccuugagaagcugaaaucuaaggugauccgcaccgaaagaccccucuccagcggcgucuauauggggaaucugucuacacagcaacuggagcagcggcgcgcccuccugaaccuuauuggaauggugggcggggcucagggaacccagccuggcagagauggcguugugcgggucugggacgugaaaaauccggaucugcucaacaaucaauucgggacaaugcccucccugacccuugccugucugacgaagcagggacagguggaccucaacgaugcuguccuggcccugaccgaccucggccugaucuacacagcgaaguauccuaauagcucugaccuugaucgccugucccaaagccaucccauucucaacaugguugacaccaaaaaguccucucugaauaucagcggguuuaacuucucccuuggagccgcugugaaagccggcgcuugcaugcuggaugggggaaauaugcucgagacaaucaaggugaccccucagacgauggacggcauucugaaaagcauccugaaggucaaaaagucucucggcauguuuguguccgauacacccggggaaagaaacccuuacgagaacauucuguauaagaucugucuuagcggagacggcuggccguacauugccucucggaccagcaucguugggcgcgcgugggaaaauacaaccguggaucuggaguccgacggaaaaccccacaaggucggcaccgccgggucuaacaaaagccuccaguccgcuggauucccuacaggccugacguauagccagcugaugacccuuaaggauucuaugaugcaacucgaccccuccgccaaaacauggauugauaucgagggcagaccugaagaccccguggagaucgcucuguaccagccgaugagcgggugcuacauucacuuuuuccgggaaccuaccgaccugaagcaguuuaagcaggaugccaaauauucucauggaaucgacguugccgaucucuuccccgcucaaccuggccugacauccgcggugauugaggcccuucccagaaauaugguccugaccugucaggggagcgacgauaucaagcgccuccuggacucccagggacggagagauauuaaacugaucgacaucgcucuuucuaaggccgauagccgccgguuugaaaacgccgugugggaccagugcaaagaucucugucauaugcacacgggcgucgugguugagaagaagaaaagagggggcaaggaggaaauuacaccccacugcgcucugauggacuguaucauguacgaugccgcgguguccggaggccugaauauuccuguccuccgcgcugugcugccgcgggacaugguuuucagaaccucuagccccaaagugguccuuugaggacuagucccuguucccagagcccacuuuuuuuucuuuuuuugaaauaaaauagccugucuuucagaucucaaaggcucuuuucagagccaccaaaaaaaaaaaaaaaaaaaaaaaaaaaaaaaaaaaaaaaaaaaaaaaaaaaaaaaaaaaaaaaaaaaaaaaaaaaaaaaaaaaaaaaaaaaaaaaaaaaaa

SEQ ID NO: 18590 - RNA, 2064 nt, Artificial Sequence
  mRNA product Design a-2 (hSL-A100) comprising derived and/or modified sequence from LASV(Lassa virus/H.sapiens-wt/NGA/2015/ISTH_0543;Clade II)__AVO03640__SP-HsPLAT_NP(2-569) (opt5)
aggagaguccgcucagccagguugcagaagcggcuuagcguguguccuaaucuucucucugcguguagguaggccugugccgcaaacaagcuuaccauggacgccaugaagagaggccugugcugugugcuccugcuuugcggggcugucuucguuagccccagcgccuccaaggaggugaaaucuuuccuguggacccagagccucagacgggaacuguccggcuacugcucuaacaucaaacuucaagucguuaaggacgcucaggcccugcuccacgggcuggauuuuagcgagguguccaaugugcagcgccuuaugagaaagcagaaacgggacgauucugaccugaagcgccucagagaucugaaccaagcggucaauaaccugguggaacucaagagcacacagcagaaauccauucugcggguuggaacgcuuaccagcgacgaucugcucacacuggcugccgaccuugagaagcugaaaucuaaggugauccgcaccgaaagaccccucuccagcggcgucuauauggggaaucugucuacacagcaacuggagcagcggcgcgcccuccugaacaugauuggaauggugggcggggcucagggaacccagccuggcagagauggcguugugcgggucugggacgugaaaaauccggaucuucugaacaaucaauucgggacaaugcccucccucacccuggccugucuuacgaagcagggacagguggaccugaacgaugcuguccucgcccugaccgaccugggccucaucuacacagcgaaguauccuaauagcucugaccuggaucgccuuucccaaagccaucccauucugaacaugguugacaccaaaaaguccucucucaauaucagcggguacaacuuuucccugggagccgcugugaaagccggcgcuugcaugcuugaugggggaaauaugcuggagacaaucaaggugaccccucagacgauggacggcauucucaaaagcauccugaaggucaaaaagucucugggcauguucguguccgauacacccggggaaagaaacccuuaugagaacauucucuacaagaucugucugagcggagacggcuggccguauauugccucucggaccagcaucguugggcgcgcgugggaaaauacaaccguggaucuugaguccgacggaaaaccccagaaggucggcucugccgggagcaacaaaucccugcagagcgcuggauuuccuaccggccucacauacucucaacugaugacgcugaaggauuccaugaugcagcuugaccccagcgccaaaaccuggauugauaucgagggcagaccugaagaccccguggagaucgcucucuaccagccgaugucugggugcuauauucacuucuuucgggaaccuacagaccugaagcaguucaagcaagaugccaaauacucccauggaaucgacguugccgaucuguuucccgcucagccuggccucaccagcgcggugauugaggcccugcccagaaauaugguccuuacaugucagggguccgacgauaucaagcgccugcucgacucucagggacggaaagauauuaagcugaucgacaucgcucugagcaaagccgauuccagacgcuucgaaaacgccgugugggaccaaugcaaggaucuuugucacaugcauaccggcgucgugguugagaagaaaaagagagggggcaaagaggaaauuacgccccacugcgcucucauggacuguaucauguaugaugccgcggugucuggaggccugaauauuccuguccugcgggcugugcucccgcgcgacaugguuuuucggacaagcucccccaaggugguccugugaggacuagucccuguucccagagcccacuuuuuuuucuuuuuuugaaauaaaauagccugucuuucagaucucaaaggcucuuuucagagccaccaaaaaaaaaaaaaaaaaaaaaaaaaaaaaaaaaaaaaaaaaaaaaaaaaaaaaaaaaaaaaaaaaaaaaaaaaaaaaaaaaaaaaaaaaaaaaaaaaaaaa

SEQ ID NO: 18591 - RNA, 2064 nt, Artificial Sequence
  mRNA product Design a-2 (hSL-A100) comprising derived and/or modified sequence from LASV(Lassa virus/H.sapiens-wt/NGA/2016/ISTH_0009;Clade II)__AVO03572__SP-HsPLAT_NP(2-569) (opt5)
aggagaguccgcucagccagguugcagaagcggcuuagcguguguccuaaucuucucucugcguguagguaggccugugccgcaaacaagcuuaccauggacgccaugaagagaggccugugcugugugcuccugcuuugcggggcugucuucguuagccccagcgccuccaaggaggugaaaucuuuccuguggacccagagccucagacgggaacuguccggcuacugcucuaacaucaaacuucaagucguuaaggacgcucaggcccugcuccacgggcuggauuuuagcgagguguccaaugugcagcgccuuaugagaaagcagaaacgggacgauucugaccugaagcgccucagagaucugaaccaagcggucaauaaccugguggaacucaagagcacacagcagaaauccauucugcggguuggaacgcuuaccagcgacgaucugcucacacuggcugccgaccuugagaagcugaaaucuaaggugauccgcaccgaaagaccccucuccagcggcgucuauauggggaaucugucuacacagcaacuggagcagcggcgcgcccuccugaacaugauuggaauggugggcggggcucagggaacccagccuggcagagauggcguugugcgggucugggacgugaaaaauccggaucuucugaacaaucaauucgggacaaugcccucccucacccuggccugucuuacgaagcagggacagguggaccugaacgaugcuguccucgcccugaccgaccugggccucaucuacacagcgaaguauccuaauagcucugaccuggaucgccuuucccaaagccaucccauucugaacaugguugacaccaaaaaguccucucucaauaucagcggguacaacuuuucccugggagccgcugugaaagccggcgcuugcaugcuugaugggggaaauaugcuggagacaaucaaggugaccccucagacgauggacggcauucucaaaagcauccugaaggucaaaaagucucugggcauguucguguccgauacacccggggaaagaaacccuuaugagaacauucucuacaagaucugucugagcggagacggcuggccguauauugccucucggaccagcaucguugggcgcgcgugggaaaauacaaccguggaucuugaguccgacggaaaaccccagaaggucggcucugccgggagcaacaaaucccugcagagcgcuggauuuccuaccggccucacauacucucaacugaugacgcugaaggauuccaugaugcagcuugaccccagcgccaaaaccuggauugauaucgagggcagaccugaagaccccguggagaucgcucucuaccagccgaugucugggugcuauauucacuucuuucgggaaccuacagaccugaagcaguucaagcaagaugccaaauacucccauggaaucgacguugccgaucuguuucccgcucagccuggccucaccagcgcggugauugaggcccugcccagaaauaugguccuuacaugucagggguccgacgauaucaagcgccugcucgacucucagggacggagagauauuaaacugaucgacaucgcucugagcaaggccgauucccgccgguucgaaaacgccgugugggaccaaugcaaagaucuuugucacaugcauaccggcgucgugguugagaagaagaaaagagggggcaaggaggaaauuacgccccacugcgcucucauggacuguaucauguaugaugccgcggugucuggaggccugaauauuccuguccugcgcgcugugcucccgcgggacaugguuuuuagaacaagcucccccaaagugguccugugaggacuagucccuguucccagagcccacuuuuuuuucuuuuuuugaaauaaaauagccugucuuucagaucucaaaggcucuuuucagagccaccaaaaaaaaaaaaaaaaaaaaaaaaaaaaaaaaaaaaaaaaaaaaaaaaaaaaaaaaaaaaaaaaaaaaaaaaaaaaaaaaaaaaaaaaaaaaaaaaaaaaa

SEQ ID NO: 18592 - RNA, 2064 nt, Artificial Sequence
  mRNA product Design a-2 (hSL-A100) comprising derived and/or modified sequence from LASV(Lassa virus/H.sapiens-wt/NGA/2016/ISTH_0017;Clade II)__AVO03568__SP-HsPLAT_NP(2-569) (opt5)
aggagaguccgcucagccagguugcagaagcggcuuagcguguguccuaaucuucucucugcguguagguaggccugugccgcaaacaagcuuaccauggacgccaugaagagaggccugugcugugugcuccugcuuugcggggcugucuucguuagccccagcgccuccaaggaggugaaaucuuuccuguggacccagagccucagacgggaacuguccggcuacugcucuagcaucaaacuucaagucguuaaggacgcucaggcccugcuccacgggcuggauuuuuccgaggugucuaacgugcagcgccuuaugagaaagcagaaacgggacgauagcgaccugaagcgccucagagaucugaaucaagcggucaacaaucugguggaacucaaguccacacagcagaaaagcauucugcggguuggaacgcuuaccucugacgaucugcucacacuggcugccgaccuugagaagcugaaauccaaggugauccgcaccgaaagaccccucagcucuggcgucuauauggggaaccuguccacacagcaacuggagcagcggcgcgcccuccugaauaugauuggaauggcuggcggggcccagggaacccagccuggcagagauggcgugguucgggugugggacgucaaaaacccggaucuucugaauaaccaauucgggacaaugcccagccucacccuggcuugucuuacgaagcagggacagguggaccugaaugaugccgugcucgcgcugaccgaccugggccucaucuacacagccaaguauccuaacucuuccgaccuggaucgccuuagccaaucccaucccauucugaauauggucgacaccaaaaagucuagccucaacaucuccggguacaauuuuagccugggagcugccguuaaagcuggcgccugcaugcuugaugggggaaacaugcuggagacaaucaaggugaccccucagacgauggacggcauucucaaaucuauccugaaggugaaaagaucccugggcauguucgucagcgaugcgcccggggaacggaauccuuaugagaacauucucuacaagaucugucugucuggagacggcuggccguauauugccagccgcacauccaucguggggagagcuugggaaaacaccacaguugaucuugagucugacggaaagccccagaaagugggcgccaccgggagcaauaagucccugcagagcgcuggauuuccuaccggccucacauacucucaacugaugacgcugaaagauuccaugaugcagcuugaccccagcgccaagaccuggauugauaucgagggccggccugaagaccccgucgagguggcccucuaccagccgguuucugggugcuauauccacuucuuuagagaaccuacagaccugaaacaguucaagcaagaugcuaaguacucccauggaauugacguggcggaucuguuucccgcccagccuggccucaccagcgcugucaucgaggcccugccccgcaacauggugcuuacaugucagggguccgacgauauuaaaaagcugcucgacucucagggacggaaagauaucaagcugauugacaucgcccugagcaaagcugauuccagacgcuucgaaaaugccgucugggaccaaugcaaggaucuuugucacaugcauaccggcgugguuguggagaagaaaaagagagggggcaaagaggaaaucacgccccacugcgcgcucauggacuguauuauguaugaugcugccgucucuggaggccugaacaucccugugcugcgggccguucucccgcgcgacaugguguuucggacaagcucccccaaggucgugcugugaggacuagucccuguucccagagcccacuuuuuuuucuuuuuuugaaauaaaauagccugucuuucagaucucaaaggcucuuuucagagccaccaaaaaaaaaaaaaaaaaaaaaaaaaaaaaaaaaaaaaaaaaaaaaaaaaaaaaaaaaaaaaaaaaaaaaaaaaaaaaaaaaaaaaaaaaaaaaaaaaaaaa

SEQ ID NO: 18593 - RNA, 2064 nt, Artificial Sequence
  mRNA product Design a-2 (hSL-A100) comprising derived and/or modified sequence from LASV(Lassa virus/H.sapiens-wt/NGA/2018/ISTH_0959;Clade II)__AVV65100__SP-HsPLAT_NP(2-569) (opt5)
aggagaguccgcucagccagguugcagaagcggcuuagcguguguccuaaucuucucucugcguguagguaggccugugccgcaaacaagcuuaccauggacgccaugaagagaggccugugcugugugcuccugcuuugcggggcugucuucguuagccccagcgccuccaaggaggugaaaucuuuccuguggacccagagccucagacgggaacuguccggcuacugcucuaacaucaaacuucaagucguuaaggacgcucaggcccugcuccacgggcuggauuuuagcgagguguccaaugugcagcgccuuaugagaaagcagaaacgggacgauucugaccugaagcgccucagagaucugaaccaagcggucaauaaccugguggaacucaagagcacccagcagaaauccauucugcggguuggaacgcuuaccagcgacgaucugcucacacuggcugccgaccuugagaagcugaaaucuaaggugauccgcaccgaaagaccccucuccagcggcgucuauauggggaaucugucuacacagcaacuggagcagcggcgcgcccuccugaaccuuauuggaauggugggcggggcucagggaacccagccuggcagagauggcguugugcgggucugggacgugaaaaauccggaucugcucaacaaucaauucgggacaaugcccucccugacccuugccugucugacgaagcagggacagguggaccucaacgaugucguucuggcucugaccgaccucggccugaucuacacagccaaguauccuaauagcucugaccuugaucgccugucccaaagccaucccauucucaacaugguggacaccaaaaaguccucucugaauaucagcggguuuaacuucucccuuggagcggccgugaaagcuggcgccugcaugcuggaugggggaaauaugcucgagacaaucaaggucaccccucagacgauggacggcauucugaaaagcauccugaaggugaaaaagucucucggcauguuuguuuccgauacacccggggaaagaaacccuuacgagaacauucuguauaagaucugucuuagcggagacggcuggccguacauugcuucucggaccagcaucguggggcgcgccugggaaaauacaaccgucgaucuggaguccgacggaaaaccccacaaggugggcaccgcggggucuaacaaaagccuccaguccgccggauucccuacaggccugacguauagccagcugaugacccuuaaggauucuaugaugcaacucgaccccuccgcuaaaacauggauugauaucgagggcagaccugaagaccccguugagaucgcccuguaccagccgaugagcgggugcuacauucacuuuuuccgggaaccuaccgaccugaagcaguuuaagcaggaugcuaaauauucucauggaaucgacguggccgaucucuuccccgcccaaccuggccugacauccgcugucauugaggcgcuucccagaaauauggugcugaccugucaggggagcgacgauaucaagcgccuccuggacucccagggacggaaagauauuaagcugaucgacaucgcccuuucuaaaacggauagcagacgcuuugaaaacgcugucugggaccagugcaaggaucucugucauaugcacacaggcgugguuguggagaagaaaaagagagggggcaaagaggaaauuacaccccacugcgcccugauggacuguaucauguacgaugccgcugucuccggaggccugaauauuccugugcuccgggccguucugccgcgcgacaugguguuccggaccucuagccccaaggucgugcuuugaggacuagucccuguucccagagcccacuuuuuuuucuuuuuuugaaauaaaauagccugucuuucagaucucaaaggcucuuuucagagccaccaaaaaaaaaaaaaaaaaaaaaaaaaaaaaaaaaaaaaaaaaaaaaaaaaaaaaaaaaaaaaaaaaaaaaaaaaaaaaaaaaaaaaaaaaaaaaaaaaaaaa

SEQ ID NO: 18594 - RNA, 2064 nt, Artificial Sequence
  mRNA product Design a-2 (hSL-A100) comprising derived and/or modified sequence from LASV(LASV003-NIG-2008;Clade II)__AIT17581__SP-HsPLAT_NP(2-569) (opt5)
aggagaguccgcucagccagguugcagaagcggcuuagcguguguccuaaucuucucucugcguguagguaggccugugccgcaaacaagcuuaccauggacgccaugaagagaggccugugcugugugcuccugcuuugcggggcugucuucguuagccccagcgccuccaaggaggugaaaucuuuccuguggacccagagccucagacgggaacuguccggcuacugcucuagcaucaaacuucaagucguuaaggacgcucaggcccugcuccacgggcuggauuuuuccgaggugucuaacgugcagcgccuuaugagaaagcagaaacgggacgauagcgaccugaagcgccucagagaucugaaucaagcggucaacaaucugguggaacucaaguccacccagcagaaaagcguucugcgggugggaacgcuuaccucugacgaucugcucacacuggcugccgaccuugagaagcugaaauccaaggucauucgcaccgaaagaccccucagcucuggcguguauauggggaaccuguccgcccagcaacuggagcagcggcgcacacuccugaauaugaucggaaugguuggcggggcucagggaacccagccuggcagagauggcgugguccgggugugggacgugaaaaacccggaucuucugaauaaccaauucgggacaaugcccagccucacccuggccugucuuacgaagcagggacaggucgaccugaaugauguugugcucgcucugaccgaccugggccucauuuacacagccaaguauccuaacucuuccgaccuggaucgccuuagccaaucccaucccauccugucuaugguggacaccaaaaagagcucccucaauauuagcggguacaacuuuucucugggagcggccgucaaagcuggcgccugcaugcuugaugggggaaauaugcuggagacaaucaaggugaccccucagacgauggacggcauccucaaauccauucugaagguuaaaaagagccugggcauguucgugucugauacacccggggaaagaaacccuuaugagaauauccucuacaagauuugucugagcggagacggcuggccguauaucgcuucccggaccucuauugucgggcgcgccugggaaaacacaaccguggaucuugagagcgacggaaaaccccagaagguuggcaccgcgggguccaacaaaagccugcagucugccggauuuccuacaggccucacguacucccaacugaugacccugaaggauagcaugaugcagcuugaccccucugcuaaaacauggaucgauauugagggcagaccugaagaccccguggagaucgcccucuaccagccgauguccgggugcuauauccacuucuuucgggaaccuaccgaccugaagcaguucaagcaagaugcuaaauacagccauggaauugacgucacagaucuguuucccgcccagccuggccucaccuccgccgugaucgaggcucugcccagaaauaugguccuuacgugucaggggucugacgauauuaagcgccugcucgacagccagggacggagagauaucaaacugauugacaucgcgcuguccaaggccgauucucgccgguucgaaaacgcugugugggaccaaugcaaagaucuuugucacaugcauacaggcguuguggucgagaagaagaaaagagggggcaaggaggaaaucacaccccacugcgcccucauggacuguauuauguaugaugccgcugugagcggaggccugaauaucccuguucugcgcgccgugcucccgcgggacauggucuuuagaaccuccagccccaaaguggugcugugaggacuagucccuguucccagagcccacuuuuuuuucuuuuuuugaaauaaaauagccugucuuucagaucucaaaggcucuuuucagagccaccaaaaaaaaaaaaaaaaaaaaaaaaaaaaaaaaaaaaaaaaaaaaaaaaaaaaaaaaaaaaaaaaaaaaaaaaaaaaaaaaaaaaaaaaaaaaaaaaaaaaa

SEQ ID NO: 18595 - RNA, 2064 nt, Artificial Sequence
  mRNA product Design a-2 (hSL-A100) comprising derived and/or modified sequence from LASV(LASV035-NIG-2009;Clade II)__AIT17589__SP-HsPLAT_NP(2-569) (opt5)
aggagaguccgcucagccagguugcagaagcggcuuagcguguguccuaaucuucucucugcguguagguaggccugugccgcaaacaagcuuaccauggacgccaugaagagaggccugugcugugugcuccugcuuugcggggcugucuucguuagccccagcgccuccaaggaggugaaaucuuuccuguggacccagagccucagacgggaacuguccggcuacugcucuagcaucaaacuucaagucguuaaagacgcucaggcccugcuccacgggcuggauuuuuccgaggugucuaacgugcagcgccuuaugagaaagcagaaacgggacgauagcgaccugaagcgccucagagaucugaaucaagcggucaacaaucugguggaacucaaguccacacagcagaaaagcauucugcggguuggaacgcuuaccucugacgaucugcucacacuggcugccgaccuugagaagcugaaauccaaggugauccgcaccgaaagaccccucagcucuggcgucuauauggggaaccuguccgcccagcaacuggagcagcggcgcgcucuccugaauaugauuggaauggugggcggggcccagggaacacagccuggcagagauggcguugugcgggucugggacgugaaaaacccggaucuucugaauaaccaauucgggaccaugcccagccucacacuggcuugucuuaccaagcagggacagguggaccugaaugaugccguccucgcgcugacggaccugggccucaucuacaccgccaaguauccuaacucuuccgaccuggaucgccuuagccaaucccaucccauucugaauaugguugacacaaagaagucuagccucaacaucuccggguacaauuuuagccugggagcugccgugaaagcuggcgccugcaugcuugaugggggaaacaugcuggagaccaucaaggugacaccucagaccauggacggcauucucaaaucuauccugaaggucaaaagaucccugggcauguucgugagcgauacgcccggggaacggaauccuuaugagaacauucucuacaagaucugucugucuggagacggcuggccguauauugcgagccgcacauccaucguugggagagccugggaaaacaccacaguggaucuugagucugacggaaagccccagaaagucggcaccaccgggagcaauaagucccugcagagcgcuggauuuccuacaggccucacguacucucaacugaugacccugaaagauuccaugaugcagcuugaccccagcgccaagacauggauugauaucgagggccggccugaagaccccguggagaucgcucucuaccagccgaugucugggugcuauauucacuucuuuagagaaccuaccgaccugaaacaguucaagcaagaugccaaguacucccauggaaucgacguugccgaucuguuucccgcucagccuggccucacaagcgcggugauugaggcccugccccgcaacaugguccuuaccugucagggguccgacgauaucaaaaagcugcucgacucucagggacggagagauauuaaacugaucgacaucgcucugagcaaggccgauucccgcaaauucgaaaaugccgugugggaccaaugcaaggaucuuugucacaugcauacgggcgucgugguugagaagaaaaagagagggggcaaagaggaaauuacaccccacugcgcucucauggacuguaucauguaugaugccgcggugucuggaggccugaacauuccuguccugcgggcugugcucccgcgcgacaugguuuuucggaccagcucccccaaggugguccugugaggacuagucccuguucccagagcccacuuuuuuuucuuuuuuugaaauaaaauagccugucuuucagaucucaaaggcucuuuucagagccaccaaaaaaaaaaaaaaaaaaaaaaaaaaaaaaaaaaaaaaaaaaaaaaaaaaaaaaaaaaaaaaaaaaaaaaaaaaaaaaaaaaaaaaaaaaaaaaaaaaaaa

SEQ ID NO: 18596 - RNA, 2064 nt, Artificial Sequence
  mRNA product Design a-2 (hSL-A100) comprising derived and/or modified sequence from LASV(LASV1000-NIG-2009;Clade II)__AIT17783__SP-HsPLAT_NP(2-569) (opt5)
aggagaguccgcucagccagguugcagaagcggcuuagcguguguccuaaucuucucucugcguguagguaggccugugccgcaaacaagcuuaccauggacgccaugaagagaggccugugcugugugcuccugcuuugcggggcugucuucguuagccccagcgccuccaaggaggugaaaucuuuccuguggacccagagccucagacgggaacuguccggcuacugcucuaacaucaaacuucaagucguuaaggacgcucaggcccugcuccacgggcuggauuuuagcgagguguccaaugugcagcgccuuaugagaaagcagaaacgggacgauucugaccugaagcgccucagagaucugaaccaagcggucaauaaccugguggaacucaagagcacacagcagaaauccauucugcggguuggaacgcuuaccagcgacgaucugcucacacuggcugccgaccuugagaagcugaaaucuaaggugauccgcaccgaaagaccccucuccagcggcgucuauauggggaaucugucuacacagcaacuggagcagcggcgcgcccuccugaacaugauuggaauggugggcggggcucagggaacccagccuggcagagauggcguugugcgggucugggacgugaaaaauccggaucuucugaacaaucaauucgggacaaugcccucccucacccuggccugucuuacgaagcagggacagguggaccugaacgaugucguucucgcucugaccgaccugggccucaucuacacagccaaguauccuaauagcucugaccuggaucgccuuucccaaagccaucccauucugaacaugguggacaccaaaaaguccucucucaauaucagcggguacaacuuuucccugggagcggccgugaaagcuggcgccugcaugcuugaugggggaaauaugcuggagacaaucaaggucaccccucagacgauggacggcauucucaaaagcauccugaaggugaaaaagucucugggcauguucguuuccgauacacccggggaaagaaacccuuaugagaacauucucuacaagaucugucugagcggagacggcuggccguauauugcuucucggaccagcaucguggggcgcgccugggaaaauacaaccgucgaucuugaguccgacggaaaaccccagaaggugggcaccgcggggucuaacaaaagccugcaguccgccggauuuccuacaggccucacguacagccaacugaugacccugaaggauucuaugaugcagcuugaccccuccgcuaaaacauggauugauaucgagggcagaccugaagaccccguugagaucgcccucuaccagccggugagcgggugcuauauucacuucuuucgggaaccuaccgaccugaagcaguucaagcaagaugcuaaauacucucauggaaucgacgucgccgaucuguuucccgcccagccuggccucacauccgcugugauugaggcgcugcccagaaauaugguccuuaccugucaggggagcgacgauaucaagcgccugcucgacucccagggacggagagauauuaaacugaucgacaucgcccugucuaaggcugauagccgccgguucgaaaacgccgugugggaccaaugcaaagaucuuugucacaugcauacgggcguuguggucgagaagaagaaaagagggggcaaggaggaaauuacaccccacugcgcccucauggacuguaucauguaugaugcugccguguccggaggccugaauauuccuguucugcgcgcggugcucccgcgggacauggucuuuagaaccucuagccccaaaguggugcugugaggacuagucccuguucccagagcccacuuuuuuuucuuuuuuugaaauaaaauagccugucuuucagaucucaaaggcucuuuucagagccaccaaaaaaaaaaaaaaaaaaaaaaaaaaaaaaaaaaaaaaaaaaaaaaaaaaaaaaaaaaaaaaaaaaaaaaaaaaaaaaaaaaaaaaaaaaaaaaaaaaaaa

SEQ ID NO: 18597 - RNA, 2064 nt, Artificial Sequence
  mRNA product Design a-2 (hSL-A100) comprising derived and/or modified sequence from LASV(LASV221-NIG-2010;Clade II)__AIT17625__SP-HsPLAT_NP(2-569) (opt5)
aggagaguccgcucagccagguugcagaagcggcuuagcguguguccuaaucuucucucugcguguagguaggccugugccgcaaacaagcuuaccauggacgccaugaagagaggccugugcugugugcuccugcuuugcggggcugucuucguuagccccagcgccuccaaggaggugaaaucuuuccuguggacccagagccucagacgggaacuguccggcuacugcucuagcaucaaacuucaagucguuaaggacgcucaggcccugcuccacgggcuggauuuuuccgaggugucuaacgugcagcgccuuaugagaaagcagcggcgcgacgauagcgaccugaaaagacuccgggaucugaaucaagcggucaacaaucugguggaacucaaguccacacagcaaaagagcauucugcgcguuggaacgcuuaccucugacgaucugcucacacuggcugccgaccuugagaaacugaaguccaaagugaucagaaccgaacggccccucagcucuggcgucuauauggggaaccuguccacacagcagcuggagcagcgcagagcccuccugaauaugauuggaauggugggcggggcucagggaacccagccuggccgggauggcguugugcgcgucugggacgugaagaacccggaucuucugaauaaccaauucgggacaaugcccagccucacccuggccugucuuacgaaacagggacagguggaccugaaugaugcuguccucgcccugaccgaccugggccucaucuacacagcgaaguauccuaacucuuccgaccuggauagacuuagccaaucccaucccauucugaauaugguugacaccaagaaaucuagccucaacaucuccggguacaauuuuagccugggagccgcugugaaggccggcgcuugcaugcuugaugggggaaacaugcuggagacaaucaaagugaccccucagacggucgacggcauucucaagucuauccugaaagugaagcggucccugggcauguucguuagcgauacacccggggaacgcaauccuuaugagaacauucucuacaaaaucugucugucuggagacggcuggccguauauugccagcagaaccuccaucguggggcgggcgugggaaaacacaaccgucgaucuugagucugacggaaagccccagaaggugggcaccgccgggagcaauaaaucccugcagagcgcuggauuuccuacaggccucacguacucucaacugaugacccugaaggauuccaugaugcagcuugaccccagcgccaaaacauggauugauaucgagggcagaccugaagaccccguugagaucgcucucuaccagccgaugucugggugcuauauucacuucuuucgcgaaccuaccgaccugaagcaguucaaacaagaugccaaguacucccauggaaucgacguggccgaucuguuucccgcucagccuggccucacaagcgcggucauugaggcccugccccggaacauggugcuuaccugucagggguccgacgauaucaagagacugcucgacucucagggacgccgggauauuaaacugaucgacaucgcucugagcaaggccgauuccagaaaauucgaaaaugccgucugggaccaaugcaaggaucuuugucacaugcauacgggcgugguuguggagaaaaagaagcgcgggggcaaagaggaaauuacaccccacugcgcucucauggacuguaucauguaugaugccgcggucucuggaggccugaacauuccugugcugcgggcuguucucccgagagacaugguguuucgcaccagcucccccaaggucgugcugugaggacuagucccuguucccagagcccacuuuuuuuucuuuuuuugaaauaaaauagccugucuuucagaucucaaaggcucuuuucagagccaccaaaaaaaaaaaaaaaaaaaaaaaaaaaaaaaaaaaaaaaaaaaaaaaaaaaaaaaaaaaaaaaaaaaaaaaaaaaaaaaaaaaaaaaaaaaaaaaaaaaaa

SEQ ID NO: 18598 - RNA, 2064 nt, Artificial Sequence
  mRNA product Design a-2 (hSL-A100) comprising derived and/or modified sequence from LASV(LASV237-NIG-2010;Clade II)__AIT17639__SP-HsPLAT_NP(2-569) (opt5)
aggagaguccgcucagccagguugcagaagcggcuuagcguguguccuaaucuucucucugcguguagguaggccugugccgcaaacaagcuuaccauggacgccaugaagagaggccugugcugugugcuccugcuuugcggggcugucuucguuagccccagcgccuccaaggaggugaaaucuuuccuguggacccagagccucagacgggaacuguccggcuacugcucuaacaucaaacuucaagucguuaaggacgcucaggcccugcuccacgggcuggauuuuagcgagguguccaaugugcagcgccuuaugagaaagcagaaacgggacgauucugaccugaagcgccucagagaucugaaccaagcggucaauaaccugguggaacucaagagcacacagcagaaauccauucugcggguuggaacgcuuaccagcgacgaucugcucacacuggcugccgaccuugagaagcugaaaucuaaggugauccgcaccgaaagaccccucuccagcggcgucuauauggggaaucugucuacacagcaacuggagcagcggcgcgcccuccugaacaugauuggaauggugggcggggcucagggaacccagccuggcagagauggcguugugcgggucugggacgugaaaaauccggaucuucugaacaaucaauucgggacaaugcccucccucacccuggccugucuuacgaagcagggacagguggaccugaacgaugcuguccucgcccugaccgaccugggccucaucuacacagcgaaguauccuaauagcucugaccuggaucgccuuucccaaagccaucccauucugaacaugguugacaucaaaaaguccucucucaauaucagcggguacaacuuuucccugggagccgcugugaaagccggcgcuugcaugcuugaugggggaaauaugcuggagaccauuaaggugacaccucagaccauggacggcauccucaaaagcauucugaaggucaaaagaucucugggcauguucguguccgauacgcccggggaacggaacccuuaugagaacauccucuacaagauuugucugagcggagacggcuggccguauaucgccucucgcacaagcauuguugggagagcgugggaaaauaccacaguggaucuugaguccgacggaaagccccagaaagucggcucugccgggagcaacaagucccugcagagcgcuggauuuccuaccggccucaccuacucucaacugaugacacugaaagauuccaugaugcagcuugaccccagcgccaagacguggaucgauaucgagggccggccugaagaccccguggagauugcucucuaccagccgaugucugggugcuauauccacuucuuuagagaaccuaccgaccugaaacaguucaagcaagaugccaaguacucccauggaauugacguugccgaucuguuucccgcucagccuggccucacaagcgcggugaucgaggcccugccccgcaauaugguccuuaccugucagggguccgacgauauuaaacggcugcucgacucucagggaagacgcgauaucaagcugaucgacauugcucugagcaaagccgauucccggagauucgaaaacgccgugugggaccaaugcaaggaucuuugucacaugcauacaggcgucgugguugagaaaaagaagcgcgggggcaaagaggaaaucacgccccacugcgcucucauggacuguauuauguaugaugccgcggugucuggaggccugaauaucccuguccugcgggcugugcucccgagagacaugguuuuucgcaccagcucccccaaggugguccugugaggacuagucccuguucccagagcccacuuuuuuuucuuuuuuugaaauaaaauagccugucuuucagaucucaaaggcucuuuucagagccaccaaaaaaaaaaaaaaaaaaaaaaaaaaaaaaaaaaaaaaaaaaaaaaaaaaaaaaaaaaaaaaaaaaaaaaaaaaaaaaaaaaaaaaaaaaaaaaaaaaaaa

SEQ ID NO: 18599 - RNA, 2064 nt, Artificial Sequence
  mRNA product Design a-2 (hSL-A100) comprising derived and/or modified sequence from LASV(LASV253-NIG-2011;Clade II)__AIT17671__SP-HsPLAT_NP(2-569) (opt5)
aggagaguccgcucagccagguugcagaagcggcuuagcguguguccuaaucuucucucugcguguagguaggccugugccgcaaacaagcuuaccauggacgccaugaagagaggccugugcugugugcuccugcuuugcggggcugucuucguuagccccagcgccuccaaggaggugaaaucuuuccuguggacccagagccucagacgggaacuguccggcuacugcucuagcaucaaacuucaagucguuaaggacgcucaggcccugcuccacgggcuggauuuuuccgaggugucuaacgugcagcgccuuaugagaaagcagaaacgggacgauagcgaccugaagcgccucagagaucugaaucaagcggucaacaaucugguggaacucaaguccacccagcagaaaagcguucugcgggugggaacgcuuaccucugacgaucugcucacacuggcugccgaccuugagaagcugaaauccaaggucauucgcaccgaaagaccccucagcucuggcguguauauggggaaccuguccacacagcaacuggagcagcggcgcgcccuccugaauaugaucggaaugguuggcggggcucagggaacccagccuggcagagauggcgugguccgggugugggacgugaaaaacccggaucuucugaauaaccaauucgggacaaugcccagccucacccuggccugucuuacgaagcagggacaggucgaccugaaugauguugugcucgcucugaccgaccugggccucauuuacacagccaaguauccuaacucuuccgaccuggaucgccuuagccaaucccaucccauccugaauaugguggacaccaaaaagucuagccucaacauuuccggguacaauuuuagccugggagcggccgucaaagcuggcgccugcaugcuugaugggggaaacaugcuggagacaaucaaggugaccccucagacgauggacggcauccucaaaucuauucugaagguuaaaaagucccugggcauguucgugagcgauacacccggggaaagaaauccuuaugagaacauccucuacaagauuugucugucuggagacggcuggccguauaucgcuagccggaccuccauugucgggcgcgccugggaaaacacaaccguggaucuugagucugacggaaaaccccagaagguuggcaccgcggggagcaauaaaucccugcagagcgccggauuuccuacaggccucacguacucucaacugaugacccugaaggauuccaugaugcagcuugaccccagcgcuaaaacauggaucgauauugagggcagaccugaagaccccguggagaucgcccucuaccagccgaugucugggugcuauauccacuucuuucgggaaccuaccgaccugaagcaguucaagcaagaugcuaaauacucccauggaauugacgucacagaucuguuucccgcccagccuggccucaccagcgccgugaucgaggcucugcccagaaacaugguccuuacgugucagggguccgacgauauuaagcgccugcucgacucucagggacggagagauaucaaacugauugacaucgcgcugagcaaggccgauucccgccgguucgaaaaugcugugugggaccaaugcaaagaucuuugucacaugcauacaggcguuguggucgagaagaagaaaagagggggcaaggaggaaaucacaccccacugcgcccucauggacuguauuauguaugaugccgcugugucuggaggccugaacaucccuguucugcgcgccgugcucccgcgggacauggucuuuagaaccagcucccccaaaguggugcugugaggacuagucccuguucccagagcccacuuuuuuuucuuuuuuugaaauaaaauagccugucuuucagaucucaaaggcucuuuucagagccaccaaaaaaaaaaaaaaaaaaaaaaaaaaaaaaaaaaaaaaaaaaaaaaaaaaaaaaaaaaaaaaaaaaaaaaaaaaaaaaaaaaaaaaaaaaaaaaaaaaaaa

SEQ ID NO: 18600 - RNA, 2064 nt, Artificial Sequence
  mRNA product Design a-2 (hSL-A100) comprising derived and/or modified sequence from LASV(LASV254-NIG-2011;Clade II)__AIT17675__SP-HsPLAT_NP(2-569) (opt5)
aggagaguccgcucagccagguugcagaagcggcuuagcguguguccuaaucuucucucugcguguagguaggccugugccgcaaacaagcuuaccauggacgccaugaagagaggccugugcugugugcuccugcuuugcggggcugucuucguuagccccagcgccuccaaggaggugaaaucuuuccuguggacccagagccucagacgggaacuguccggcuacugcucuagcaucaaacuucaagucguuaaggacgcucaggcccugcuccacgggcuggauuuuuccgaggugucuaacgugcagcgccuuaugagaaagcagaaacgggacgauagcgaccugaagcgccucagagaucugaaucaagcggucaacaaucugguggaacucaaguccacacagcagaaaagcguucugcgggugggaacgcuuaccucugacgaucugcucacacuggcugccgaccuugagaagcugaaauccaaggucauucgcaccgaaagaccccucagcucuggcguguauauggggaaccuguccacacagcaacuggagcagcggcgcgcccuccugaauaugaucggaaugguuggcggggcucagggaacccagccuggcagagauggcgugguccgggugugggacgugaaaaacccggaucuucugaauaaccaauucgggacaaugcccagccucacccuggccugucuuacgaagcagggacaggucgaccugaaugaugcuguucucgcccugaccgaccugggccucauuuacacagcgaaguauccuaacucuuccgaccuggaucgccuuagccaaucccaucccauccugaauaugguggacaccaaaaagucuagccucaacauuuccggguacaauuuuagccugggagccgcugugaaagccggcgcuugcaugcuugaugggggaaacaugcuggagacaaucaaggucaccccucagacgauggacggcauccucaaaucuauucugaaggugaaaaagucccugggcauguucguuagcgauacacccggggaaagaaauccuuaugagaacauccucuacaagauuugucugucuggagacggcuggccguauaucgccagccggaccuccauuguggggcgcgcgugggaaaacacaaucgucgaucuugagucugacggaaaaccccagaaggugggcaccgccgggagcaauaaaucccugcagagcgcuggauuuccuaccggccucacauacucucaacugaugacgcugaaggauuccaugaugcagcuugaccccagcgccaaaaccuggauugauaucgagggcagaccugaagaccccguugagaucgcucucuaccagccgaugucugggugcuauauucacuucuuucgggaaccuacagaccugaagcaguucaagcaagaugccaaauacucccauggaaucgacguggccgaucuguuucccgcucagccuggccucaccagcgcggucauugaggcccugcccagaaacauggugcuuacaugucagggguccgacgauaucaagcgccugcucgacucucagggacggagagauauuaaacugaucgacaucgcucugagcaaggccgauucccgccgguucgaaaaugccgucugggaccaaugcaaagaucuuugucacaugcauaccggcgugguuguggagaagaagaaaagagggggcaaggaggaaauuacgccccacugcgcucucauggacuguaucauguaugaugccgcggucucuggaggccugaacauuccugugcugcgcgcuguucucccgcgggacaugguguuuagaacaagcucccccaaagucgugcugugaggacuagucccuguucccagagcccacuuuuuuuucuuuuuuugaaauaaaauagccugucuuucagaucucaaaggcucuuuucagagccaccaaaaaaaaaaaaaaaaaaaaaaaaaaaaaaaaaaaaaaaaaaaaaaaaaaaaaaaaaaaaaaaaaaaaaaaaaaaaaaaaaaaaaaaaaaaaaaaaaaaaa

SEQ ID NO: 18601 - RNA, 2064 nt, Artificial Sequence
  mRNA product Design a-2 (hSL-A100) comprising derived and/or modified sequence from LASV(Nig08-04;Clade II)__ADU56611__SP-HsPLAT_NP(2-569) (opt5)
aggagaguccgcucagccagguugcagaagcggcuuagcguguguccuaaucuucucucugcguguagguaggccugugccgcaaacaagcuuaccauggacgccaugaagagaggccugugcugugugcuccugcuuugcggggcugucuucguuagccccagcgccuccaaggaggugaaaucuuuccuguggacccagagccucagacgggaacuguccggcuacugcucuaacaucaaacuucaagucguuaaggacgcucaggcccugcuccacgggcuggauuuuagcgagguguccaaugugcagcgccuuaugagaaagcagaaacgggacgauggagaccugaagcgccucagagaucugaaccaagcggucaauaaccugguggaacucaagucuacccagcagaaaagcguucugcgggugggcacgcuuaccuccgacgaucugcucacacuggcugccgaccuugagaagcugaaaagcaaggucauucgcaccgaaagaccccucucuuccgggguguauaugggaaaucugagcacacagcaacuggagcagcggaaagcccuccugucuaugaucggcaugguugggggagcucagggcacccagccuggccgcgaugggguggucagagugugggacgugaagaacccggaucuucugaauaaccaauucggaacaaugcccucccucacccuggccugucuuacgaagcagggccaggucgaccugaaugaugcuguucucgcccugaccgaccuggggcucauuuacacagcgaaauauccuaacagcucugaccuggaucggcuuucccaaagccaucccauccugaauaugguggacaccaagaaauccucucucaacauuagcggauacaauuuuucccugggcgccgcugugaaggccggggcuugcaugcuugauggaggcaacaugcuggagacaaucaaagucaccccucagacgauggacggcauccucaagagcauucugaaagugaagcgcucucuggggauguucguuuccgauacacccggagaaagaaauccuuaugagaacauccucuacaagauuugucugagcggcgacggguggccguauaucgccucucggaccagcauugugggacgcgcgugggaaaacacaaccgucgaucuugaguccgacggcaaaccccagaagguggggaccgccggaucuaauaaaagccugcaguccgcuggcuuuccuacaggccucacguacagccaacugaugacccugaaggauucuaugaugcagcuugaccccuccgccaaaacauggaucgauauugaggggagaccugaagaccccguugagaucgcucucuaccagccgaugagcggaugcuauauccacuucuuucgggaaccuaccgaccugaagcaguucaagcaagaugccaaauacucucauggcauugacgugacagaucuguuuuccgcccagcccgggcucaccagcgcugucaucgaggcgcugccuagaaacauggugcuuacgugucagggauccgacgauauuaagaaacugcucgacucucagggccgccgggauaucaagcugauugacaucagccugaauaaagccgauuccagacgcuucgaaaacgcugucugggaccaaugcaaggaucuuugucacaugcauacaggggugguuguggagaagaaaaagcggggcggaaaagaggaaaucacaccccacugcgcccucauggacuguauuauguuugaugccgcugucucuggcgggcugaauauccccauucugagagccgugcucccucgcgacaugguuuuccggaccagcuccccgaaggugguccugugaggacuagucccuguucccagagcccacuuuuuuuucuuuuuuugaaauaaaauagccugucuuucagaucucaaaggcucuuuucagagccaccaaaaaaaaaaaaaaaaaaaaaaaaaaaaaaaaaaaaaaaaaaaaaaaaaaaaaaaaaaaaaaaaaaaaaaaaaaaaaaaaaaaaaaaaaaaaaaaaaaaaa

SEQ ID NO: 18602 - RNA, 2067 nt, Artificial Sequence
  mRNA product Design a-2 (hSL-A100) comprising derived and/or modified sequence from LASV(GA391;Clade III)__AAA46284__SP-HsPLAT_NP(2-570) (opt5)
aggagaguccgcucagccagguugcagaagcggcuuagcguguguccuaaucuucucucugcguguagguaggccugugccgcaaacaagcuuaccauggacgccaugaagagaggccugugcugugugcuccugcuuugcggggcugucuucguuagccccagcgccuccaaggaggugagaucuugccuguggacccagagccuccggcgcgaacuguccggcuacuguucuaacaucaaacuucaagucguuaaggacgcucaggcccugcuccacgggcuggauuucagcgagguguccaaugugcagagacuuaugcggaaacagaagcgcgacgauggagaccugaaaagacuccgggaucugaaccaagcggucaauaaccugguggaacucaagucuacacagcagaaaagcguucugcgcgugggcacgcuuuccagcgacgaucugcucauucuggcugccgaccuugagaaacugaagucuaaagucaccagaacagaacggccccucuccagcgggguguauaugggaaaucugucuucccagcaacuggaucagcgcagagcccuccugaacaugaucggcaugaccgggguuagcggaggcggcaagggggcuucuaauggaauugugcgggucugggacgugaaaaacgccgagcuucugaauaaccaguuuggcacaaugccuucccucacccuggcuugccuuacaaagcaggggcaaguggaucugaaugacgccguccaggcgcucaccgaucugggacugaucuacacggccaaguauccgaacagcuccgaccucgaccgccugucucagagccaucccauucuuaauaugaucgauaccaaaaaguccagccugaacaucucuggcuacaauuucucccucggggcugccguuaaagcuggagccuguaugcuggacggcggcaacaugcuugagacaauuaaggugagcccucaaaccauggaugggauccugaaaucuauucucaaggugaaaaagagccugggaauguuugucuccgacacacccggcgaaagaaacccuuaugagaauauccuguacaagauuugccucucuggggauggauggagcuauaucgcgucccggaccagcauugugggccgcgccugggaaaacacgguuguggaccuggagcaggauaauaaaccccagaagaucgggaacggaggcucuaauaaaucccuucagagcgcuggcuucgccgcugggcugaucuacucucaacucaugacacugaaggacuuuaaauguuucaaccugauuccuaaugccaagaccuggauggauaucgagggaagaccggaagaccccgucgagauugcccuuuaccagccuuccagcggcugcuaugugcacuuuuuccgggaacccacagaucucaagcaguuuaaacaggacgcuaaguacucccaugggagagacguuaccgaucuguucgcggcccaaccuggacugaccucugcugugaucgaggcccucccccgcaacauggucauuacaugucagggcagcgaagacauccggaaacugcuugagucccaggggagacgcgauaucaagcugauugacaucacgcucucuaaagccgauagccggaaguuugagaaugcugugugggaccaguucaaggaucugugccacaugcauaccggcgucgugguugaaaagaagaaaagaggaggcaaggaggaaauuacaccgcacugugcccugauggacugcaucauguuugaugcggcuguguccgggggacuugacgccaaaguccuccgcgugguucugccucgggauaugguguucagaaccagcacacccaaggucgugcugugaggacuagucccuguucccagagcccacuuuuuuuucuuuuuuugaaauaaaauagccugucuuucagaucucaaaggcucuuuucagagccaccaaaaaaaaaaaaaaaaaaaaaaaaaaaaaaaaaaaaaaaaaaaaaaaaaaaaaaaaaaaaaaaaaaaaaaaaaaaaaaaaaaaaaaaaaaaaaaaaaaaaa

SEQ ID NO: 18603 - RNA, 2064 nt, Artificial Sequence
  mRNA product Design a-2 (hSL-A100) comprising derived and/or modified sequence from LASV(Nig08-A19;Clade III)__ADU56619__SP-HsPLAT_NP(2-569) (opt5)
aggagaguccgcucagccagguugcagaagcggcuuagcguguguccuaaucuucucucugcguguagguaggccugugccgcaaacaagcuuaccauggacgccaugaagagaggccugugcugugugcuccugcuuugcggggcugucuucguuagccccagcgccuccaaggaggugaaaucuuuccuguggacccagagccucagacgggaacuguccggcuacugcucuaacaucaaacuucaagucguuaaggacgcucaggcccugcuccacgggcuggauuuuagcgagguguccaaugugcagcgccuuaugagaaagcagaaacgggacgauggagaccugaagcgccucagagaucugaaccaagcggucaauaaccugguggaacucaagucuacacagcagaaaagcguucugcgggugggcacgcuuuccagcgacgaucugcucguccuggcugccgaccuugagaagcugaaaucuaaggugguucgcaccgaaagaccccucuccagcgggauuuauaugggaaaucugucuucccagcaacuggaucagcggaaagcccuccugaacaugaucggcaugacagggggaaauggcggccgcaacaccacaagcgacgggauugugagagucugggaugugaagaaugcugagcuucugaacaaucaguucggaaccaugccuucucucacacuggccugucuuaccaagcagggccaaguggaccugaacgaugcuguccaggcccucacggaccuggggcugaucuacaccgcgaaauaucccaauuccagcgaccucgaucggcuggcccagucccauccgauucuuaacaugaucgacacaaagaaaucuagccugaauaucuccggauacaacuuuagccucggcgcugccguuaaggcuggggccugcaugcuggauggaggcaacaugcuugagaccauuaaagugucuccucaaacaauggacggcauccugaaguccauucucaaagugaagcgcagccuggggauguucaucucugauacccccggagaaagaaauccuuaugagaacauucuguacaagaucugucucagcggcgacggguggcccuauauugcgucccggacgucuaucgucggacgcgccugggaaaauacagugguugaucuggagagcgacaacaaaccucagaagaccggcaaugggggauccaacaaaagccuucagucugcuggcuuugccgcuggccugacauacucccagcucaugacccugaaggauagcaugcugcaacuugacccgaaugccaaaaccuggauggauaucgaggggagacccgaagacccuguggagauugcccucuaccagcccucuuccggaugcuauauccacuucuuucgggaaccuacagaccugaagcaguucaagcaggaugcuaaauacagccauggcauugacgucacggaucuguuugcggcccaacccgggcucaccuccgcugugaucgaggcccugccgagaaacaugguuauuacaugucagggaucugaagacauccgcaaacuucuggagagccagggccggagagauaucaagcucauugacaucucccugucuaagguggauagccgcaaauucgagaaugccgucugggaccaguuuaaggaucugugccacaugcauaccgggauuguggucgaaaagaaaaagcggggcggaaaagaggaaaucacaccucacugugcucuuauggacugcauuauguucgaugccgcgguguccggcgggguugacgcuaaggugcucagagccguccugccccgcgauaugguguuucggaccagcacgccuaaaguugugcugugaggacuagucccuguucccagagcccacuuuuuuuucuuuuuuugaaauaaaauagccugucuuucagaucucaaaggcucuuuucagagccaccaaaaaaaaaaaaaaaaaaaaaaaaaaaaaaaaaaaaaaaaaaaaaaaaaaaaaaaaaaaaaaaaaaaaaaaaaaaaaaaaaaaaaaaaaaaaaaaaaaaaa

SEQ ID NO: 18604 - RNA, 2064 nt, Artificial Sequence
  mRNA product Design a-2 (hSL-A100) comprising derived and/or modified sequence from LASV(G1180-SLE-2010;Clade IV)__AIT17169__SP-HsPLAT_NP(2-569) (opt5)
aggagaguccgcucagccagguugcagaagcggcuuagcguguguccuaaucuucucucugcguguagguaggccugugccgcaaacaagcuuaccauggacgccaugaagagaggccugugcugugugcuccugcuuugcggggcugucuucguuagccccagcgccuccaaggagaucaaaucuuuccuguggacccagagccucagacgggaacuguccggcuacugcucuaacauuaagcugcaaguggucaaagacgcucaggcccugcuccacgggcuggauuuuagcgagguuuccaaugugcagcgccuuaugagaaaggaacggcgcgacgauaacgaccugaaaagacuccgggaucugaaucaggcggugaacaaucuggucgagcucaagucuacacaacaaaagagcauccugcgcgugggaacgcuuaccuccgacgaucugcucauucuggcugccgaccuugaaaaacuuaagagcaaaguuaucagaacagagcggccccucucugccggcguguauauggggaaccuguccagccagcagcuggaucagcgcagagcucuccugucuaugauuggaauguccagcggcaaucagcgggcccaggcugggcgcgacggagucgugagaguuugggaugugaagaacgucgagcuucugaauaaccaguucggcaccaugccuucucucacacuggccugucuuaccaaacaaggccagguggaccugaaugaugcggugcaggcccucacagaccuggggcugaucuacaccgcuaaguauccgaacacguccgaccucgaucggcugacccaaagccaucccauccuuaauaugauugacacaaagaaauccucucugaacaucagcggauacaauuuuucccucggcgccgcugucaaggccggggcgugcaugcuggauggaggcaacaugcuugaaaccauuaaaguuagcccucagacaauggacgggauccugaagucuauucucaaagugaagaaagcccugggaauguucaucuccgauacccccggcgagcgcaacccuuaugaaaauauucuguacaagaucugucucagcggcgacggguggcccuauaucgcuucuagaacgagcauuacaggacgggccugggagaacaccguggucgaucuggaguccgacggcaagccucagaaagcugggucuaauaacagcaauaagucccuucagagcgugggauuuacagccggccugaccuacucucaacucaugacccugaaagaugccaugcugcagcuugacccgaacgcuaagacauggauggauaucgaagggagacccgaggacccuguugaaauugcgcucuaccagcccuccagcggaugcuauauccacuucuuucgcgagccuacggaccugaaacaguucaagcaagaugccaaguacucucauggcauugacgugaccgaucuguuugcugcccagcccggccucacauccgccgucaucgacgcucugccgcggaauauggugaucaccugucaggggagcgaugacauuagaaaacuucuggaaucccagggacgcaaggauaucaaacucauugacaucgcccugucuaagacagauagccggaaauaugagaacgcgguuugggaccaauacaaggaucugugccacaugcauaccggcguggucguggagaagaaaaagagagggggaaaagaagagauuacgccucacugugcucuuauggacugcaucauguucgaugccgccgucuccggcgggcucaauacaucugugcugcgcgcuguucugccccgggacaugguguuuagaaccagcaccccucgcgucgugcucugaggacuagucccuguucccagagcccacuuuuuuuucuuuuuuugaaauaaaauagccugucuuucagaucucaaaggcucuuuucagagccaccaaaaaaaaaaaaaaaaaaaaaaaaaaaaaaaaaaaaaaaaaaaaaaaaaaaaaaaaaaaaaaaaaaaaaaaaaaaaaaaaaaaaaaaaaaaaaaaaaaaaa

SEQ ID NO: 18605 - RNA, 2064 nt, Artificial Sequence
  mRNA product Design a-2 (hSL-A100) comprising derived and/or modified sequence from LASV(G1442-SLE-2011;Clade IV)__AIT17181__SP-HsPLAT_NP(2-569) (opt5)
aggagaguccgcucagccagguugcagaagcggcuuagcguguguccuaaucuucucucugcguguagguaggccugugccgcaaacaagcuuaccauggacgccaugaagagaggccugugcugugugcuccugcuuugcggggcugucuucguuagccccagcgccuccaaggaggugaaaucuuuccuguggacccagagccucagacgggaacuguccggcuacugcucuaacaucaaacuucaagucguuaaggacgcucaggcccugcuccacgggcuggauuuuagcgagguguccaaugugcagcgccuuaugagaaagcagcggcgcgacgauaacgaccugaaaagacuccgggaucugaaucaagcggucaacaaucugguggaacucaagucuacacagcaaaagagcguucugcgcgugggaacgcuuaccuccgacgaucugcucguccuggcugccgaccuugagaaacuuaagagcaaagugauuagaacagaacggccccucucugccggcguuuauauggggaaccuguccagccagcagcuggaucagcgcagagcucuccugaauaugaucggaaugucuggcgggauucagggaacccggacaggccgcgacggcguggucagagugugggaugugaagaacgccgaccuucugaauaaccaguucgggaccaugccuucccucacacuggcuugucuuaccaaacaaggacaggucgaucugaaugacguugugcaggcccucacggaccugggccugaucuacaccgcgaaguauccgaacgccagcgaucucgaccggcugacacaaucucaucccauucuuaauaugaucgauaccaagaaauccagccugaacaucuccggguacaauuuuucucucggagcugccgugaaggcuggcgccugcaugcuggacgggggaaacaugcuugagacaauuaaagucagcccucagaccauggauggcauccugaaguccauucucaaagugaagaaaacgcugggcauguucaucagcgacacacccggggagcgcaacccuuaugaaaauauucuguacaagaucugucucucuggagauggcuggcccuauauugcguccagaaccagcaucacagggcgggccugggagaacaccguuguggaccuggaaucugauggaaagccucagaaagcuggcagcaauaacuccaauaagucucuucagagcgccggguuugcugccggacugaccuacucccaacucaugacacugaaagacgccaugcugcagcuugauccgaacgcuaagacguggauggacaucgagggcagacccgaggacccugucgaaauugcgcucuaccagcccagcucuggcugcuauauccacuucuuucgcgagccuaccgaucugaaacaguucaagcaagacgccaaguacucccaugggauugaugugacagaccuguuugcugcccagcccggacucaccagcgccguuaucgaagcucugccgcggaauauggugauuacaugucagggcucugaugacaucaaaaagcugcuggagucccaggggagaaaagauaucaagcucauugacaucgcccugagcaaaaccgauucccgcaaguaugaaaacgcggucugggaccaauacaaggaucugugccacaugcauacgggaguggucguggagaaaaagaaacggggcgggaaggaggaaauuacaccucacugugcucuuauggacugcaucauguucgaugccgccguuucuggcggacucaauacccuggugcugagagcuguccucccccgcgacaugguguuucggaccagcacaccuagaguugugcugugaggacuagucccuguucccagagcccacuuuuuuuucuuuuuuugaaauaaaauagccugucuuucagaucucaaaggcucuuuucagagccaccaaaaaaaaaaaaaaaaaaaaaaaaaaaaaaaaaaaaaaaaaaaaaaaaaaaaaaaaaaaaaaaaaaaaaaaaaaaaaaaaaaaaaaaaaaaaaaaaaaaaa

SEQ ID NO: 18606 - RNA, 2064 nt, Artificial Sequence
  mRNA product Design a-2 (hSL-A100) comprising derived and/or modified sequence from LASV(G3010-SLE-2013;Clade IV)__AIT17345__SP-HsPLAT_NP(2-569) (opt5)
aggagaguccgcucagccagguugcagaagcggcuuagcguguguccuaaucuucucucugcguguagguaggccugugccgcaaacaagcuuaccauggacgccaugaagagaggccugugcugugugcuccugcuuugcggggcugucuucguuagccccagcgccuccaaggagaucaaaucuuuccuguggacccagagccucagacgggaacuguccggcuacugcucuaacauuaaacuucaaguggucaaagacgcucaggcccugcuccacgggcuggauuuuagcgagguuuccaaugugcagcgccuuaugagaaaggaacggcgcgacgauaacgaccugaaaagacuccgggaucugaaucaggcggugaacaaucuggucgagcucaagucuacacaacaaaagagcauccugcgcgugggaacgcuuaccuccgacgaucugcucauucuggcugccgaccuugaaaaacuuaagagcaaaguuacaagaaccgagcggccccucucugccggcguguauauggggaaccuguccagccagcagcuggaucagcgcagagcucuccugucuaugaucggaauguccagcggcguccagggggcccgggcuggacgcgacggcgugguuagagugugggaugucaagaaugccgagcuucugaacaaucaguucggcacaaugccuucucucacccuggcgugucuuacaaaacaggggcaaguggaccugaacgaugugguccaggcccucaccgaccugggacugauuuacacggcuaaguauccgaauaccuccgaccucgaucggcugacacagagccaucccauccuuaacaugaucgacaccaagaaauccucucugaauauuagcggcuacaacuuuucccucggggccgcuguuaaggccggagcgugcaugcuggauggcgggaauaugcuugaaacaaucaaagugagcccucaaaccauggacggcauucugaagucuauccucaaagugaagaaagcccugggaauguucauuuccgagacgcccggcgaacgcaacccuuaugagaacauccuguacaagauuugucucagcggggauggauggcccuauaucgcuucuagaacaagcaucaccggccgggccugggagaauacagucguggaccuggaauccgaugggaagccucagaaagcuggaucuaacaauagcaacaagucccuucagagcgccggcuuuaccgccgggcugaccuacucucagcucaugacacugaaagacgcuaugcugcaacuugauccgaaugcgaagacguggauggacauugagggaagacccgaagauccuguugagguggcccucuaccagcccuccagcggcugcuauauccacuucuuucgcgaaccuaccgaccugaaacaguucaagcaggacgcuaaguacucucauggcauugaugucacagaccuguuugccgcccaacccgggcucaccuccgcugugaucgaugcccugccgcggaacaugguuauuacaugucagggaagcgacgauaucaaaaagcugcuggagucccagggcagaaaagacaucaagcucauugauaucgcgcugucuaaaaccgacagccgcaaguaugagaaugcugugugggaucaguacaaggaccugugccacaugcauacgggggucguggucgaaaagaagaaacggggaggcaaggaggaaauuacaccucacugugcccuuauggauugcaucauguucgacgccgcuguguccgggggccucaacaccucuguucugagagccgugcugccccgcgauauggucuuucggaccagcacaccuagagugguucucugaggacuagucccuguucccagagcccacuuuuuuuucuuuuuuugaaauaaaauagccugucuuucagaucucaaaggcucuuuucagagccaccaaaaaaaaaaaaaaaaaaaaaaaaaaaaaaaaaaaaaaaaaaaaaaaaaaaaaaaaaaaaaaaaaaaaaaaaaaaaaaaaaaaaaaaaaaaaaaaaaaaaa

SEQ ID NO: 18607 - RNA, 2064 nt, Artificial Sequence
  mRNA product Design a-2 (hSL-A100) comprising derived and/or modified sequence from LASV(G502-SLE-2009;Clade IV)__AIT17127__SP-HsPLAT_NP(2-569) (opt5)
aggagaguccgcucagccagguugcagaagcggcuuagcguguguccuaaucuucucucugcguguagguaggccugugccgcaaacaagcuuaccauggacgccaugaagagaggccugugcugugugcuccugcuuugcggggcugucuucguuagccccagcgccuccaaggagaucaaaucuuuccuguggacccagagccucagacgggaacuguccggcuacugcucuaacauuaagcugcaaguggucaaagacgcucaggcccugcuccacgggcuggauuuuagcgagguuuccaaugugcagcgccuuaugagaaaggaacggcgcgacgauaacgaccugaaaagacuccgggaucugaaucaggcggugaacaaucuggucgagcucaagucuacacaacaaaagagcauccugcgcgugggaacgcuuaccuccgacgaucugcucauucuggcugccgaccuugaaaaacuuaagagcaaaguuaucagaacagagcggccccucucugccggcguguauauggggaaccuguccagccagcagcuggaucagcgcagagcucuccugucuaugauuggaauguccggcgggaaucagggaguccgggccggcaaggacggcgugguucgcgugugggaugucaaaaacgcugagcuucugaauaaccaguucgggaccaugccuagccucacacuggccugucuuaccaagcagggacaaguggaccugaaugaugcggugcaggcccucacagaccugggccugaucuacaccgcuaaguauccgaacacgucugaccucgauagacugacccagucccaucccauccuuaauaugauugacaccaaaaagagcucccugaacaucucuggguacaauuuuagccucggagccgcugucaaagccggcgcgugcaugcuggaugggggaaacaugcuugaaacaauuaagguuuccccucaaacaauggacggcauccugaaaagcauucucaaggugaaaaaggcccugggcauguucaucucugauacccccggggagcggaacccuuaugaaaauauucuguacaagaucugucucuccggagacggcuggcccuauaucgcuagccgcacgucuauuacagggagagccugggagaacaccguggucgaucuggagagcgacggaaaaccucagaaggcuggcuccaauaacucuaauaaaagccuucaguccgccggguuuacagccggacugaccuacagccagcucaugacccugaaggaugcuaugcugcaacuugacccgaacacaaaaacguggauggauaucgaaggccggcccgaggacccuguggaaauugcgcucuaccagcccucuuccggcugcuauauccacuucuuuagagagccuaccgaccugaagcaguucaagcaggaugccaaauacagccaugggauugacguuacagaucuguuugcugcccaacccggacucaccucugccgugaucgacgcucugccgcgcaauauggucaucacaugucagggcuccgaugacauucggaaacuucuggaaagccaggggagaaaggauaucaagcucauugacaucgcccugaacaaaaccgauucccgcaaguaugagaaugcggugugggaccaguacaaggaucugugccacaugcauacgggaguuguggucgagaaaaagaaacggggcgggaaggaagagauuacaccucacugugcucuuauggacugcaucauguucgaugccgccgugucuggcggacucaacaccagcguccugagagcugugcugccccgcgacaugguuuuucggaccuccacaccuagagugguccucugaggacuagucccuguucccagagcccacuuuuuuuucuuuuuuugaaauaaaauagccugucuuucagaucucaaaggcucuuuucagagccaccaaaaaaaaaaaaaaaaaaaaaaaaaaaaaaaaaaaaaaaaaaaaaaaaaaaaaaaaaaaaaaaaaaaaaaaaaaaaaaaaaaaaaaaaaaaaaaaaaaaaa

SEQ ID NO: 18608 - RNA, 2064 nt, Artificial Sequence
  mRNA product Design a-2 (hSL-A100) comprising derived and/or modified sequence from LASV(G733-SLE-2010;Clade IV)__AIT17155__SP-HsPLAT_NP(2-569) (opt5)
aggagaguccgcucagccagguugcagaagcggcuuagcguguguccuaaucuucucucugcguguagguaggccugugccgcaaacaagcuuaccauggacgccaugaagagaggccugugcugugugcuccugcuuugcggggcugucuucguuagccccagcgccuccaaggagaucaaaucuuuccuguggacccagagccucagacgggaacuguccggcuacugcucuaacauuaagcugcaaguggucaaagacgcucaggcccugcuccacgggcuggauuuuagcgagguuuccaaugugcagcgccuuaugagaaaggaacggcgcgacgauaacgaccugaaaagacuccgggaucugaaucaggcggugaacaaucuggucgagcucaagucuacacaacaaaagagcgugcugcgcguuggaacgcuuaccuccgacgaacugcucgugcuggcugccgaucuugagaaacuuaagagcaaagucaucagaacagagcggccccucucugccggcguguauauggggaaccuguccagccagcagcuggaccagcgcagagcucuccugucuaugauuggaauguccggcgggaaucagggagcccggaccggccgcgauggcguugugagagucugggacgugaagaacgcugaacuucugaauaaccaguucgggacaaugccuagccucacccuggccugucuuacaaaacagggacaaguggaucugaaugacgcgguccaggcccucaccgaucugggccugaucuacacggcuaaguauccgaacaccucugaccucgaccggcugacacagucccaucccauucuuaauaugaucgauaccaagaaaagcucccugaacaucucuggguacaauuuuagccucggagccgcuguuaaggccggcgcgugcaugcuggacgggggaaacaugcuugagacaauuaaaguguccccucaaaccauggauggcauccucaagagcauucugaaagugaagaaagcccugggcauguucaucucugacacgcccggggaacgcaacccuuaugagaauauucuguacaagaucugucucuccggagauggcuggcccuauauugcuagcagaacaucuaucaccgggcgggccugggagaacacagucguggaccuggaaagcgauggaaagccucagaaagcuggcuccaauaacucuaauaagagccuucaguccgccggguuuaccgccggacugaccuacagccagcucaugacacugaaagacgcuaugcugcaacuugauccgaacgcgaagacguggauggacaucgagggcagacccgaagauccuguugagauugcccucuaccagcccucuuccggcugcuauauccacuucuuucgcgaaccuaccgaccugaaacaguucaagcaggacgcuaaguacagccaugggauugaugugacagaccuguuugccgcccaacccggacucaccucugcugucaucgaugcccugccgcggaauauggugauuacaugucagggcuccgacgauaucagaaaacuucuggagagccaggggcgcaaggacaucaaacucauugauaucgcgcuguccaagauugacucucggaaauaugagaacgcuguuugggaucaguacaaggaccugugccacaugcauaccggaguggucguggaaaagaaaaagagaggcgggaaagaggaaaucacgccucacugugcccuuauggauugcauuauguucgacgccgcugucagcggcggacucaauucccuggugcugcgcgccguucucccccgggauaugguguuuagaacaucuaccccucgcgucgugcugugaggacuagucccuguucccagagcccacuuuuuuuucuuuuuuugaaauaaaauagccugucuuucagaucucaaaggcucuuuucagagccaccaaaaaaaaaaaaaaaaaaaaaaaaaaaaaaaaaaaaaaaaaaaaaaaaaaaaaaaaaaaaaaaaaaaaaaaaaaaaaaaaaaaaaaaaaaaaaaaaaaaaa

SEQ ID NO: 18609 - RNA, 2064 nt, Artificial Sequence
  mRNA product Design a-2 (hSL-A100) comprising derived and/or modified sequence from MOPV/LASV reassortant(IGS-1;Clade IV)__AFY05578__SP-HsPLAT_NP(2-569) (opt5)
aggagaguccgcucagccagguugcagaagcggcuuagcguguguccuaaucuucucucugcguguagguaggccugugccgcaaacaagcuuaccauggacgccaugaagagaggccugugcugugugcuccugcuuugcggggcugucuucguuagccccagcgccuccaaggagaucaaaucuuuccuguggacccagagccucagacgggaacuguccggcuacugcucuaacauuaaacuucaaguggucaaggacgcucaggcccugcuccacgggcuggauuuuagcgagguuuccaaugugcagcgccuuaugagaaaggaacggcgcgacgauaacgaccugaaaagacuccgggaucugaaucaggcggugaacaaucuggucgagcucaagucuacacaacaaaagagcauccugcgcgugggaacgcuuaccuccgacgaucugcucauucuggcugccgaccuugaaaaacugagaagcaagguuauccggacagagcgcccccucucugccggcguguauauggggaaccuguccagccagcagcuggaucagagacgggcucuccugaauaugauuggaaugucuggcgggaaccagggagcccgcgcuggcagagacggcgucgugcggguuugggaugugaaaaaugccgagcuucuguccaaccaguucgggaccaugccuagccucacacuggcgugucuuaccaagcagggacaagucgaccugaaugaugccgugcaggcucucacagaccugggccugaucuacaccgccaaauauccgaacacgucugaccucgaucgccugacccagucccaucccauccuuaauaugauugacacaaagaaaagcucccugaacaucucuggguacaauuuuagccucggagcugccgugaaggcgggcgccugcaugcuggaugggggaaacaugcuugaaaccauuaaggucuccccucaaacaauggacggcauccugaaaagcauucucaagguuaaaaaggcucugggcauguucaucucugauacccccggggagagaaacccuuaugaaaauauucuguacaaaaucugucucuccggagacggcuggcccuauaucgccagccggacgucuauuacagggagagcuugggagaacaccgugguggaucuggagagcgacggaaagccucagaaggccgauuccaauaacucuagcaaaucccuucagagcgccggcuuuacagcugggcugaccuacucucagcucaugacccugaaggacgcgaugcugcaacuugauccgaaugccaaaacauggauggacaucgaaggacgccccgaggacccugucgaaauugcucucuaccagcccuccagcggcugcuauauccacuucuuucgggagccuacggaucugaagcaguucaaacaggacgccaaguacucucauggcauugaugugaccgaccuguuugccacacaacccgggcucaccuccgcuguuaucgaugcccugccgagaaacauggugaucacaugucagggaagcgacgauauucgcaaacuucuggaaucccagggccggaaggacaucaagcucauugauaucgaccugucuaaaaccgauagcagaaaguaugagaaugcggucugggaccaguacaaagaucugugccacaugcauacgggggugguuguggagaagaagaaacgcggaggcaaggaagagauuacaccucacugugcucuuauggacugcaucauguucgacgccgccgucuccgggggccucaacaccucugugcugcgggcuguccugcccagagauaugguguuucgcaccagcacaccucggguugugcucugaggacuagucccuguucccagagcccacuuuuuuuucuuuuuuugaaauaaaauagccugucuuucagaucucaaaggcucuuuucagagccaccaaaaaaaaaaaaaaaaaaaaaaaaaaaaaaaaaaaaaaaaaaaaaaaaaaaaaaaaaaaaaaaaaaaaaaaaaaaaaaaaaaaaaaaaaaaaaaaaaaaaa

SEQ ID NO: 18610 - RNA, 2064 nt, Artificial Sequence
  mRNA product Design a-2 (hSL-A100) comprising derived and/or modified sequence from LASV(LM765-SLE-2012;Clade IV)__AIT17815__SP-HsPLAT_NP(2-569) (opt5)
aggagaguccgcucagccagguugcagaagcggcuuagcguguguccuaaucuucucucugcguguagguaggccugugccgcaaacaagcuuaccauggacgccaugaagagaggccugugcugugugcuccugcuuugcggggcugucuucguuagccccagcgccuccaaggagaucaaaucuuuccuguggacccagagccucagacgggaacuguccggcuacugcucuaacauuaagcugcaaguggucaaagacgcucaggcccugcuccacgggcuggauuuuagcgagguuuccaaugugcagcgccuuaugagaaaggaacggcgcgacgauaacgaccugaaaagacuccgggaucugaaucaggcggugaacaaucuggucgagcucaagucuacacaacaaaagagcauccugcgcgugggaacgcuuaccuccgacgaucugcucauucuggcugccgaccuugaaaaacuuaagagcaaaguuacaagaaccgagcggccccucucugccggcguguauauggggaaccuguccagccagcagcuggaucagcgcagagcucuccuggacaugaucggaaugucuggcuccaaucagggggcccgggcuggacgcgauggcgucgugagaguuugggacgugaagaacgccgagcuucugaauaaccaguucggcacaaugccuagccucacccuggcgugucuuacaaaacaggggcaagucgaucugaaugacgccgugcaggcucucaccgaccugggacugauuuacacggccaaguauccgaacaccucugaucucgaccggcugacacagucccaucccauccuuaauaugaucgauaccaagaaaagcucccugaacauuucuggcuacaauuuuagccucggggcugccgugaaggcgggagccugcaugcuggacggcgggaacaugcuugaaacaaucaaagucuccccucaaaccauggauggcauucucaagagcauccugaaaguuaagaaagcucugggaauguucauuucugacgcccccggcgagcgcaacccuuaugaaaauauccuguacaagauuugucucuccggggauggauggcccuauaucgcuagcagaacgucuaucacaggccgggccugggagaacaccgugguggaccuggagagcgaugggaagccucagaaagccggauccaauggcucuaacaagagccuucaguccgcuggguuuacagcgggacugaccuacagccagcucaugacccugaaagacgccaugcugcaacuugauccgaaugcuaagacauggauggacauugaaggcagacccgaggacccugucgaaaucgcccucuaccagcccucuuccggcugcuauauucacuucuuucgcgagccuacggaucugaaacaguucaagcaggacgccaaguacagccaugggaucgaugugaccgaccuguuugcugcccaacccggacucacaucugcgguuauugaugcucugccgcggaacauggugaucaccugucagggcuccgacgauaucagaaaacuuuucgaaagccaggggcgcaaggacauuaaacugaucgauauugcccucuccaagacagacucucggaaauaugagaaugccgucugggaucaguacaaggaccugugccacaugcauaccggaaucgugguugagaagaaaaagagaggcgggaaagaagagauuacgccucacugugcucugauggauugcaucauguuugacgccgcugugagcggcggacuuaacacauccguccuccgcgccgugcugccccgggacauggucuucagaaccucuaccccucgcgugguucugugaggacuagucccuguucccagagcccacuuuuuuuucuuuuuuugaaauaaaauagccugucuuucagaucucaaaggcucuuuucagagccaccaaaaaaaaaaaaaaaaaaaaaaaaaaaaaaaaaaaaaaaaaaaaaaaaaaaaaaaaaaaaaaaaaaaaaaaaaaaaaaaaaaaaaaaaaaaaaaaaaaaaa

SEQ ID NO: 18611 - RNA, 2064 nt, Artificial Sequence
  mRNA product Design a-2 (hSL-A100) comprising derived and/or modified sequence from LASV(LM776-SLE-2012;Clade IV)__AIT17825__SP-HsPLAT_NP(2-569) (opt5)
aggagaguccgcucagccagguugcagaagcggcuuagcguguguccuaaucuucucucugcguguagguaggccugugccgcaaacaagcuuaccauggacgccaugaagagaggccugugcugugugcuccugcuuugcggggcugucuucguuagccccagcgccuccaaggagaucaaaucuuuccuguggacccagagccucagacgggaacuguccucuuacugcagcaacauuaaacuucaaguggucaaggacgcucaggcccugcuccacggccuggauuuuuccgagguuucuaaugugcagcgccuuaugagaaaggaacggcgcgacgauaacgaccugaaaagacuccgggaucugaaucaggcggugaacaaucuggucgagcucaagagcacacaacagaaguccauccugcgcguggggacgcuuaccagcgacgaucugcucauucuggcugccgaccuugaaaaacugaagucuaaaguuacaagaaccgagcggccccucuccgccggaguguauaugggcaaccugagcucucagcagcuggaucaacgcagagcucuccuguccaugaucgggaugagcggaucuaaucagggcgcccgggcugggcgcgacggagucgugagaguuugggaugugaagaacgccgagcuucugaauaaccaguucggcacaaugccuucccucacccuggcgugucuuacaaaacagggccaagucgaccugaaugaugccgugcaggcucucaccgaccuggggcugauuuacacggccaaguauccgaacaccagcgaccucgaucggcugacacagucccaucccauccuuaauaugaucgacaccaagaaaucuagccugaacauuuccggauacaauuuuagccucggcgcugccgugaaggcgggggccugcaugcuggauggaggcaacaugcuugaaacaaucaaagucucuccucaaaccauggacgggauucugaaguccauccucaaaguuaagaaagcucugggaauguucauuagcgauacgcccggcgagcgcaacccuuaugaaaauauccuguacaagauuugucucucuggcgacggguggcccuauaucgccagcagaacauccaucaccggacgggcuugggagaacacagugguggaucuggagucugacggcaagccucagaaagccgggagcaauaacuccaauaagagccuucagucugccggauuuaccgcuggccugaccuacucccagcucaugacacugaaagaugcgaugcugcaacuugacccgaacgccaagacguggauggauauugaagggagacccgaggacccugucgaaguggcucucuaccagcccagcucuggaugcuauauccacuucuuucgcgagccuaccgaccugaaacaguucaagcaggaugccaaguacucccauggcauugacguuacagaucuguuugccgcucaacccggccucaccagcgccgugaucgacgcgcugccgcggaauauggucauuacaugucagggguccgaugacaucagaaaacuucuggaaucucagggacgcaaggauaucaaacucauugacaucgcucugagcaagaccgauucccggaaauaugagaacgccgugugggaccaguacaaggaucugugccacaugcauacgggcguuguggucgagaagaaaaagagagggggaaaagaagagauuacaccucacugugcccuuauggacugcaucauguucgaugcugccgugucuggcgggcucaauaccagcguccugcgcgcugugcugccccgggacaugguuuuuagaaccuccacaccucgcgugguccucugaggacuagucccuguucccagagcccacuuuuuuuucuuuuuuugaaauaaaauagccugucuuucagaucucaaaggcucuuuucagagccaccaaaaaaaaaaaaaaaaaaaaaaaaaaaaaaaaaaaaaaaaaaaaaaaaaaaaaaaaaaaaaaaaaaaaaaaaaaaaaaaaaaaaaaaaaaaaaaaaaaaaa

SEQ ID NO: 18612 - RNA, 2064 nt, Artificial Sequence
  mRNA product Design a-2 (hSL-A100) comprising derived and/or modified sequence from LASV(Mad39;Clade IV)__ANH09723__SP-HsPLAT_NP(2-569) (opt5)
aggagaguccgcucagccagguugcagaagcggcuuagcguguguccuaaucuucucucugcguguagguaggccugugccgcaaacaagcuuaccauggacgccaugaagagaggccugugcugugugcuccugcuuugcggggcugucuucguuagccccagcgccuccaaggagaucaaaucuuuccuguggacccagagccucagacgggaacuguccggcuacugcucuaacauuaagcugcaaguggucaaagacgcucaggcccugcuccacgggcuggauuuuagcgagguuuccaaugugcagcgccuuaugagaaagcagcggcgcgacgauaacgaccugaaaagacuccgggaucugaaucaagcggugaacaaucuggucgaacucaagucuacacagcaaaagagcgugcugcgcguuggaacgcuuaccuccgacgaucugcucacacuggcugccgaccuugagaaacuuaagagcaaagugaccagaacagaacggccccucaccgccggcgucuauauggggaaccugucuucccagcagcuggaucagcgcagagcucuccugaauaugaucggaaugagcggcgggaaccagggagcccggacaggccgcgacggcgugguuagagugugggaugucaagaaugcugagcuucugaacaaucaguucgggaccaugccuucucucacgcuggccugucuuaccaaacaaggacagguggaccugaacgaugugguccaggcgcucacagaccugggccugauuuacaccgccaaguauccgaauacauccgaccucgaucggcugacccaaagccaucccauccuuaacaugauugacacgaauaagucuucccugaacaucagcggguacaacuuuucccucggagcugccguuaaagcuggcgccugcaugcuggaugggggaaauaugcuugagacaaucaaggugucuccucagaccauggacggcauucugaaaagcauccucaaggugaaaaagucccugggcauguucauuagcgauacacccggggaacgcaacccuuaugagaauauccuguacaaaauuugucucucuggagacggcuggcccuauaucgcguccagaaccagcauuaccgggcgggccugggaaaacacagucguggaucuggagucuggaggcaagccucagaaggcugggagcaauaacuccaauaaaucucuucagagcgccggauuugcugccggccugacguacucccaacucaugacccugaaggacgccaugcugcagcuugauccgaacgcuaaaacauggauggacaucgagggcagacccgaagauccuguugagaucgcgcucuaccagcccauuagcgggugcuauauccacuucuuucgcgaaccuaccgaccugaagcaguucaaacaagacgccaaguacucucauggaauugaugugacagaccuguuugcugcccagcccggccucaccuccgccgucaucgaggcucugccgcggaauauggugauuacgugucaggggagcgaugacaucagaaaacuuuucgaaucucagggacgcaaggauaucaagcugauugacaucgcccucuccaaaacagauagccggaaguaugagaacgcgguuugggaccaauacaaagaucugugccacaugcauaccggcguggucguggagaagaagaaaaagggcgggaaagaagagauuaccccucacugugcucugauggacugcaucauguuugaugccgccgucuccggaggccuuaauacacucgugcugagagcuguucugccccgcgacaugguguuccggaccucuacaccuaaggucgugcucugaggacuagucccuguucccagagcccacuuuuuuuucuuuuuuugaaauaaaauagccugucuuucagaucucaaaggcucuuuucagagccaccaaaaaaaaaaaaaaaaaaaaaaaaaaaaaaaaaaaaaaaaaaaaaaaaaaaaaaaaaaaaaaaaaaaaaaaaaaaaaaaaaaaaaaaaaaaaaaaaaaaaa

SEQ ID NO: 18613 - RNA, 2064 nt, Artificial Sequence
  mRNA product Design a-2 (hSL-A100) comprising derived and/or modified sequence from LASV(Z0947-SLE-2011;Clade IV)__AIT17841__SP-HsPLAT_NP(2-569) (opt5)
aggagaguccgcucagccagguugcagaagcggcuuagcguguguccuaaucuucucucugcguguagguaggccugugccgcaaacaagcuuaccauggacgccaugaagagaggccugugcugugugcuccugcuuugcggggcugucuucguuagccccagcgccuccaaggagaucaaaucuuuccuguggacccagagccucagacgggaacuguccggcuacugcucuaacauuaagcugcaaguggucaaagacgcucaggcccugcuccacgggcuggauuuuagcgagguuuccaaugugcagcgccuuaugagaaaggaacggcgcgacgauaacgaccugaaaagacuccgggaucugaaucaggcggugaacaaucuggucgagcucaagucuacacaacaaaagagcauccugcgcgugggaacgcuuaccuccgacgaucugcucauucuggcugccgaccuugaaaaacuuaagagcaaaguuacaagaaccgagcggccccucucugccggcguguauauggggaaccuguccagccagcagcuggaucagcgcagagcucuccugaauaugaucggaaugucuggcuccaaccagggggcccggacaggacgcgacggcgucgugagaguuugggaugugaagaaugcugagcuucugaacaaucaguucggcaccaugccuagccucacacuggccugucuuaccaaacaggggcaagucgaccugaacgaugcggugcaggcccucacggaccugggacugauuuacaccgcuaaguauccgaauacaucugaccucgaucggcugacccagucccaucccauccuuaacaugaucgacacaaagaaaagcucccugaauauuucuggcuacaacuuuagccucggggccgcugugaaggccggagcgugcaugcuggauggcgggaacaugcuugaaaccaucaaagucuccccucaaacgauggacggcauucucaagagcauccugaaaguuaagaaagcccugggaauguucauuucugaugcucccggcgagcgcaauccuuaugaaaacauccuguacaagauuugucucuccggggacggauggcccuauaucgccagcagaacaucuaucaccggccgggcuugggagaauacagugguggaucuggagagcgacgggaagccucagaaagccggauccaacggcucuaauaagagccuucaguccgccggguuuaccgcuggacugaccuacagccagcucaugacacugaaagaugcgaugcugcaacuugacccgaacgccaagacguggauggauauugaaggcagacccgaggacccugucgaaaucgcucucuaccagcccucuuccggcugcuauauucacuucuuucgcgagccuaccgaccugaaacaguucaagcaggaugccaaguacagccaugggaucgacgugacagaucuguuugccgcucaacccggacucaccucugccguuauugacgcgcugccgcggaauauggugaucacaugucagggcuccgaugacaucagaaaacuuuucgaaagccaggggcgcaaggauauuaaacugaucgacauugcucucuccaagaccgauucucggaaauaugagaacgccgucugggaccaguacaaggaucugugccacaugcauacgggaaucgugguugagaagaaaaagagaggcgggaaagaagagauuacaccucacugugcccugauggacugcaucauguuugaugcugccgugagcggcggacuuaauaccuccguccuccgcgcugugcugccccgggacauggucuucagaaccucuacaccucgcgugguucugugaggacuagucccuguucccagagcccacuuuuuuuucuuuuuuugaaauaaaauagccugucuuucagaucucaaaggcucuuuucagagccaccaaaaaaaaaaaaaaaaaaaaaaaaaaaaaaaaaaaaaaaaaaaaaaaaaaaaaaaaaaaaaaaaaaaaaaaaaaaaaaaaaaaaaaaaaaaaaaaaaaaaa

SEQ ID NO: 18614 - RNA, 2040 nt, Artificial Sequence
  mRNA product Design a-2 (A100) comprising derived and/or modified sequence from LASV(Josiah;Clade IV)__NP_694869__SP-HsPLAT_NP(2-569) (opt1)
aggagaguccgcucagccagguugcagaagcggcuuagcguguguccuaaucuucucucugcguguagguaggccugugccgcaaacaagcuuaccauggacgccaugaagcgcggccugugcugcgugcuccugcugugcggggccgucuucgugagccccagcgccuccaaggagaucaagagcuuccuguggacccagucccuccgccgggagcugagcggcuacugcuccaacaucaagcuccagguggucaaggacgcccaggcgcugcugcacgggcuggacuucagcgagguguccaacgugcagcgccucaugcggaaggagcgccgggacgacaacgaccugaagcgccugcgggaccucaaccaggccgucaacaaccugguggagcucaagagcacccagcagaaguccauccugcgcgugggcacccugaccagcgacgaccugcucauccuggccgccgaccuggagaagcucaaguccaaggucauccggaccgagcgcccccugagcgccgggguguacaugggcaaccuguccagccagcagcucgaccagcggcgcgcgcugcugaacaugaucgggauguccggcggcaaccagggggcccgggccggccgcgacggggugguccgggugugggacgugaagaacgccgagcuccugaacaaccaguucggcaccaugccgagccugacgcucgcgugccugaccaagcaggggcaggucgaccugaacgacgccgugcaggcccucaccgaccugggccugaucuacaccgccaaguaccccaacacguccgaccucgaccgccugacccagagccaccccauccugaacaugaucgacaccaagaaguccagccucaacaucagcggcuacaacuucucccugggggccgcggugaaggccggcgccugcaugcuggacgggggcaacaugcucgagaccaucaaggucagcccccagacgauggacggcauccugaaguccauccugaaggugaagaaggcccucgggauguucaucagcgacaccccgggcgagcggaaccccuacgagaacauccuguacaagaucugccuguccggggacggcuggcccuacaucgccagccgcaccuccaucaccgggcgggcgugggagaacacgguggucgaccucgagagcgacggcaagccccagaaggccgacuccaacaacagcuccaagagccugcaguccgccggcuucaccgccgggcugaccuacagccagcucaugacccugaaggacgccaugcugcagcuggacccgaacgcgaagacguggauggacaucgagggccgccccgaggaccccguggagaucgcccucuaccagcccuccagcgggugcuacauccacuucuuccgggagccgaccgaccugaagcaguucaagcaggacgccaaguacucccacggcaucgacgugaccgaccuguucgccacccagcccgggcucacgagcgccgucaucgacgcgcugccccgcaacauggugaucacgugccagggcuccgacgacauccgcaagcugcucgagagccagggccggaaggacaucaagcugaucgacaucgcccugagcaagaccgacucccgcaaguacgagaacgccgugugggaccaguacaaggaccucugccacaugcacaccggggucguggucgagaagaagaagcggggcgggaaggaggagaucaccccgcacugcgcccugauggacugcaucauguucgacgcggccgugagcggcgggcugaacaccuccgugcuccgcgccguccugccccgggacaugguguuccgcaccagcacgccccgggugguccugugaggacuagucccuguucccagagcccacuuuuuuuucuuuuuuugaaauaaaauagccugucuuucagaucuaaaaaaaaaaaaaaaaaaaaaaaaaaaaaaaaaaaaaaaaaaaaaaaaaaaaaaaaaaaaaaaaaaaaaaaaaaaaaaaaaaaaaaaaaaaaaaaaaaaa

SEQ ID NO: 18615 - RNA, 2040 nt, Artificial Sequence
  mRNA product Design a-2 (A100) comprising derived and/or modified sequence from LASV(LP;Clade I)__AAF86702__SP-HsPLAT_NP(2-569) (opt1)
aggagaguccgcucagccagguugcagaagcggcuuagcguguguccuaaucuucucucugcguguagguaggccugugccgcaaacaagcuuaccauggacgccaugaagcgcggccugugcugcgugcuccugcugugcggggccgucuucgugagccccagcaacuccaaggagaucaagagcuuccuguggacccagucccuccgccgggagcugagcggcuacugcuccaacaucaagcuccagguggucaaggacgcccaggcccugcugcacgggcuggacuucagcgagguguccaacgugcagcgccucaugcggaagcagaagcgcgacgacgcggaccugaagcggcugcgcgaccucaaccaggccgucaacaaccugguggagcucaagagcacccagcagaagaacgugcugcgggucggcacgcuguccagcgacgaccugaucacccucgccgccgaccuggagaagcugaaguccaaggugauccgcaccgagcggccccucagcuccgggguguacaugggcaaccugagcucccagcagcuggaccagcgccgggcccuccugagcaugaucgggauguccggcggcccgcaggggaaccgcaccggcggggacggcgucgugcgggugugggacgucaagaacgcggagcugcucaacaaccaguucgggacgaugcccagccugacccuggccugccucaccaagcagggccagguggaccugaacgacgccgugcaggcccugaccgaccucggccugaucuacacggcgaaguaccccaacuccagcgaccuggacaugcucacccagagccaccccauccuggggauggucgacaccaagaaguccagccugaacaucuccggcuacaacuucagccucggggccgccgugaaggccggcgccugcaugcuggacggcgggaacaugcuggagaccaucaagguguccccgcagacgauggacggcauccucaagagcauccugaaggucaagcgcucccuggggauguucaucagcgacacccccggcgagcggaaccccuacgagaacauccucuacaagaucugccuguccggggagggcuggcccuacaucgcgagccgcaccuccaucaccggccgggccugggagaacacgcugguggaccucgagagcgacaacaagccgcccaagcugaacuccgccgggagcaacaagucccugcaggccgccggccucaacgcggggcugaccuacagccagcugaugacccugaaggacugcaugcuccagcuggaccccuccagcaagaccuggaucgacaucgagggccgccccgaggacccgguggagaucgcccuguuccagcccuccagcgggugcuacauccacuucuuccgggagcccacggaccucaagcaguucaagcaggacgccaaguacagccacggcaucgacgucaccgaccuguucuccacccagcccggccugaccagcgccgugaucgaggcccucccgcgcaacauggugcugacgugccagggguccgacgacaucaagaagcugcucgagagccagggccggcgcgacaucaagcugaucgacaucucccugagcaaggcggacucccgcaaguucgagaacgccgucugggaccaguacaaggaccucugccacaugcacaccgggguggucguggagaagaagaagcggggcgggaaggaggagaucacgccccacugcgcccugcuggacugcaucauguucgacgccgccaccaccggcagccucaacaucaccacccugcgcgcggugcugccccgggacauggucuuccgcaccuccacgcccaagguggugcucugaggacuagucccuguucccagagcccacuuuuuuuucuuuuuuugaaauaaaauagccugucuuucagaucuaaaaaaaaaaaaaaaaaaaaaaaaaaaaaaaaaaaaaaaaaaaaaaaaaaaaaaaaaaaaaaaaaaaaaaaaaaaaaaaaaaaaaaaaaaaaaaaaaaaa

SEQ ID NO: 18616 - RNA, 2040 nt, Artificial Sequence
  mRNA product Design a-2 (A100) comprising derived and/or modified sequence from LASV(803213;Clade II)__AAF86704__SP-HsPLAT_NP(2-569) (opt1)
aggagaguccgcucagccagguugcagaagcggcuuagcguguguccuaaucuucucucugcguguagguaggccugugccgcaaacaagcuuaccauggacgccaugaagcgcggccugugcugcgugcuccugcugugcggggccgucuucgugagccccagcgccuccaaggaggugaaguccuuccuguggacccagagccuccgccgggagcugagcggcuacugcuccaacaucaagcugcaggucgugaaggacgcccaggcgcuccugcacgggcuggacuucagcgaggugaacaacguccagcgccucaugcggaagcagaagcgcgacgacggcgaccugaagcggcugcgcgaccucaaccaggccgugaacaaccugguggagcugaaguccacccagcagaaguccauccuccgggucgggacgcugaccagcgacgaccugcucacccuggccgccgaccuggagaagcucaagagcaaggugauccgcaccgagcggccccuguccagcggcguguacauggggaaccuguccacgcagcagcucgagcagcgccgggcccugcugaacaugaucggcauggucggcggggcgcagggcacccagccggggcgcgacggcguggugcgggucugggacgugaagaaccccgaccuccugaacaaccaguucgggaccaugcccagccugacccucgccugccugacgaagcagggccagguggaccugaacgacgccguccucgcccugaccgaccugggccucaucuacaccgcgaaguaccccaacuccagcgaccuggaccgccugucccagagccacccgauccucaacaugguggacaccaagaaguccagccugaacaucagcggguacaacuucucccugggcgccgccgugaaggccggggccugcaugcucgacggcggcaacaugcuggagacgaucaaggucacgccccagaccauggacgggauccucaagagcauccugaaggugaagcggucccugggcauguucgugagcgacacccccggggagcgcaaccccuacgagaacauccuguacaagaucugccucuccggcgacggguggccguacaucgcgagccggaccuccaucgucggccgcgccugggagaacaccaccguggaccuggagagcgacggcaagccccagaagguggggaccgccggcuccaacaagagccugcaguccgccggguuccccacgggccucaccuacagccagcugaugacccugaaggacuccaugaugcagcuggaccccagcgccaagaccuggaucgacaucgaggggcggccggaggaccccgucgagaucgcgcucuaccagcccauguccggcugcuacauccacuucuuccgcgagcccacggaccugaagcaguucaagcaggacgccaaguacagccacggcaucgacguggccgaccuguucccggcccagcccgggcucaccuccgccgucaucgaggcgcugccccggaacauggugcugaccugccagggcagcgacgacaucaagaagcuccuggacucccaggggcgccgcgacaucaagcugaucgacaucagccucagcaagguggacucccggaaguucgagaacgccgucugggaccagugcaaggaccugugccacaugcacaccggcgugguggucgagaagaagaagcgcgggggcaaggaggagaucacgccccacugcgcccugauggacugcaucauguucgacgccgccgugagcggcgggcucaacaucccggugcugcgggcgguccugccccgcgacaugguguuccggaccuccagccccaaggugguccucugaggacuagucccuguucccagagcccacuuuuuuuucuuuuuuugaaauaaaauagccugucuuucagaucuaaaaaaaaaaaaaaaaaaaaaaaaaaaaaaaaaaaaaaaaaaaaaaaaaaaaaaaaaaaaaaaaaaaaaaaaaaaaaaaaaaaaaaaaaaaaaaaaaaaa

SEQ ID NO: 18617 - RNA, 2043 nt, Artificial Sequence
  mRNA product Design a-2 (A100) comprising derived and/or modified sequence from LASV(GA391;Clade III)__CAA36646__SP-HsPLAT_NP(2-570) (opt1)
aggagaguccgcucagccagguugcagaagcggcuuagcguguguccuaaucuucucucugcguguagguaggccugugccgcaaacaagcuuaccauggacgccaugaagcgcggccugugcugcgugcuccugcugugcggggccgucuucgugagccccagcgccuccaaggaggugcgcagcuuccuguggacccagucccuccggcgcgagcugagcggcuacugcuccaacaucaagcugcaggucgugaaggacgcccaggcgcuccugcacgggcuggacuucagcgagguguccaacguccagcggcucaugcgcaagcagaagcgggacgacggcgaccugaagcgccugcgggaccucaaccaggccgugaacaaccugguggagcucaagagcacccagcagaaguccguccugcgcguggggacccugagcuccgacgaccugcucauccuggccgccgaccuggagaagcucaagagcaaggugacccggaccgagcgcccccuguccagcggcgucuacauggggaaccuguccagccagcagcucgaccagcggcgcgcccugcugaacaugaucggcaugaccggcguguccgggggcgggaagggcgcgagcgacgggaucgugcgggucugggacgugaagaacgccgagcuccugaacaaccaguucggcacgaugccgucccugacccucgccugccugaccaagcagggccagguggaccugaacgacgccguccaggcgcucaccgaccuggggcugaucuacacggccaaguaccccaacagcagcgaccucgaccgccugucccagagccaccccauccugaacaugaucgacaccaagaaguccagccucaacaucuccggcuacaacuucagccugggggccgccgugaaggccggcgcgugcaugcuggacggcgggaacaugcucgagaccaucaaggugagcccccagaccauggacggcauccucaaguccauccugaaggucaagaagucccuggggauguucgugagcgacacgccgggcgagcggaaccccuacgagaacauccuguacaagaucugccuguccggggacggcuggcccuacaucgccagccgcaccuccaucgugggccgggccugggagaacaccgucguggaccucgagcaggacaacaagccccagaagaucgggaacggcgggagcaacaagucccugcagagcgccggcuucgccgcggggcugaccuacucccagcucaugacgcugaaggacuucaagugcuucaaccugaucccgaacgccaagaccuggauggacaucgagggccgccccgaggaccccguggagaucgcccuguaccagcccagcuccggcugcuacguccacuucuuccgggagccgaccgaccucaagcaguucaagcaggacgccaaguacagccacgggaucgacgugaccgaccuguucgccgcgcagcccggccugacgagcgccgucaucgaggcccucccccgcaacauggugaucacgugccagggguccgaggacauccggaagcugcuggagagccagggccgccgcgacaucaagcucaucgacaucacccuguccaaggccgacagccggaaguucgagaacgccgugugggaccaguucaaggaccugugccacaugcacaccggggucgugguggagaagaagaagcgcggcggcaaggaggagaucacgccccacugcgcgcucauggacugcaucauguucgacgccgccgucuccgggggccuggacgccaaggugcugcgggugguccucccgcgcgacaugguguuccggaccagcacccccaaggugguccugugaggacuagucccuguucccagagcccacuuuuuuuucuuuuuuugaaauaaaauagccugucuuucagaucuaaaaaaaaaaaaaaaaaaaaaaaaaaaaaaaaaaaaaaaaaaaaaaaaaaaaaaaaaaaaaaaaaaaaaaaaaaaaaaaaaaaaaaaaaaaaaaaaaaaa

SEQ ID NO: 18618 - RNA, 2040 nt, Artificial Sequence
  mRNA product Design a-2 (A100) comprising derived and/or modified sequence from LASV(AV;Clade V)__CCA30315__SP-HsPLAT_NP(2-569) (opt1)
aggagaguccgcucagccagguugcagaagcggcuuagcguguguccuaaucuucucucugcguguagguaggccugugccgcaaacaagcuuaccauggacgccaugaagcgcggccugugcugcgugcuccugcugugcggggccgucuucgugagccccagcgccuccaaggaggugaaguccuuccuguggacccagagccuccgccgggagcugagcggcuacugcuccaacaucaagcugcaggucgugaaggacgcccaggcgcuccugcacgggcuggacuucagcgagguguccaacguccagcgccucaugcggaagcagcgccgggacgacagcgaccugaagcgccugcgggaccucaaccaggccgugaacaaccugguggagcugaaguccacccagcagaaguccguccuccgcgugggcacgcugagcagcgacgaccugcucacccuggccgccgaccuggagaagcucaaguccaaggugacccggaccgagcgcccccugagcuccggggucuacaugggcaaccugagcucccagcagcucgaccagcggcgcgcccugcugaaccucaucgggaugacgaacggcagccagggcucccaggcggggcgggacggcguggugcgcgucugggacgugaagaacgccgagcugcugaacaaccaguucgggaccaugccgagccucacccuggccugccugaccaagcagggccagguggaccucaacgacgucgugcaggcccugacggaccuggggcucaucuacaccgcgaaguaccccaacaccagcgaccuggaccggcugacccagucccaccccauccucaacaugaucgacacgaagaaguccagccugaacaucagcggcuacaacuucucccugggcgccgccgugaaggccggggccugcaugcucgacggcgggaacaugcuggagaccaucaaggucagcccccaguccauggacggcauccucaagagcauccugaaggugaagcgcgcgcugggcauguucguguccgacaccccgggggagcggaaccccuacgagaacauccuguacaagaucugccucagcggcgacggguggcccuacaucgccucccgcaccagcaucgucggccgggccugggagaacacggugguggaccuggagaccgacgggaagccccagaagaucggcuccggcaacagcaacaagucccugcagagcgccggguucuccgccggccucaccuacagccagcugaugacccugaaggacgcgaugcugcagcucgacccgaacgccaagacguggauggacaucgaggggcgccccgaggaccccgucgagguggcccuguaccagcccaucuccggcugcuacauccacuucuuccgggagccgaccgaccugaagcaguucaagcaggacgccaaguacagccacgggaucgacaucgccgaccucuucgcggcccagcccggccugaccagcgccgucaucgaggcccugccccgcaacauggugaucacgugccagggcuccgaggacaucaagaagcuccuggagagccaggggcgcaaggacaucaagcugaucgacaucgcccucuccaagaucgacagccggaaguucgagaacgcggugugggaccaguacaaggaccugugccacaugcacaccggcgucgugguggagaagaagaagcgcgggggcaaggaggagaucaccccgcacugcgcccugauggacugcaucauguucgacgccgccgucuccgggggccucaacacccuggugcugcgggcggugcucccccgcgacauggucuuccggaccagcacgccccgcguggugcugugaggacuagucccuguucccagagcccacuuuuuuuucuuuuuuugaaauaaaauagccugucuuucagaucuaaaaaaaaaaaaaaaaaaaaaaaaaaaaaaaaaaaaaaaaaaaaaaaaaaaaaaaaaaaaaaaaaaaaaaaaaaaaaaaaaaaaaaaaaaaaaaaaaaaa

SEQ ID NO: 18619 - RNA, 2040 nt, Artificial Sequence
  mRNA product Design a-2 (A100) comprising derived and/or modified sequence from LASV(Togo/2016/7082;Clade VI)__AMR44578__SP-HsPLAT_NP(2-569) (opt1)
aggagaguccgcucagccagguugcagaagcggcuuagcguguguccuaaucuucucucugcguguagguaggccugugccgcaaacaagcuuaccauggacgccaugaagcgcggccugugcugcgugcuccugcugugcggggccgucuucgugagccccagcaacuccaaggaggugaaguccuuccuguggacccagagccuccgccgggagcugagcggcuacugcuccaacaucaagcugcaggucgugaaggacgcccaggcccuccugcacgggcuggacuucagcgagguguccaacguccagcgccucaugcggaagcagaagcgcgacgacggcgaccugaagcggcugcgcgaccucaaccaggcggugaacaaccugguggagcucaagagcguccagcagaaguccauccugcggguggggacccugaccagcgacgaccugcucacccuggccgccgaccuggagaagcucaaguccaaggugacccgcaccgagcggccccugagcuccggcgucuacauggggaaccugagcucccagcagcucgaccagcgccgggcccugcugagcaugaucggcauguccggcgggaaccagaacagccagccgaagggcgacgggguggugcgcgucugggacgugaagaacgccgaccuccugaacaaccaguucggcacgaugcccucccugacccucgcgugccugaccaagcagggccagguggaccugaacgacgccguccaggcccucaccgaccuggggcugaucuacacggccaaguaccccaacagcagcgaccucgaccggcugucccagagccaccccauccugaacaugaucgacaccaagaaguccagccucaacaucuccggcuacaacuucagccugggggcggccaucaagaccggcgccugcaugcuggacgggggcaacaugcucgagaccaucaaggugacgccgcagaccauggacggcauccugaaguccauccugaaggugaagcgcagccucgggauguucaucuccgacacccccggcgagcggaaccccuacgagaacauccuguacaagaucugccugagcggggacggcuggcccuacaucgccucccgcaccgccaucaucgggcgggcgugggagaacacggucguggaccucgagagcgacuccaagccgcagaagaucggcagcaacggcuccaacaagagccugcaguccgccggguucgcccccggccugaccuacagccagcucaugacccugaaggacuccaugcugcagcuggaccccaacgccaagaccuggaucgacaucgaggggcgccccgaggacccgguggaggucgcccucuuccagcccaucagcggcugcuacauccacuucuuccgggagcccacggaccugaagcaguucaagcaggacgcgaaguacagccacgggaucgacgugaccgaccuguucgccgcccagcccggccucaccuccgccgugaucgaggcccugccgcgcaacaugguccugaccugccagggcagcgacgacaucaagaagcuccuggacucccaggggcggcgcgacaucaagcugaucgacgugagccucaacaagaucgacucccgcaaguucgagaacgcggucugggaccaguacaaggaccugugccacaugcacacgggcgugguggucgagaagaagaagaagggcgggaaggaggagaucacgccccacugcgcccugcucgacugcaucauguucgacgccgccgugagcgggggccugaacgccaccgugcugcgggcgguccucccccgcgacaugguguuccggaccuccagccccaaggugguccugugaggacuagucccuguucccagagcccacuuuuuuuucuuuuuuugaaauaaaauagccugucuuucagaucuaaaaaaaaaaaaaaaaaaaaaaaaaaaaaaaaaaaaaaaaaaaaaaaaaaaaaaaaaaaaaaaaaaaaaaaaaaaaaaaaaaaaaaaaaaaaaaaaaaaa

SEQ ID NO: 18620 - RNA, 2040 nt, Artificial Sequence
  mRNA product Design a-2 (A100) comprising derived and/or modified sequence from LASV(KAK-428;Clade n.d. (VII))__ANH09741__SP-HsPLAT_NP(2-569) (opt1)
aggagaguccgcucagccagguugcagaagcggcuuagcguguguccuaaucuucucucugcguguagguaggccugugccgcaaacaagcuuaccauggacgccaugaagcgcggccugugcugcgugcuccugcugugcggggccgucuucgugagccccagcaacuccaaggaggugaaguccuuccuguggacccagagccuccgccgggagcugagcggcuacugcaccaacaucaagcugcaggucgugaaggacgcccaggcccuccugcacgggcuggacuucuccgaggugagcaacguccagcgccucaugcggaagcagaagcgcgacgacaacgaccugaagcggcugcgcgaccucaaccaggcggugaacaaccugguggagcugaaguccguccagcagaaguccgugcucaaggugggcacgcugaacagcgacgaccugcucacccuggccgccgaccuggagaagcucaagagcaaggucgugcggaccgagcgcccccuguccagcgggguguacaugggcaaccuguccagccagcagcucgaccagcggcgcgcccugcugaacaugaucgggauggccggcggcucccaggggaaccagccgagccgggacggcgucgugcgcgugugggacgucaagaacgcggaccuccugaacaaccaguucgggaccaugcccucccugacgcucgccugccugaccaagcagggccagguggaccugaacgacgugguccucgcccugaccgaccuggggcucaucuacaccgccaaguaccccaacagcuccgaccuggaccggcugagccagaaccaccccgugcucaacaugaucgacgugaacaagagcucccugaacaucagcggcuacaacuucucccugggcgcggccgucaaggccggggccugcaugcucgacggcgggaacaugcuggagacgaucaagaucagcccgcagaccguggacggcauccugaaguccauccucaaggugaagcgcgcccugggcauguucgucagcgacacccccggggagcggaaccccuacgagaacauccuguacaaggugugccucuccggcaacggguggcccuacaucgcgagccgcaccuccaucgucggccgggccugggagaacacggugguggaccuggagagcaacaagaaccagccgaaggucgggaacaacggcuccaacaagaugcugcagagcuccggcuucgccaccgggcucaccuacagccagcugaugacccugcgcgacuccaugcugcagcucgaccccacggccaagaccuggaucgacaucgagggccggcccgaggaccccguggagcuggcccuguuccagccgagcuccgggugcuacauccacuucuuccgcgagcccaccgaccucaagcaguucaagcaggacgcgaaguacagccacggcaucgacgugaacgaccuguucuccgcccagcccgggcugaccagcgccguccucgaggcccugccccggaacauggugcugacgugccagggcagcgacgacauccgcaagcuccuggacucccaggaccgcaaggacaucaagcugaucgacaucagccucuccaaggccgacgcgcggaaguucgagaacgacgugugggaccaguucaaggaccugugccacaugcacaccggcaucgucguggagaagaagaagaagggcgggaagcaggagaugaccccgcacugcgcccugcucgacugcaucauguucgacgccgccgugagcgggggccugaacguccccacccugcgcgccgugcuccccacggacaugguguuccggaccaucaccaccaaggucgugcugugaggacuagucccuguucccagagcccacuuuuuuuucuuuuuuugaaauaaaauagccugucuuucagaucuaaaaaaaaaaaaaaaaaaaaaaaaaaaaaaaaaaaaaaaaaaaaaaaaaaaaaaaaaaaaaaaaaaaaaaaaaaaaaaaaaaaaaaaaaaaaaaaaaaaa

SEQ ID NO: 18621 - RNA, 2040 nt, Artificial Sequence; identical to SEQ ID NO: 18615
  mRNA product Design a-2 (A100) comprising derived and/or modified sequence from LASV(Pinneo-NIG-1969;Clade I)__AIT17837__SP-HsPLAT_NP(2-569) (opt1)

SEQ ID NO: 18622 - RNA, 2040 nt, Artificial Sequence
  mRNA product Design a-2 (A100) comprising derived and/or modified sequence from LASV(ISTH0009-NIG-2011;Clade II)__AIT17405__SP-HsPLAT_NP(2-569) (opt1)
aggagaguccgcucagccagguugcagaagcggcuuagcguguguccuaaucuucucucugcguguagguaggccugugccgcaaacaagcuuaccauggacgccaugaagcgcggccugugcugcgugcuccugcugugcggggccgucuucgugagccccagcguguccaaggaggucaagagcuuccuguggacccagucccuccgccgggagcugagcggcuacugcuccaacaucaagcuccagguggugaaggacgcccaggcccugcugcacgggcuggacuucagcgaggucuccaacgugcagcgccucaugcggaagcagaagcgcgacgacagcgaccugaagcggcugcgcgaccucaaccaggcggugaacaaccuggucgagcugaaguccacccagcagaaguccauccuccgggugggcacccugaccagcgacgaccugcucacccuggccgccgaccuggagaagcucaagagcaaggugauccgcaccgagcggccccuguccagcggggucuacaugggcaaccuguccacgcagcagcucgagcagcgccgggcccugcugaacaugaucgggauggugggcggcgcccaggggacccagccgggccgcgacggggugguccgggugugggacgugaagaaccccgaccuccugaacaaccaguucggcaccaugcccagccugacccucgcgugccugacgaagcaggggcaggucgaccugaacgacgccgugcucgcccugaccgaccugggccucaucuacaccgccaaguaccccaacuccagcgaccuggaccgccugucccagagccacccgauccucaacaugguggacaucaagaaguccagccugaacaucagcggcuacaacuucucccugggggcggccgucaaggccggcgccugcaugcucgacgggggcaacaugcuggagaccaucaaggugacgccccagaccauggacggcauccucaagagcauccugaaggugaagcggucccuggggauguucgucagcgacacccccggcgagcgcaaccccuacgagaacauccuguacaagaucugccucuccggggacggcuggccguacaucgccagccggaccuccaucguggggcgcgcgugggagaacacgaccguggaccuggagagcgacggcaagccccagaaggucggcuccgccgggagcaacaagucccugcagagcgccggcuuccccaccgggcucaccuacucccagcugaugacgcugaaggacagcaugaugcagcuggaccccuccgccaagaccuggaucgacaucgagggccggccggaggaccccguggagaucgcccucuaccagcccaugagcgggugcuacauccacuucuuccgcgagcccaccgaccugaagcaguucaagcaggacgcgaaguacucccacggcaucgacgucgccgaccuguucccggcccagcccggccucaccagcgccgugaucgaggcccugccccggaacauggugcugacgugccaggggagcgacgacaucaagcgccuccuggacucccagggccgccgggacaucaagcugaucgacaucgcgcucagcaaggccgacucccgccgguucgagaacgccgucugggaccagugcaaggaccugugccacaugcacaccggggugguggucgagaagaagaagcgcggcgggaaggaggagaucacgccccacugcgcccugauggacugcaucauguacgacgccgcggugagcggcggccucaacaucccggugcugcgggccguccugccccgcgacaugguguuccggaccuccagccccaaggugguccucugaggacuagucccuguucccagagcccacuuuuuuuucuuuuuuugaaauaaaauagccugucuuucagaucuaaaaaaaaaaaaaaaaaaaaaaaaaaaaaaaaaaaaaaaaaaaaaaaaaaaaaaaaaaaaaaaaaaaaaaaaaaaaaaaaaaaaaaaaaaaaaaaaaaaa

SEQ ID NO: 18623 - RNA, 2040 nt, Artificial Sequence
  mRNA product Design a-2 (A100) comprising derived and/or modified sequence from LASV(ISTH2010-NIG-2012;Clade II)__AIT17483__SP-HsPLAT_NP(2-569) (opt1)
aggagaguccgcucagccagguugcagaagcggcuuagcguguguccuaaucuucucucugcguguagguaggccugugccgcaaacaagcuuaccauggacgccaugaagcgcggccugugcugcgugcuccugcugugcggggccgucuucgugagccccagcgccuccaaggaggugaaguccuuccuguggacccagagccuccgccgggagcugagcggcuacugcuccaacaucaagcugcaggucgugaaggacgcccaggcgcuccugcacgggcuggacuucagcgagguguccaacguccagcgccucaugcggaagcagaagcgcgacgacagcgaccugaagcggcugcgcgaccucaaccaggccgugaacaaccugguggagcugaaguccacccagcagaaguccauccuccgggucggcacgcugaccagcgacgaccugcucacccuggccgccgaccuggagaagcucaagagcaaggugauccgcaccgagcggccccuguccagcgggguguacaugggcaaccuguccacgcagcagcucgagcagcgccgggcccugcugaaccucaucgggauggucggcggcgcgcaggggacccagccgggccgcgacgggguggugcgggucugggacgugaagaaccccgaccugcugaacaaccaguucggcaccaugcccagccucacccuggccugccugacgaagcagggccagguggaccucaacgacgccguccuggcccugaccgaccucgggcugaucuacaccgcgaaguaccccaacuccagcgaccuggaccgccucucccagagccacccgauccugaacaugguggacaccaagaaguccagccugaacaucagcggcuucaacuucucccucggggccgccgugaaggccggcgccugcaugcuggacgggggcaacaugcuggagacgaucaaggucacgccccagaccauggacggcauccucaagagcauccugaaggugaagaagucccuggggauguucgugagcgacacccccggcgagcggaaccccuacgagaacauccucuacaagaucugccuguccggggacggcuggccguacaucgcgagccgcaccuccaucgucgggcgggccugggagaacaccaccguggaccuggagagcgacggcaagccccacaaggugggcaccgccggguccaacaagagccuccaguccgccggcuuccccacggggcugaccuacagccagcugaugacccugaaggacuccaugaugcagcucgaccccagcgccaagaccuggaucgacaucgagggccgcccggaggaccccgucgagaucgcgcuguaccagcccauguccgggugcuacauccacuucuuccgggagcccacggaccugaagcaguucaagcaggacgccaaguacagccacggcaucgacguggccgaccucuucccggcccagcccggccugaccuccgccgucaucgaggcgcugccccgcaacauggugcugaccugccaggggagcgacgacaucaagcggcuccuggacagccagggccgccgcgacaucaagcucaucgacaucgcccuguccaaggccgacagccggcgcuucgagaacgccgugugggaccagugcaaggaccugugccacaugcacaccggggucgugguggagaagaagaagcggggcgggaaggaggagaucacgccccacugcgcccucauggacugcaucauguacgacgcggccgucuccggcggccugaacaucccggugcugcgcgccgugcucccccgggacauggucuuccgcaccagcucccccaagguggugcugugaggacuagucccuguucccagagcccacuuuuuuuucuuuuuuugaaauaaaauagccugucuuucagaucuaaaaaaaaaaaaaaaaaaaaaaaaaaaaaaaaaaaaaaaaaaaaaaaaaaaaaaaaaaaaaaaaaaaaaaaaaaaaaaaaaaaaaaaaaaaaaaaaaaaa

SEQ ID NO: 18624 - RNA, 2040 nt, Artificial Sequence
  mRNA product Design a-2 (A100) comprising derived and/or modified sequence from LASV(Lassa virus/H.sapiens-wt/NGA/2015/ISTH_0543;Clade II)__AVO03640__SP-HsPLAT_NP(2-569) (opt1)
aggagaguccgcucagccagguugcagaagcggcuuagcguguguccuaaucuucucucugcguguagguaggccugugccgcaaacaagcuuaccauggacgccaugaagcgcggccugugcugcgugcuccugcugugcggggccgucuucgugagccccagcgccuccaaggaggugaaguccuuccuguggacccagagccuccgccgggagcugagcggcuacugcuccaacaucaagcugcaggucgugaaggacgcccaggcgcuccugcacgggcuggacuucagcgagguguccaacguccagcgccucaugcggaagcagaagcgcgacgacagcgaccugaagcggcugcgcgaccucaaccaggccgugaacaaccugguggagcugaaguccacccagcagaaguccauccuccgggucggcacgcugaccagcgacgaccugcucacccuggccgccgaccuggagaagcucaagagcaaggugauccgcaccgagcggccccuguccagcgggguguacaugggcaaccuguccacgcagcagcucgagcagcgccgggcccugcugaacaugaucgggauggucggcggcgcgcaggggacccagccgggccgcgacgggguggugcgggucugggacgugaagaaccccgaccuccugaacaaccaguucggcaccaugcccagccugacccucgccugccugacgaagcagggccagguggaccugaacgacgccguccucgcccugaccgaccuggggcucaucuacaccgcgaaguaccccaacuccagcgaccuggaccgccugucccagagccacccgauccucaacaugguggacaccaagaaguccagccugaacaucagcggcuacaacuucucccugggggccgccgugaaggccggcgccugcaugcucgacgggggcaacaugcuggagacgaucaaggucacgccccagaccauggacggcauccucaagagcauccugaaggugaagaagucccuggggauguucgugagcgacacccccggcgagcggaaccccuacgagaacauccuguacaagaucugccucuccggggacggcuggccguacaucgcgagccgcaccuccaucgucgggcgggccugggagaacaccaccguggaccuggagagcgacggcaagccccagaaggugggcuccgccgggagcaacaagucccugcagagcgccggcuuccccaccgggcucacguacucccagcugaugacccugaaggacagcaugaugcagcuggaccccuccgccaagaccuggaucgacaucgagggccgcccggaggaccccgucgagaucgcgcucuaccagcccaugagcgggugcuacauccacuucuuccgggagcccaccgaccugaagcaguucaagcaggacgccaaguacucccacggcaucgacguggccgaccuguucccggcccagcccggccucacgagcgccgucaucgaggcgcugccccgcaacauggugcugaccugccaggggagcgacgacaucaagcggcuccuggacucccagggccgcaaggacaucaagcugaucgacaucgcccucagcaaggccgacucccgccgguucgagaacgccgugugggaccagugcaaggaccugugccacaugcacaccggggucgugguggagaagaagaagcgcggcgggaaggaggagaucacgccccacugcgcccugauggacugcaucauguacgacgcggccgucagcggcggccucaacaucccggugcugcgggccgugcugccccgcgacauggucuuccggaccuccagccccaagguggugcucugaggacuagucccuguucccagagcccacuuuuuuuucuuuuuuugaaauaaaauagccugucuuucagaucuaaaaaaaaaaaaaaaaaaaaaaaaaaaaaaaaaaaaaaaaaaaaaaaaaaaaaaaaaaaaaaaaaaaaaaaaaaaaaaaaaaaaaaaaaaaaaaaaaaaa

SEQ ID NO: 18625 - RNA, 2040 nt, Artificial Sequence
  mRNA product Design a-2 (A100) comprising derived and/or modified sequence from LASV(Lassa virus/H.sapiens-wt/NGA/2016/ISTH_0009;Clade II)__AVO03572__SP-HsPLAT_NP(2-569) (opt1)
aggagaguccgcucagccagguugcagaagcggcuuagcguguguccuaaucuucucucugcguguagguaggccugugccgcaaacaagcuuaccauggacgccaugaagcgcggccugugcugcgugcuccugcugugcggggccgucuucgugagccccagcgccuccaaggaggugaaguccuuccuguggacccagagccuccgccgggagcugagcggcuacugcuccaacaucaagcugcaggucgugaaggacgcccaggcgcuccugcacgggcuggacuucagcgagguguccaacguccagcgccucaugcggaagcagaagcgcgacgacagcgaccugaagcggcugcgcgaccucaaccaggccgugaacaaccugguggagcugaaguccacccagcagaaguccauccuccgggucggcacgcugaccagcgacgaccugcucacccuggccgccgaccuggagaagcucaagagcaaggugauccgcaccgagcggccccuguccagcgggguguacaugggcaaccuguccacgcagcagcucgagcagcgccgggcccugcugaacaugaucgggauggucggcggcgcgcaggggacccagccgggccgcgacgggguggugcgggucugggacgugaagaaccccgaccuccugaacaaccaguucggcaccaugcccagccugacccucgccugccugacgaagcagggccagguggaccugaacgacgccguccucgcccugaccgaccuggggcucaucuacaccgcgaaguaccccaacuccagcgaccuggaccgccugucccagagccacccgauccucaacaugguggacaccaagaaguccagccugaacaucagcggcuacaacuucucccugggggccgccgugaaggccggcgccugcaugcucgacgggggcaacaugcuggagacgaucaaggucacgccccagaccauggacggcauccucaagagcauccugaaggugaagaagucccuggggauguucgugagcgacacccccggcgagcggaaccccuacgagaacauccuguacaagaucugccucuccggggacggcuggccguacaucgcgagccgcaccuccaucgucgggcgggccugggagaacaccaccguggaccuggagagcgacggcaagccccagaaggugggcuccgccgggagcaacaagucccugcagagcgccggcuuccccaccgggcucacguacucccagcugaugacccugaaggacagcaugaugcagcuggaccccuccgccaagaccuggaucgacaucgagggccgcccggaggaccccgucgagaucgcgcucuaccagcccaugagcgggugcuacauccacuucuuccgggagcccaccgaccugaagcaguucaagcaggacgccaaguacucccacggcaucgacguggccgaccuguucccggcccagcccggccucacgagcgccgucaucgaggcgcugccccgcaacauggugcugaccugccaggggagcgacgacaucaagcggcuccuggacucccagggccgccgcgacaucaagcugaucgacaucgcccucagcaaggccgacucccggcgcuucgagaacgccgugugggaccagugcaaggaccugugccacaugcacaccggggucgugguggagaagaagaagcggggcgggaaggaggagaucacgccccacugcgcccugauggacugcaucauguacgacgcggccgucagcggcggccucaacaucccggugcugcgcgccgugcugccccgggacauggucuuccgcaccuccagccccaagguggugcucugaggacuagucccuguucccagagcccacuuuuuuuucuuuuuuugaaauaaaauagccugucuuucagaucuaaaaaaaaaaaaaaaaaaaaaaaaaaaaaaaaaaaaaaaaaaaaaaaaaaaaaaaaaaaaaaaaaaaaaaaaaaaaaaaaaaaaaaaaaaaaaaaaaaaa

SEQ ID NO: 18626 - RNA, 2040 nt, Artificial Sequence
  mRNA product Design a-2 (A100) comprising derived and/or modified sequence from LASV(Lassa virus/H.sapiens-wt/NGA/2016/ISTH_0017;Clade II)__AVO03568__SP-HsPLAT_NP(2-569) (opt1)
aggagaguccgcucagccagguugcagaagcggcuuagcguguguccuaaucuucucucugcguguagguaggccugugccgcaaacaagcuuaccauggacgccaugaagcgcggccugugcugcgugcuccugcugugcggggccgucuucgugagccccagcgccuccaaggaggugaaguccuuccuguggacccagagccuccgccgggagcugagcggcuacugcuccagcaucaagcugcaggucgugaaggacgcccaggcgcuccugcacgggcuggacuucuccgaggugagcaacguccagcgccucaugcggaagcagaagcgcgacgacuccgaccugaagcggcugcgcgaccucaaccaggccgugaacaaccugguggagcucaagagcacccagcagaaguccauccugcgggucggcacgcugaccagcgacgaccugcucacccuggccgccgaccuggagaagcucaaguccaaggugauccgcaccgagcggccccugagcuccgggguguacaugggcaaccugagcacgcagcagcucgagcagcgccgggcccugcugaacaugaucgggauggcgggcggcgcccaggggacccagccgggccgcgacggggucgugcgggugugggacgucaagaaccccgaccuccugaacaaccaguucggcaccaugcccucccugacccucgccugccugacgaagcagggccagguggaccugaacgacgccgugcucgcgcugaccgaccuggggcucaucuacaccgccaaguaccccaacagcuccgaccuggaccgccugagccagagccacccgauccucaacauggucgacaccaagaaguccagccugaacaucuccggcuacaacuucagccugggggccgccgugaaggccggcgcgugcaugcucgacgggggcaacaugcuggagacgaucaaggugacgccccagaccauggacggcauccugaaguccauccucaaggucaagcggagccuggggauguucguguccgacgcccccggcgagcgcaaccccuacgagaacauccuguacaagaucugccucagcggggacggcuggccguacaucgccucccggaccagcaucguggggcgcgccugggagaacaccaccgucgaccuggaguccgacggcaagccccagaaggugggcgccaccgggagcaacaagucccugcagagcgcgggcuuccccaccgggcucacguacucccagcugaugacccugaaggacagcaugaugcagcuggaccccuccgccaagaccuggaucgacaucgagggccggccggaggaccccguggaggucgcccucuaccagcccgugagcgggugcuacauccacuucuuccgcgagcccaccgaccugaagcaguucaagcaggacgccaaguacucccacggcaucgacgucgccgaccuguucccggcgcagcccggccucacgagcgccgugaucgaggcccugccccggaacauggugcugaccugccaggggagcgacgacaucaagaagcuccuggacucccagggccgcaaggacaucaagcugaucgacaucgcccucagcaaggccgacucccgccgguucgagaacgcggucugggaccagugcaaggaccugugccacaugcacaccggggugguggucgagaagaagaagcgcggcgggaaggaggagaucacgccccacugcgcccugauggacugcaucauguacgacgccgccgugagcggcggccucaacaucccggugcugcgggcgguccugccccgcgacaugguguuccggaccuccagccccaaggugguccucugaggacuagucccuguucccagagcccacuuuuuuuucuuuuuuugaaauaaaauagccugucuuucagaucuaaaaaaaaaaaaaaaaaaaaaaaaaaaaaaaaaaaaaaaaaaaaaaaaaaaaaaaaaaaaaaaaaaaaaaaaaaaaaaaaaaaaaaaaaaaaaaaaaaaa

SEQ ID NO: 18627 - RNA, 2040 nt, Artificial Sequence
  mRNA product Design a-2 (A100) comprising derived and/or modified sequence from LASV(Lassa virus/H.sapiens-wt/NGA/2018/ISTH_0959;Clade II)__AVV65100__SP-HsPLAT_NP(2-569) (opt1)
aggagaguccgcucagccagguugcagaagcggcuuagcguguguccuaaucuucucucugcguguagguaggccugugccgcaaacaagcuuaccauggacgccaugaagcgcggccugugcugcgugcuccugcugugcggggccgucuucgugagccccagcgccuccaaggaggugaaguccuuccuguggacccagagccuccgccgggagcugagcggcuacugcuccaacaucaagcugcaggucgugaaggacgcccaggcgcuccugcacgggcuggacuucagcgagguguccaacguccagcgccucaugcggaagcagaagcgcgacgacagcgaccugaagcggcugcgcgaccucaaccaggccgugaacaaccugguggagcugaaguccacccagcagaaguccauccuccgggucggcacccugaccagcgacgaccugcucacccuggccgccgaccuggagaagcucaagagcaaggugauccgcaccgagcggccccuguccagcgggguguacaugggcaaccuguccacgcagcagcucgagcagcgccgggcccugcugaaccucaucgggauggucggcggcgcgcaggggacccagccgggccgcgacgggguggugcgggucugggacgugaagaaccccgaccugcugaacaaccaguucggcaccaugcccagccucacccuggccugccugacgaagcagggccagguggaccucaacgacgucgugcuggcccugaccgaccucgggcugaucuacaccgccaaguaccccaacuccagcgaccuggaccgccucucccagagccacccgauccugaacaugguggacaccaagaaguccagccugaacaucagcggcuucaacuucucccucggggcggccgucaaggccggcgccugcaugcuggacgggggcaacaugcuggagacgaucaaggugacgccccagaccauggacggcauccucaagagcauccugaaggugaagaagucccuggggauguucgucagcgacacccccggcgagcggaaccccuacgagaacauccucuacaagaucugccuguccggggacggcuggccguacaucgccagccgcaccuccaucguggggcgggcgugggagaacaccaccguggaccuggagagcgacggcaagccccacaaggucggcaccgccggguccaacaagagccuccaguccgccggcuuccccacggggcugaccuacagccagcugaugacccugaaggacuccaugaugcagcucgaccccagcgccaagaccuggaucgacaucgagggccgcccggaggaccccguggagaucgcccuguaccagcccauguccgggugcuacauccacuucuuccgggagcccacggaccugaagcaguucaagcaggacgcgaaguacagccacggcaucgacgucgccgaccucuucccggcccagcccggccugaccuccgccgugaucgaggcccugccccgcaacauggugcugaccugccaggggagcgacgacaucaagcggcuccuggacagccagggccgcaaggacaucaagcucaucgacaucgcgcuguccaagaccgacagccgccgguucgagaacgccgucugggaccagugcaaggaccugugccacaugcacacgggggugguggucgagaagaagaagcgcggcgggaaggaggagaucacgccccacugcgcccucauggacugcaucauguacgacgccgccguguccggcggccugaacaucccggugcugcgggcgguccucccccgcgacaugguguuccggaccagcucccccaaggugguccugugaggacuagucccuguucccagagcccacuuuuuuuucuuuuuuugaaauaaaauagccugucuuucagaucuaaaaaaaaaaaaaaaaaaaaaaaaaaaaaaaaaaaaaaaaaaaaaaaaaaaaaaaaaaaaaaaaaaaaaaaaaaaaaaaaaaaaaaaaaaaaaaaaaaaa

SEQ ID NO: 18628 - RNA, 2040 nt, Artificial Sequence
  mRNA product Design a-2 (A100) comprising derived and/or modified sequence from LASV(LASV003-NIG-2008;Clade II)__AIT17581__SP-HsPLAT_NP(2-569) (opt1)
aggagaguccgcucagccagguugcagaagcggcuuagcguguguccuaaucuucucucugcguguagguaggccugugccgcaaacaagcuuaccauggacgccaugaagcgcggccugugcugcgugcuccugcugugcggggccgucuucgugagccccagcgccuccaaggaggugaaguccuuccuguggacccagagccuccgccgggagcugagcggcuacugcuccagcaucaagcugcaggucgugaaggacgcccaggcgcuccugcacgggcuggacuucuccgaggugagcaacguccagcgccucaugcggaagcagaagcgcgacgacuccgaccugaagcggcugcgcgaccucaaccaggccgugaacaaccugguggagcucaagagcacccagcagaaguccguccugcgggugggcacccugaccagcgacgaccugcucacccuggccgccgaccuggagaagcucaaguccaaggugauccgcaccgagcggccccugagcuccggggucuacaugggcaaccugagcgcccagcagcucgagcagcgccggacgcugcugaacaugaucgggauggugggcggcgcgcaggggacccagccgggccgcgacggggugguccgggugugggacgugaagaaccccgaccuccugaacaaccaguucggcaccaugcccucccugacccucgccugccugacgaagcaggggcaggucgaccugaacgacguggugcucgcccugaccgaccugggccucaucuacaccgccaaguaccccaacagcuccgaccuggaccgccugagccagagccacccgauccucuccauggucgacaccaagaaguccagccugaacaucagcggcuacaacuucucccugggggcggccgugaaggccggcgccugcaugcucgacgggggcaacaugcuggagacgaucaaggugacgccccagaccauggacggcauccucaagagcauccugaaggucaagaagucccuggggauguucgugagcgacacccccggcgagcggaaccccuacgagaacauccuguacaagaucugccucuccggggacggcuggccguacaucgccagccgcaccuccaucguggggcgggcgugggagaacaccaccgucgaccuggagagcgacggcaagccccagaaggugggcaccgccggguccaacaagagccugcaguccgccggcuuccccacggggcucaccuacagccagcugaugacccugaaggacuccaugaugcagcuggaccccagcgccaagaccuggaucgacaucgagggccgcccggaggaccccgucgagaucgcccucuaccagcccauguccgggugcuacauccacuucuuccgggagcccacggaccugaagcaguucaagcaggacgcgaaguacagccacggcaucgacgugaccgaccuguucccggcccagcccggccucaccagcgccgugaucgaggcccugccccgcaacaugguccugaccugccagggguccgacgacaucaagcggcuccuggacagccagggccgccgcgacaucaagcugaucgacaucgcccucuccaaggcggacagccggcgcuucgagaacgccgugugggaccagugcaaggaccugugccacaugcacacggggguggucguggagaagaagaagcggggcgggaaggaggagaucacgccccacugcgcccugauggacugcaucauguacgacgccgccguguccggcggccucaacaucccgguccugcgcgcggugcugccccgggacaugguguuccgcaccagcucccccaaggucgugcucugaggacuagucccuguucccagagcccacuuuuuuuucuuuuuuugaaauaaaauagccugucuuucagaucuaaaaaaaaaaaaaaaaaaaaaaaaaaaaaaaaaaaaaaaaaaaaaaaaaaaaaaaaaaaaaaaaaaaaaaaaaaaaaaaaaaaaaaaaaaaaaaaaaaaa

SEQ ID NO: 18629 - RNA, 2040 nt, Artificial Sequence
  mRNA product Design a-2 (A100) comprising derived and/or modified sequence from LASV(LASV035-NIG-2009;Clade II)__AIT17589__SP-HsPLAT_NP(2-569) (opt1)
aggagaguccgcucagccagguugcagaagcggcuuagcguguguccuaaucuucucucugcguguagguaggccugugccgcaaacaagcuuaccauggacgccaugaagcgcggccugugcugcgugcuccugcugugcggggccgucuucgugagccccagcgccuccaaggaggugaaguccuuccuguggacccagagccuccgccgggagcugagcggcuacugcuccagcaucaagcugcaggucgugaaggacgcccaggcgcuccugcacgggcuggacuucuccgaggugagcaacguccagcgccucaugcggaagcagaagcgcgacgacuccgaccugaagcggcugcgcgaccucaaccaggccgugaacaaccugguggagcucaagagcacccagcagaaguccauccugcgggucggcacgcugaccagcgacgaccugcucacccuggccgccgaccuggagaagcucaaguccaaggugauccgcaccgagcggccccugagcuccgggguguacaugggcaaccugagcgcccagcagcucgagcagcgccgggcgcugcugaacaugaucgggauggucggcggcgcccaggggacgcagccgggccgcgacgggguggugcgggucugggacgugaagaaccccgaccuccugaacaaccaguucggcaccaugcccucccugacccucgccugccugaccaagcagggccagguggaccugaacgacgccguccucgcgcugacggaccuggggcucaucuacaccgccaaguaccccaacagcuccgaccuggaccgccugagccagagccacccgauccucaacaugguggacaccaagaaguccagccugaacaucuccggcuacaacuucagccugggggccgccgugaaggccggcgcgugcaugcucgacgggggcaacaugcuggagaccaucaaggucacgccccagaccauggacggcauccugaaguccauccucaaggugaagcggagccuggggauguucguguccgacacccccggcgagcgcaaccccuacgagaacauccuguacaagaucugccucagcggggacggcuggccguacaucgccucccggaccagcaucgucgggcgcgccugggagaacacgaccguggaccuggaguccgacggcaagccccagaaggugggcaccaccgggagcaacaagucccugcagagcgccggcuuccccacggggcucaccuacucccagcugaugacccugaaggacagcaugaugcagcuggaccccuccgccaagaccuggaucgacaucgagggccggccggaggaccccgucgagaucgcgcucuaccagcccaugagcgggugcuacauccacuucuuccgcgagcccacggaccugaagcaguucaagcaggacgccaaguacucccacggcaucgacguggccgaccuguucccggcccagcccggccucaccagcgccgucaucgaggcgcugccccggaacauggugcugaccugccaggggagcgacgacaucaagaagcuccuggacucccagggccgccgcgacaucaagcugaucgacaucgcccucagcaaggccgacucccggaaguucgagaacgccgugugggaccagugcaaggaccugugccacaugcacaccggggucgugguggagaagaagaagcgcggcgggaaggaggagaucacgccccacugcgcccugauggacugcaucauguacgacgcggccgucagcggcggccucaacaucccggugcugcgggccgugcugccccgcgacauggucuuccggaccuccagccccaagguggugcucugaggacuagucccuguucccagagcccacuuuuuuuucuuuuuuugaaauaaaauagccugucuuucagaucuaaaaaaaaaaaaaaaaaaaaaaaaaaaaaaaaaaaaaaaaaaaaaaaaaaaaaaaaaaaaaaaaaaaaaaaaaaaaaaaaaaaaaaaaaaaaaaaaaaaa

SEQ ID NO: 18630 - RNA, 2040 nt, Artificial Sequence
  mRNA product Design a-2 (A100) comprising derived and/or modified sequence from LASV(LASV1000-NIG-2009;Clade II)__AIT17783__SP-HsPLAT_NP(2-569) (opt1)
aggagaguccgcucagccagguugcagaagcggcuuagcguguguccuaaucuucucucugcguguagguaggccugugccgcaaacaagcuuaccauggacgccaugaagcgcggccugugcugcgugcuccugcugugcggggccgucuucgugagccccagcgccuccaaggaggugaaguccuuccuguggacccagagccuccgccgggagcugagcggcuacugcuccaacaucaagcugcaggucgugaaggacgcccaggcgcuccugcacgggcuggacuucagcgagguguccaacguccagcgccucaugcggaagcagaagcgcgacgacagcgaccugaagcggcugcgcgaccucaaccaggccgugaacaaccugguggagcugaaguccacccagcagaaguccauccuccgggucggcacgcugaccagcgacgaccugcucacccuggccgccgaccuggagaagcucaagagcaaggugauccgcaccgagcggccccuguccagcgggguguacaugggcaaccuguccacgcagcagcucgagcagcgccgggcccugcugaacaugaucgggauggucggcggcgcgcaggggacccagccgggccgcgacgggguggugcgggucugggacgugaagaaccccgaccuccugaacaaccaguucggcaccaugcccagccugacccucgccugccugacgaagcagggccagguggaccugaacgacgucgugcucgcccugaccgaccuggggcucaucuacaccgccaaguaccccaacuccagcgaccuggaccgccugucccagagccacccgauccucaacaugguggacaccaagaaguccagccugaacaucagcggcuacaacuucucccugggggcggccgucaaggccggcgccugcaugcucgacgggggcaacaugcuggagacgaucaaggugacgccccagaccauggacggcauccucaagagcauccugaaggugaagaagucccuggggauguucgucagcgacacccccggcgagcggaaccccuacgagaacauccuguacaagaucugccucuccggggacggcuggccguacaucgccagccgcaccuccaucguggggcgggcgugggagaacaccaccguggaccuggagagcgacggcaagccccagaaggucggcaccgccggguccaacaagagccugcaguccgccggcuuccccacggggcucaccuacagccagcugaugacccugaaggacuccaugaugcagcuggaccccagcgccaagaccuggaucgacaucgagggccgcccggaggaccccguggagaucgcccucuaccagcccgucuccgggugcuacauccacuucuuccgggagcccacggaccugaagcaguucaagcaggacgcgaaguacagccacggcaucgacguggccgaccuguucccggcccagcccggccucaccuccgccgugaucgaggcccugccccgcaacaugguccugaccugccaggggagcgacgacaucaagcggcuccuggacagccagggccgccgcgacaucaagcugaucgacaucgcgcucuccaaggccgacagccggcgcuucgagaacgccgugugggaccagugcaaggaccugugccacaugcacaccgggguggucguggagaagaagaagcggggcgggaaggaggagaucacgccccacugcgcccugauggacugcaucauguacgacgccgcgguguccggcggccucaacaucccgguccugcgcgccgugcugccccgggacaugguguuccgcaccagcucccccaaggucgugcucugaggacuagucccuguucccagagcccacuuuuuuuucuuuuuuugaaauaaaauagccugucuuucagaucuaaaaaaaaaaaaaaaaaaaaaaaaaaaaaaaaaaaaaaaaaaaaaaaaaaaaaaaaaaaaaaaaaaaaaaaaaaaaaaaaaaaaaaaaaaaaaaaaaaaa

SEQ ID NO: 18631 - RNA, 2040 nt, Artificial Sequence
  mRNA product Design a-2 (A100) comprising derived and/or modified sequence from LASV(LASV221-NIG-2010;Clade II)__AIT17625__SP-HsPLAT_NP(2-569) (opt1)
aggagaguccgcucagccagguugcagaagcggcuuagcguguguccuaaucuucucucugcguguagguaggccugugccgcaaacaagcuuaccauggacgccaugaagcgcggccugugcugcgugcuccugcugugcggggccgucuucgugagccccagcgccuccaaggaggugaaguccuuccuguggacccagagccuccgccgggagcugagcggcuacugcuccagcaucaagcugcaggucgugaaggacgcccaggcgcuccugcacgggcuggacuucuccgaggugagcaacguccagcgccucaugcggaagcagcgccgggacgacuccgaccugaagcgccugcgggaccucaaccaggccgugaacaaccugguggagcucaagagcacccagcagaaguccauccugcgcgucggcacgcugaccagcgacgaccugcucacccuggccgccgaccuggagaagcucaaguccaaggugauccggaccgagcgcccccugagcuccgggguguacaugggcaaccugagcacgcagcagcucgagcagcggcgcgcccugcugaacaugaucgggauggucggcggcgcgcaggggacccagccgggccgggacgggguggugcgcgucugggacgugaagaaccccgaccuccugaacaaccaguucggcaccaugcccucccugacccucgccugccugacgaagcagggccagguggaccugaacgacgccguccucgcccugaccgaccuggggcucaucuacaccgcgaaguaccccaacagcuccgaccuggaccggcugagccagagccacccgauccucaacaugguggacaccaagaaguccagccugaacaucuccggcuacaacuucagccugggggccgccgugaaggccggcgccugcaugcucgacgggggcaacaugcuggagacgaucaaggucacgccccagaccguggacggcauccugaaguccauccucaaggugaagcgcagccuggggauguucgucuccgacacccccggcgagcggaaccccuacgagaacauccuguacaagaucugccucagcggggacggcuggccguacaucgcgucccgcaccagcaucguggggcgggccugggagaacaccaccguggaccuggaguccgacggcaagccccagaaggucggcaccgccgggagcaacaagucccugcagagcgccggcuuccccacggggcucaccuacucccagcugaugacccugaaggacagcaugaugcagcuggaccccuccgccaagaccuggaucgacaucgagggccgcccggaggaccccguggagaucgcgcucuaccagcccaugagcgggugcuacauccacuucuuccgggagcccacggaccugaagcaguucaagcaggacgccaaguacucccacggcaucgacgucgccgaccuguucccggcccagcccggccucaccagcgccgugaucgaggcgcugccccgcaacauggugcugaccugccaggggagcgacgacaucaagcgccuccuggacucccagggccggcgcgacaucaagcugaucgacaucgcccucagcaaggccgacucccggaaguucgagaacgccgucugggaccagugcaaggaccugugccacaugcacaccggggugguggucgagaagaagaagcgcggcgggaaggaggagaucacgccccacugcgcccugauggacugcaucauguacgacgcggccgugagcggcggccucaacaucccggugcugcgggccguccugccccgcgacaugguguuccggaccuccagccccaaggugguccucugaggacuagucccuguucccagagcccacuuuuuuuucuuuuuuugaaauaaaauagccugucuuucagaucuaaaaaaaaaaaaaaaaaaaaaaaaaaaaaaaaaaaaaaaaaaaaaaaaaaaaaaaaaaaaaaaaaaaaaaaaaaaaaaaaaaaaaaaaaaaaaaaaaaaa

SEQ ID NO: 18632 - RNA, 2040 nt, Artificial Sequence
  mRNA product Design a-2 (A100) comprising derived and/or modified sequence from LASV(LASV237-NIG-2010;Clade II)__AIT17639__SP-HsPLAT_NP(2-569) (opt1)
aggagaguccgcucagccagguugcagaagcggcuuagcguguguccuaaucuucucucugcguguagguaggccugugccgcaaacaagcuuaccauggacgccaugaagcgcggccugugcugcgugcuccugcugugcggggccgucuucgugagccccagcgccuccaaggaggugaaguccuuccuguggacccagagccuccgccgggagcugagcggcuacugcuccaacaucaagcugcaggucgugaaggacgcccaggcgcuccugcacgggcuggacuucagcgagguguccaacguccagcgccucaugcggaagcagaagcgcgacgacagcgaccugaagcggcugcgcgaccucaaccaggccgugaacaaccugguggagcugaaguccacccagcagaaguccauccuccgggucggcacccugaccagcgacgaccugcucacccuggccgccgaccuggagaagcucaagagcaaggugauccgcaccgagcggccccuguccagcgggguguacaugggcaaccuguccacgcagcagcucgagcagcgccgggcccugcugaacaugaucgggauggucggcggcgcgcaggggacccagccgggccgcgacgggguggugcgggucugggacgugaagaaccccgaccuccugaacaaccaguucggcaccaugcccagccugacccucgccugccugacgaagcagggccagguggaccugaacgacgccguccucgcccugaccgaccuggggcucaucuacaccgcgaaguaccccaacuccagcgaccuggaccgccugucccagagccacccgauccucaacaugguggacaucaagaaguccagccugaacaucagcggcuacaacuucucccugggggccgccgugaaggccggcgccugcaugcucgacgggggcaacaugcuggagaccaucaaggucacgccccagaccauggacggcauccucaagagcauccugaaggugaagcggucccuggggauguucgugagcgacacccccggcgagcgcaaccccuacgagaacauccuguacaagaucugccucuccggggacggcuggccguacaucgcgagccggaccuccaucgucgggcgcgccugggagaacacgaccguggaccuggagagcgacggcaagccccagaaggugggcuccgccgggagcaacaagucccugcagagcgccggcuuccccaccgggcucaccuacucccagcugaugacgcugaaggacagcaugaugcagcuggaccccuccgccaagaccuggaucgacaucgagggccggccggaggaccccgucgagaucgcgcucuaccagcccaugagcgggugcuacauccacuucuuccgcgagcccaccgaccugaagcaguucaagcaggacgccaaguacucccacggcaucgacguggccgaccuguucccggcccagcccggccucaccagcgccgucaucgaggcgcugccccggaacauggugcugacgugccaggggagcgacgacaucaagcgccuccuggacucccagggccgccgggacaucaagcugaucgacaucgcccucagcaaggccgacucccgccgguucgagaacgccgugugggaccagugcaaggaccugugccacaugcacaccggggucgugguggagaagaagaagcgcggcgggaaggaggagaucacgccccacugcgcccugauggacugcaucauguacgacgcggccgucagcggcggccucaacaucccggugcugcgggccgugcugccccgcgacauggucuuccggaccuccagccccaagguggugcucugaggacuagucccuguucccagagcccacuuuuuuuucuuuuuuugaaauaaaauagccugucuuucagaucuaaaaaaaaaaaaaaaaaaaaaaaaaaaaaaaaaaaaaaaaaaaaaaaaaaaaaaaaaaaaaaaaaaaaaaaaaaaaaaaaaaaaaaaaaaaaaaaaaaaa

SEQ ID NO: 18633 - RNA, 2040 nt, Artificial Sequence
  mRNA product Design a-2 (A100) comprising derived and/or modified sequence from LASV(LASV253-NIG-2011;Clade II)__AIT17671__SP-HsPLAT_NP(2-569) (opt1)
aggagaguccgcucagccagguugcagaagcggcuuagcguguguccuaaucuucucucugcguguagguaggccugugccgcaaacaagcuuaccauggacgccaugaagcgcggccugugcugcgugcuccugcugugcggggccgucuucgugagccccagcgccuccaaggaggugaaguccuuccuguggacccagagccuccgccgggagcugagcggcuacugcuccagcaucaagcugcaggucgugaaggacgcccaggcgcuccugcacgggcuggacuucuccgaggugagcaacguccagcgccucaugcggaagcagaagcgcgacgacuccgaccugaagcggcugcgcgaccucaaccaggccgugaacaaccugguggagcucaagagcacccagcagaaguccguccugcgggugggcacccugaccagcgacgaccugcucacccuggccgccgaccuggagaagcucaaguccaaggugauccgcaccgagcggccccugagcuccggggucuacaugggcaaccugagcacgcagcagcucgagcagcgccgggcccugcugaacaugaucgggauggugggcggcgcgcaggggacccagccgggccgcgacggggugguccgggugugggacgugaagaaccccgaccuccugaacaaccaguucggcaccaugcccucccugacccucgccugccugacgaagcaggggcaggucgaccugaacgacguggugcucgcccugaccgaccugggccucaucuacaccgccaaguaccccaacagcuccgaccuggaccgccugagccagagccacccgauccucaacauggucgacaccaagaaguccagccugaacaucuccggcuacaacuucagccugggggcggccgugaaggccggcgccugcaugcucgacgggggcaacaugcuggagacgaucaaggugacgccccagaccauggacggcauccugaaguccauccucaaggucaagaagucccuggggauguucgugagcgacacccccggcgagcggaaccccuacgagaacauccuguacaagaucugccucagcggggacggcuggccguacaucgccucccgcaccagcaucguggggcgggcgugggagaacaccaccgucgaccuggaguccgacggcaagccccagaaggugggcaccgccgggagcaacaagucccugcagagcgccggcuuccccacggggcucaccuacucccagcugaugacccugaaggacagcaugaugcagcuggaccccuccgccaagaccuggaucgacaucgagggccgcccggaggaccccgucgagaucgcccucuaccagcccaugagcgggugcuacauccacuucuuccgggagcccacggaccugaagcaguucaagcaggacgcgaaguacucccacggcaucgacgugaccgaccuguucccggcccagcccggccucaccagcgccgugaucgaggcccugccccgcaacaugguccugaccugccaggggagcgacgacaucaagcggcuccuggacucccagggccgccgcgacaucaagcugaucgacaucgcccucagcaaggcggacucccggcgcuucgagaacgccgugugggaccagugcaaggaccugugccacaugcacacggggguggucguggagaagaagaagcggggcgggaaggaggagaucacgccccacugcgcccugauggacugcaucauguacgacgccgccgugagcggcggccucaacaucccgguccugcgcgcggugcugccccgggacaugguguuccgcaccuccagccccaaggucgugcucugaggacuagucccuguucccagagcccacuuuuuuuucuuuuuuugaaauaaaauagccugucuuucagaucuaaaaaaaaaaaaaaaaaaaaaaaaaaaaaaaaaaaaaaaaaaaaaaaaaaaaaaaaaaaaaaaaaaaaaaaaaaaaaaaaaaaaaaaaaaaaaaaaaaaa

SEQ ID NO: 18634 - RNA, 2040 nt, Artificial Sequence
  mRNA product Design a-2 (A100) comprising derived and/or modified sequence from LASV(LASV254-NIG-2011;Clade II)__AIT17675__SP-HsPLAT_NP(2-569) (opt1)
aggagaguccgcucagccagguugcagaagcggcuuagcguguguccuaaucuucucucugcguguagguaggccugugccgcaaacaagcuuaccauggacgccaugaagcgcggccugugcugcgugcuccugcugugcggggccgucuucgugagccccagcgccuccaaggaggugaaguccuuccuguggacccagagccuccgccgggagcugagcggcuacugcuccagcaucaagcugcaggucgugaaggacgcccaggcgcuccugcacgggcuggacuucuccgaggugagcaacguccagcgccucaugcggaagcagaagcgcgacgacuccgaccugaagcggcugcgcgaccucaaccaggccgugaacaaccugguggagcucaagagcacccagcagaaguccguccugcgggugggcacgcugaccagcgacgaccugcucacccuggccgccgaccuggagaagcucaaguccaaggugauccgcaccgagcggccccugagcuccggggucuacaugggcaaccugagcacgcagcagcucgagcagcgccgggcccugcugaacaugaucgggauggugggcggcgcgcaggggacccagccgggccgcgacggggugguccgggugugggacgugaagaaccccgaccuccugaacaaccaguucggcaccaugcccucccugacccucgccugccugacgaagcaggggcaggucgaccugaacgacgccgugcucgcccugaccgaccugggccucaucuacaccgcgaaguaccccaacagcuccgaccuggaccgccugagccagagccacccgauccucaacaugguggacaccaagaaguccagccugaacaucuccggcuacaacuucagccugggggccgccgucaaggccggcgccugcaugcucgacgggggcaacaugcuggagacgaucaaggugacgccccagaccauggacggcauccugaaguccauccucaaggugaagaagucccuggggauguucgucagcgacacccccggcgagcggaaccccuacgagaacauccuguacaagaucugccucagcggggacggcuggccguacaucgcgucccgcaccagcaucguggggcgggccugggagaacaccaucguggaccuggaguccgacggcaagccccagaaggucggcaccgccgggagcaacaagucccugcagagcgccggcuuccccaccgggcucacguacucccagcugaugacccugaaggacagcaugaugcagcuggaccccuccgccaagaccuggaucgacaucgagggccgcccggaggaccccguggagaucgcgcucuaccagcccaugagcgggugcuacauccacuucuuccgggagcccaccgaccugaagcaguucaagcaggacgccaaguacucccacggcaucgacgucgccgaccuguucccggcccagcccggccucacgagcgccgugaucgaggcgcugccccgcaacauggugcugaccugccaggggagcgacgacaucaagcggcuccuggacucccagggccgccgcgacaucaagcugaucgacaucgcccucagcaaggccgacucccggcgcuucgagaacgccgucugggaccagugcaaggaccugugccacaugcacaccggggugguggucgagaagaagaagcggggcgggaaggaggagaucacgccccacugcgcccugauggacugcaucauguacgacgcggccgugagcggcggccucaacaucccggugcugcgcgccguccugccccgggacaugguguuccgcaccuccagccccaaggugguccucugaggacuagucccuguucccagagcccacuuuuuuuucuuuuuuugaaauaaaauagccugucuuucagaucuaaaaaaaaaaaaaaaaaaaaaaaaaaaaaaaaaaaaaaaaaaaaaaaaaaaaaaaaaaaaaaaaaaaaaaaaaaaaaaaaaaaaaaaaaaaaaaaaaaaa

SEQ ID NO: 18635 - RNA, 2040 nt, Artificial Sequence
  mRNA product Design a-2 (A100) comprising derived and/or modified sequence from LASV(Nig08-04;Clade II)__ADU56611__SP-HsPLAT_NP(2-569) (opt1)
aggagaguccgcucagccagguugcagaagcggcuuagcguguguccuaaucuucucucugcguguagguaggccugugccgcaaacaagcuuaccauggacgccaugaagcgcggccugugcugcgugcuccugcugugcggggccgucuucgugagccccagcgccuccaaggaggugaaguccuuccuguggacccagagccuccgccgggagcugagcggcuacugcuccaacaucaagcugcaggucgugaaggacgcccaggcgcuccugcacgggcuggacuucagcgagguguccaacguccagcgccucaugcggaagcagaagcgcgacgacggcgaccugaagcggcugcgcgaccucaaccaggccgugaacaaccugguggagcucaagagcacccagcagaaguccguccugcggguggggacccugaccagcgacgaccugcucacccuggccgccgaccuggagaagcucaaguccaaggugauccgcaccgagcggccccugagcuccggcgucuacauggggaaccugagcacgcagcagcucgagcagcgcaaggcccugcuguccaugaucggcauggugggcggggcgcagggcacccagccggggcgggacggcgugguccgcgugugggacgugaagaaccccgaccuccugaacaaccaguucgggaccaugcccagccugacccucgccugccugacgaagcagggccaggucgaccugaacgacgccgugcucgcccugaccgaccugggccucaucuacaccgcgaaguaccccaacuccagcgaccuggaccggcugucccagagccacccgauccucaacaugguggacaccaagaaguccagccugaacaucagcggguacaacuucucccugggcgccgccgucaaggccggggccugcaugcucgacggcggcaacaugcuggagacgaucaaggugacgccccagaccauggacgggauccucaagagcauccugaaggugaagcgcucccugggcauguucgucagcgacacccccggggagcggaaccccuacgagaacauccuguacaagaucugccucuccggcgacggguggccguacaucgcgagccgcaccuccaucgugggccgggccugggagaacaccaccguggaccuggagagcgacggcaagccccagaaggucgggaccgccggcuccaacaagagccugcaguccgccggguuccccacgggccucaccuacagccagcugaugacccugaaggacuccaugaugcagcuggaccccagcgccaagaccuggaucgacaucgaggggcgcccggaggaccccguggagaucgcgcucuaccagcccauguccggcugcuacauccacuucuuccgggagcccacggaccugaagcaguucaagcaggacgccaaguacagccacggcaucgacgucaccgaccuguucuccgcccagccggggcucaccagcgccgugaucgaggcccugccccgcaacauggugcugaccugccagggcagcgacgacaucaagaagcuccuggacucccaggggcggcgcgacaucaagcugaucgacaucagccucaacaaggcggacucccgccgguucgagaacgccgucugggaccagugcaaggaccugugccacaugcacacgggcgugguggucgagaagaagaagcgcgggggcaaggaggagaucacgccccacugcgcccugauggacugcaucauguucgacgccgccgugagcggcgggcucaacauccccauccugcgggcggugcugccgcgcgacauggucuuccggaccuccagccccaagguggugcucugaggacuagucccuguucccagagcccacuuuuuuuucuuuuuuugaaauaaaauagccugucuuucagaucuaaaaaaaaaaaaaaaaaaaaaaaaaaaaaaaaaaaaaaaaaaaaaaaaaaaaaaaaaaaaaaaaaaaaaaaaaaaaaaaaaaaaaaaaaaaaaaaaaaaa

SEQ ID NO: 18636 - RNA, 2043 nt, Artificial Sequence
  mRNA product Design a-2 (A100) comprising derived and/or modified sequence from LASV(GA391;Clade III)__AAA46284__SP-HsPLAT_NP(2-570) (opt1)
aggagaguccgcucagccagguugcagaagcggcuuagcguguguccuaaucuucucucugcguguagguaggccugugccgcaaacaagcuuaccauggacgccaugaagcgcggccugugcugcgugcuccugcugugcggggccgucuucgugagccccagcgccuccaaggaggugcgcagcugccuguggacccagucccuccggcgcgagcugagcggcuacugcuccaacaucaagcugcaggucgugaaggacgcccaggcgcuccugcacgggcuggacuucagcgagguguccaacguccagcggcucaugcgcaagcagaagcgggacgacggcgaccugaagcgccugcgggaccucaaccaggccgugaacaaccugguggagcugaaguccacccagcagaaguccguccuccgcguggggacgcugagcuccgacgaccugcucauccuggccgccgaccuggagaagcucaagagcaaggugacccggaccgagcgcccccuguccagcggcgucuacauggggaaccuguccagccagcagcucgaccagcggcgcgcccugcugaacaugaucggcaugaccggcguguccgggggcgggaagggcgcgagcaacgggaucgugcgggucugggacgugaagaacgccgagcuccugaacaaccaguucggcacgaugccgucccugacccucgccugccugaccaagcagggccagguggaccugaacgacgccguccaggcgcucaccgaccuggggcugaucuacacggccaaguaccccaacagcagcgaccucgaccgccugucccagagccaccccauccugaacaugaucgacaccaagaaguccagccucaacaucuccggcuacaacuucagccugggggccgccgugaaggccggcgcgugcaugcuggacggcgggaacaugcucgagaccaucaaggugagcccccagaccauggacggcauccucaagagcauccugaaggucaagaagucccuggggauguucgugagcgacacgccgggcgagcggaaccccuacgagaacauccuguacaagaucugccuguccggggacggcuggagcuacaucgccucccgcaccagcaucgugggccgggccugggagaacaccgucguggaccucgagcaggacaacaagccccagaagaucgggaacggcggguccaacaagagccugcaguccgccggcuucgccgcggggcugaucuacagccagcucaugacccugaaggacuucaagugcuucaaccugauccccaacgccaagacguggauggacaucgagggccgcccggaggaccccguggagaucgcccuguaccagcccuccagcggcugcuacguccacuucuuccgggagcccaccgaccucaagcaguucaagcaggacgccaaguacagccacgggcgcgacgugaccgaccuguucgccgcgcagccgggccugaccuccgccgucaucgaggcccucccccggaacauggugaucacgugccaggggagcgaggacauccgcaagcugcuggagucccagggccgccgggacaucaagcucaucgacaucacccugagcaaggccgacucccgcaaguucgagaacgccgugugggaccaguucaaggaccugugccacaugcacaccggggucgugguggagaagaagaagcggggcggcaaggaggagaucacgccccacugcgcgcucauggacugcaucauguucgacgccgccgucagcgggggccuggacgccaaggugcugcgcgugguccucccccgggacaugguguuccgcaccuccaccccgaaggugguccugugaggacuagucccuguucccagagcccacuuuuuuuucuuuuuuugaaauaaaauagccugucuuucagaucuaaaaaaaaaaaaaaaaaaaaaaaaaaaaaaaaaaaaaaaaaaaaaaaaaaaaaaaaaaaaaaaaaaaaaaaaaaaaaaaaaaaaaaaaaaaaaaaaaaaa

SEQ ID NO: 18637 - RNA, 2040 nt, Artificial Sequence
  mRNA product Design a-2 (A100) comprising derived and/or modified sequence from LASV(Nig08-A19;Clade III)__ADU56619__SP-HsPLAT_NP(2-569) (opt1)
aggagaguccgcucagccagguugcagaagcggcuuagcguguguccuaaucuucucucugcguguagguaggccugugccgcaaacaagcuuaccauggacgccaugaagcgcggccugugcugcgugcuccugcugugcggggccgucuucgugagccccagcgccuccaaggaggugaaguccuuccuguggacccagucccuccgccgggagcugagcggcuacugcuccaacaucaagcugcaggucgugaaggacgcccaggcgcuccugcacgggcuggacuucagcgagguguccaacguccagcgccucaugcggaagcagaagcgcgacgacggcgaccugaagcggcugcgcgaccucaaccaggccgugaacaaccugguggagcucaagagcacccagcagaaguccguccugcggguggggacccugagcuccgacgaccugcucgugcuggccgccgaccuggagaagcucaagagcaaggucgugcgcaccgagcggccccuguccagcggcaucuacauggggaaccuguccagccagcagcucgaccagcgcaaggcccugcugaacaugaucggcaugaccggcgggaacggcgggcggaacaccacguccgacggcaucgugcgcgucugggacgugaagaacgcggagcuccugaacaaccaguucgggaccaugccgagccugacccucgccugccugaccaagcagggccagguggaccugaacgacgccguccaggcccucacggaccugggccugaucuacaccgcgaaguaccccaacuccagcgaccucgaccggcuggcccagagccaccccauccugaacaugaucgacaccaagaaguccagccucaacaucuccggguacaacuucagccugggcgccgccgugaaggccggggcgugcaugcuggacggcggcaacaugcucgagaccaucaaggugagcccccagacgauggacgggauccucaagagcauccugaaggucaagcgcucccugggcauguucaucagcgacaccccgggggagcggaaccccuacgagaacauccuguacaagaucugccuguccggcgacggguggcccuacaucgccagccgcaccuccaucgugggccgggccugggagaacaccguggucgaccucgagagcgacaacaagccccagaagacgggcaacgggggcuccaacaagagccugcaguccgccggguucgccgcgggccugaccuacagccagcucaugacccugaaggacuccaugcugcagcuggacccgaacgccaagaccuggauggacaucgaggggcgccccgaggaccccguggagaucgcccucuaccagcccagcuccggcugcuacauccacuucuuccgggagccgacggaccugaagcaguucaagcaggacgccaaguacagccacggcaucgacgugaccgaccuguucgccgcgcagcccgggcucaccagcgccgucaucgaggcccugccccgcaacauggugaucacgugccagggcuccgaggacauccggaagcugcucgagagccaggggcgccgcgacaucaagcugaucgacaucucccugagcaaggucgacucccggaaguucgagaacgccgugugggaccaguucaaggaccucugccacaugcacaccggcaucguggucgagaagaagaagcgcgggggcaaggaggagaucacgccccacugcgcccugauggacugcaucauguucgacgcggccgugagcggcgggguggacgccaagguccugcgggccgugcucccgcgcgacaugguguuccggaccuccacccccaaggucgugcugugaggacuagucccuguucccagagcccacuuuuuuuucuuuuuuugaaauaaaauagccugucuuucagaucuaaaaaaaaaaaaaaaaaaaaaaaaaaaaaaaaaaaaaaaaaaaaaaaaaaaaaaaaaaaaaaaaaaaaaaaaaaaaaaaaaaaaaaaaaaaaaaaaaaaa

SEQ ID NO: 18638 - RNA, 2040 nt, Artificial Sequence
  mRNA product Design a-2 (A100) comprising derived and/or modified sequence from LASV(G1180-SLE-2010;Clade IV)__AIT17169__SP-HsPLAT_NP(2-569) (opt1)
aggagaguccgcucagccagguugcagaagcggcuuagcguguguccuaaucuucucucugcguguagguaggccugugccgcaaacaagcuuaccauggacgccaugaagcgcggccugugcugcgugcuccugcugugcggggccgucuucgugagccccagcgccuccaaggagaucaagagcuuccuguggacccagucccuccgccgggagcugagcggcuacugcuccaacaucaagcuccagguggucaaggacgcccaggcgcugcugcacgggcuggacuucagcgagguguccaacgugcagcgccucaugcggaaggagcgccgggacgacaacgaccugaagcgccugcgggaccucaaccaggccgucaacaaccugguggagcucaagagcacccagcagaaguccauccugcgcgugggcacccugaccagcgacgaccugcucauccuggccgccgaccuggagaagcucaaguccaaggucauccggaccgagcgcccccugagcgccgggguguacaugggcaaccuguccagccagcagcucgaccagcggcgcgcgcugcuguccaugaucgggaugagcuccggcaaccagcgggcccaggccggccgcgacggggugguccgggugugggacgugaagaacgucgagcuccugaacaaccaguucggcaccaugccgagccugacgcucgccugccugaccaagcagggccagguggaccugaacgacgcggugcaggcccucaccgaccuggggcugaucuacaccgccaaguaccccaacacguccgaccucgaccgccugacccagagccaccccauccugaacaugaucgacaccaagaaguccagccucaacaucagcggguacaacuucucccugggcgccgccgucaaggcgggcgccugcaugcuggacgggggcaacaugcucgagaccaucaaggugagcccccagacgauggacgggauccugaaguccauccugaaggugaagaaggcccucggcauguucaucagcgacaccccgggcgagcggaaccccuacgagaacauccuguacaagaucugccuguccggggacggcuggcccuacaucgccagccgcaccuccaucaccgggcgggccugggagaacacggucguggaccucgagagcgacggcaagccccagaaggcgggguccaacaacagcaacaagucccugcagagcgugggcuucaccgccggccugaccuacucccagcucaugacccugaaggacgccaugcugcagcuggacccgaacgccaagacguggauggacaucgaggggcgccccgaggaccccgucgagaucgcccucuaccagcccagcuccggcugcuacauccacuucuuccgggagccgaccgaccugaagcaguucaagcaggacgcgaaguacagccacgggaucgacgugaccgaccuguucgccgcccagcccggccucaccuccgccgugaucgacgcccugccccgcaacauggucaucacgugccaggggagcgacgacauccgcaagcugcucgagagccagggccggaaggacaucaagcugaucgacaucgcgcuguccaagaccgacagccgcaaguacgagaacgccgugugggaccaguacaaggaccucugccacaugcacaccggcgucgugguggagaagaagaagcgcgggggcaaggaggagaucacgccccacugcgcccugauggacugcaucauguucgacgccgcggucuccgggggccugaacaccagcgugcuccgggccgugcugccgcgggacauggucuuccgcaccuccacgccccggguggugcugugaggacuagucccuguucccagagcccacuuuuuuuucuuuuuuugaaauaaaauagccugucuuucagaucuaaaaaaaaaaaaaaaaaaaaaaaaaaaaaaaaaaaaaaaaaaaaaaaaaaaaaaaaaaaaaaaaaaaaaaaaaaaaaaaaaaaaaaaaaaaaaaaaaaaa

SEQ ID NO: 18639 - RNA, 2040 nt, Artificial Sequence
  mRNA product Design a-2 (A100) comprising derived and/or modified sequence from LASV(G1442-SLE-2011;Clade IV)__AIT17181__SP-HsPLAT_NP(2-569) (opt1)
aggagaguccgcucagccagguugcagaagcggcuuagcguguguccuaaucuucucucugcguguagguaggccugugccgcaaacaagcuuaccauggacgccaugaagcgcggccugugcugcgugcuccugcugugcggggccgucuucgugagccccagcgccuccaaggaggugaaguccuuccuguggacccagagccuccgccgggagcugagcggcuacugcuccaacaucaagcugcaggucgugaaggacgcccaggcgcuccugcacgggcuggacuucagcgagguguccaacguccagcgccucaugcggaagcagcgccgggacgacaacgaccugaagcgccugcgggaccucaaccaggccgugaacaaccugguggagcucaagagcacccagcagaaguccguccugcgcgugggcacccugaccagcgacgaccugcucgugcuggccgccgaccuggagaagcucaaguccaaggucauccggaccgagcgcccccugagcgccgggguguacaugggcaaccuguccagccagcagcucgaccagcggcgcgcgcugcugaacaugaucgggauguccggcggcauccaggggacccggacgggccgcgacggggugguccgggugugggacgugaagaacgccgaccuccugaacaaccaguucggcaccaugccgagccugacccucgccugccugaccaagcaggggcaggucgaccugaacgacguggugcaggcccucacggaccugggccugaucuacaccgcgaaguaccccaacgccuccgaccucgaccgccugacccagagccaccccauccugaacaugaucgacaccaagaaguccagccucaacaucagcggcuacaacuucucccugggggccgccgucaaggccggcgcgugcaugcuggacgggggcaacaugcucgagacgaucaaggugagcccccagaccauggacggcauccugaaguccauccugaaggugaagaagacccucgggauguucaucagcgacaccccgggcgagcggaaccccuacgagaacauccuguacaagaucugccuguccggggacggcuggcccuacaucgccagccgcacguccaucaccgggcgggccugggagaacaccgucguggaccucgagagcgacggcaagccccagaaggccggcuccaacaacagcaacaagucccugcagagcgccggguucgcggccggccugaccuacucccagcucaugacgcugaaggacgccaugcugcagcuggacccgaacgccaagaccuggauggacaucgaggggcgccccgaggaccccguggagaucgcccucuaccagcccagcuccggcugcuacauccacuucuuccgggagccgaccgaccugaagcaguucaagcaggacgcgaaguacagccacgggaucgacgucaccgaccuguucgccgcccagcccggccucacguccgccgugaucgaggcccugccccgcaacauggucaucacgugccagggcagcgacgacaucaagaagcugcucgagucccaggggcgcaaggacaucaagcugaucgacaucgcgcugagcaagaccgacagccggaaguacgagaacgccgugugggaccaguacaaggaccucugccacaugcacaccggcguggucguggagaagaagaagcgcgggggcaaggaggagaucaccccgcacugcgcccugauggacugcaucauguucgacgccgcgguguccgggggccugaacacccucguccugcgggccgugcugccccgcgacaugguguuccggaccagcacgccccgcgucgugcucugaggacuagucccuguucccagagcccacuuuuuuuucuuuuuuugaaauaaaauagccugucuuucagaucuaaaaaaaaaaaaaaaaaaaaaaaaaaaaaaaaaaaaaaaaaaaaaaaaaaaaaaaaaaaaaaaaaaaaaaaaaaaaaaaaaaaaaaaaaaaaaaaaaaaa

SEQ ID NO: 18640 - RNA, 2040 nt, Artificial Sequence
  mRNA product Design a-2 (A100) comprising derived and/or modified sequence from LASV(G3010-SLE-2013;Clade IV)__AIT17345__SP-HsPLAT_NP(2-569) (opt1)
aggagaguccgcucagccagguugcagaagcggcuuagcguguguccuaaucuucucucugcguguagguaggccugugccgcaaacaagcuuaccauggacgccaugaagcgcggccugugcugcgugcuccugcugugcggggccgucuucgugagccccagcgccuccaaggagaucaagagcuuccuguggacccagucccuccgccgggagcugagcggcuacugcuccaacaucaagcuccagguggucaaggacgcccaggcgcugcugcacgggcuggacuucagcgagguguccaacgugcagcgccucaugcggaaggagcgccgggacgacaacgaccugaagcgccugcgggaccucaaccaggccgucaacaaccugguggagcucaagagcacccagcagaaguccauccugcgcgugggcacccugaccagcgacgaccugcucauccuggccgccgaccuggagaagcucaaguccaaggucacccggaccgagcgcccccugagcgccgggguguacaugggcaaccuguccagccagcagcucgaccagcggcgcgcgcugcuguccaugaucgggaugagcuccggcgugcagggcgcccgggccgggcgcgacggcgucgugcgggugugggacgucaagaacgccgagcuccugaacaaccaguucgggacgaugccgagccugacccucgcgugccugaccaagcagggccagguggaccugaacgacgugguccaggcccucaccgaccuggggcugaucuacacggccaaguaccccaacaccuccgaccucgaccgccugacccagagccaccccauccugaacaugaucgacaccaagaaguccagccucaacaucagcggcuacaacuucucccugggcgccgccgugaaggcgggggccugcaugcuggacggcgggaacaugcucgagacgaucaaggugagcccccagaccauggacggcauccugaaguccauccugaaggucaagaaggcccucggcauguucaucagcgagaccccgggggagcggaaccccuacgagaacauccuguacaagaucugccuguccggcgacggguggcccuacaucgccagccgcaccuccaucacgggccgggccugggagaacaccgugguggaccucgagagcgacgggaagccccagaaggcgggcuccaacaacagcaacaagucccugcagagcgccggcuucaccgccgggcugaccuacucccagcucaugacgcugaaggacgccaugcugcagcuggacccgaacgccaagaccuggauggacaucgagggccgccccgaggaccccgucgagguggcgcucuaccagcccagcuccgggugcuacauccacuucuuccgggagccgaccgaccugaagcaguucaagcaggacgccaaguacagccacggcaucgacgugaccgaccuguucgccgcccagcccgggcucacguccgccgucaucgacgcgcugccccgcaacauggugaucacgugccagggcagcgacgacaucaagaagcugcucgagagccagggccgcaaggacaucaagcugaucgacaucgcccuguccaagaccgacagccggaaguacgagaacgccgucugggaccaguacaaggaccucugccacaugcacaccggggugguggucgagaagaagaagcgcggcgggaaggaggagaucaccccgcacugcgcccugauggacugcaucauguucgacgcggccguguccggcgggcugaacaccagcgugcuccgggccguccugccccgcgacaugguguuccggaccuccacgccccgcgugguccugugaggacuagucccuguucccagagcccacuuuuuuuucuuuuuuugaaauaaaauagccugucuuucagaucuaaaaaaaaaaaaaaaaaaaaaaaaaaaaaaaaaaaaaaaaaaaaaaaaaaaaaaaaaaaaaaaaaaaaaaaaaaaaaaaaaaaaaaaaaaaaaaaaaaaa

SEQ ID NO: 18641 - RNA, 2040 nt, Artificial Sequence
  mRNA product Design a-2 (A100) comprising derived and/or modified sequence from LASV(G502-SLE-2009;Clade IV)__AIT17127__SP-HsPLAT_NP(2-569) (opt1)
aggagaguccgcucagccagguugcagaagcggcuuagcguguguccuaaucuucucucugcguguagguaggccugugccgcaaacaagcuuaccauggacgccaugaagcgcggccugugcugcgugcuccugcugugcggggccgucuucgugagccccagcgccuccaaggagaucaagagcuuccuguggacccagucccuccgccgggagcugagcggcuacugcuccaacaucaagcuccagguggucaaggacgcccaggcgcugcugcacgggcuggacuucagcgagguguccaacgugcagcgccucaugcggaaggagcgccgggacgacaacgaccugaagcgccugcgggaccucaaccaggccgucaacaaccugguggagcucaagagcacccagcagaaguccauccugcgcgugggcacccugaccagcgacgaccugcucauccuggccgccgaccuggagaagcucaaguccaaggucauccggaccgagcgcccccugagcgccgggguguacaugggcaaccuguccagccagcagcucgaccagcggcgcgcgcugcuguccaugaucgggaugagcggcggcaaccagggggugcgggccggcaaggacggggucgugcgcgugugggacgucaagaacgccgagcuccugaacaaccaguucggcaccaugccgucccugacgcucgccugccugaccaagcagggccagguggaccugaacgacgcggugcaggcccucaccgaccuggggcugaucuacaccgccaaguaccccaacacgagcgaccucgaccggcugacccagucccaccccauccugaacaugaucgacaccaagaaguccagccucaacaucuccggcuacaacuucagccugggggccgccgucaaggcgggcgccugcaugcuggacgggggcaacaugcucgagaccaucaaggugagcccccagacgauggacggcauccucaagagcauccugaaggugaagaaggcccuggggauguucaucuccgacaccccgggcgagcgcaaccccuacgagaacauccuguacaagaucugccugagcggggacggcuggcccuacaucgccucccggaccagcaucaccgggcgcgccugggagaacacggucguggaccucgaguccgacggcaagccccagaaggcgggcagcaacaacuccaacaagagccugcaguccgccggguucaccgccggccugaccuacagccagcucaugacccugaaggacgccaugcugcagcuggacccgaacacgaagaccuggauggacaucgaggggcggcccgaggaccccguggagaucgcccucuaccagcccuccagcggcugcuacauccacuucuuccgcgagccgaccgaccugaagcaguucaagcaggacgcgaaguacucccacgggaucgacgucaccgaccuguucgccgcccagcccggccucacgagcgccgugaucgacgcccugccccggaacauggugaucacgugccagggcuccgacgacauccgcaagcugcucgagagccaggggcgcaaggacaucaagcugaucgacaucgcgcugaacaagaccgacagccggaaguacgagaacgccgucugggaccaguacaaggaccucugccacaugcacaccggcguggucguggagaagaagaagcgcgggggcaaggaggagaucaccccgcacugcgcccugauggacugcaucauguucgacgccgcgguguccgggggccugaacaccagcguccuccgggccgugcugccccgcgacaugguguuccggaccuccacgccccgcgucgugcugugaggacuagucccuguucccagagcccacuuuuuuuucuuuuuuugaaauaaaauagccugucuuucagaucuaaaaaaaaaaaaaaaaaaaaaaaaaaaaaaaaaaaaaaaaaaaaaaaaaaaaaaaaaaaaaaaaaaaaaaaaaaaaaaaaaaaaaaaaaaaaaaaaaaaa

SEQ ID NO: 18642 - RNA, 2040 nt, Artificial Sequence
  mRNA product Design a-2 (A100) comprising derived and/or modified sequence from LASV(G733-SLE-2010;Clade IV)__AIT17155__SP-HsPLAT_NP(2-569) (opt1)
aggagaguccgcucagccagguugcagaagcggcuuagcguguguccuaaucuucucucugcguguagguaggccugugccgcaaacaagcuuaccauggacgccaugaagcgcggccugugcugcgugcuccugcugugcggggccgucuucgugagccccagcgccuccaaggagaucaagagcuuccuguggacccagucccuccgccgggagcugagcggcuacugcuccaacaucaagcuccagguggucaaggacgcccaggcgcugcugcacgggcuggacuucagcgagguguccaacgugcagcgccucaugcggaaggagcgccgggacgacaacgaccugaagcgccugcgggaccucaaccaggccgucaacaaccugguggagcucaagagcacccagcagaaguccgugcugcgcgucggcacccugaccagcgacgagcugcucgugcuggccgccgaccuggagaagcucaaguccaaggugauccggaccgagcgcccccugagcgccggggucuacaugggcaaccuguccagccagcagcucgaccagcggcgcgcgcugcuguccaugaucgggaugagcggcggcaaccagggggcccggaccggccgcgacgggguggugcgggucugggacgugaagaacgccgagcuccugaacaaccaguucggcaccaugccgucccugacccucgccugccugaccaagcagggccagguggaccugaacgacgcgguccaggcccucaccgaccuggggcugaucuacacggccaaguaccccaacaccagcgaccucgaccgccugacccagucccaccccauccugaacaugaucgacaccaagaaguccagccucaacaucuccggcuacaacuucagccugggggccgccgugaaggcgggcgccugcaugcuggacgggggcaacaugcucgagacgaucaaggugagcccccagaccauggacggcauccucaagagcauccugaaggucaagaaggcccuggggauguucaucuccgacaccccgggcgagcggaaccccuacgagaacauccuguacaagaucugccugagcggggacggcuggcccuacaucgccucccgcaccagcaucacggggcgggccugggagaacaccgugguggaccucgaguccgacggcaagccccagaaggcgggcagcaacaacuccaacaagagccugcaguccgccggguucaccgccggccugaccuacagccagcucaugacgcugaaggacgccaugcugcagcuggacccgaacgccaagaccuggauggacaucgaggggcgccccgaggaccccgucgagaucgcgcucuaccagcccuccagcggcugcuacauccacuucuuccgggagccgaccgaccugaagcaguucaagcaggacgccaaguacucccacgggaucgacgugaccgaccuguucgccgcccagcccggccucacgagcgccgugaucgacgcgcugccccgcaacauggucaucacgugccagggcuccgacgacauccgcaagcugcucgagagccaggggcggaaggacaucaagcugaucgacaucgcccugagcaagaucgacucccgcaaguacgagaacgccgugugggaccaguacaaggaccucugccacaugcacaccggcgucgugguggagaagaagaagcgcgggggcaaggaggagaucacgccccacugcgcccugauggacugcaucauguucgacgcggccgucagcgggggccugaacucccucgugcugcgggccgugcugccgcgggacauggucuuccgcaccagcacgccccggguggugcucugaggacuagucccuguucccagagcccacuuuuuuuucuuuuuuugaaauaaaauagccugucuuucagaucuaaaaaaaaaaaaaaaaaaaaaaaaaaaaaaaaaaaaaaaaaaaaaaaaaaaaaaaaaaaaaaaaaaaaaaaaaaaaaaaaaaaaaaaaaaaaaaaaaaaa

SEQ ID NO: 18643 - RNA, 2040 nt, Artificial Sequence
  mRNA product Design a-2 (A100) comprising derived and/or modified sequence from MOPV/LASV reassortant(IGS-1;Clade IV)__AFY05578__SP-HsPLAT_NP(2-569) (opt1)
aggagaguccgcucagccagguugcagaagcggcuuagcguguguccuaaucuucucucugcguguagguaggccugugccgcaaacaagcuuaccauggacgccaugaagcgcggccugugcugcgugcuccugcugugcggggccgucuucgugagccccagcgccuccaaggagaucaagagcuuccuguggacccagucccuccgccgggagcugagcggcuacugcuccaacaucaagcuccagguggucaaggacgcccaggcgcugcugcacgggcuggacuucagcgagguguccaacgugcagcgccucaugcggaaggagcgccgggacgacaacgaccugaagcgccugcgggaccucaaccaggccgucaacaaccugguggagcucaagagcacccagcagaaguccauccugcgcgugggcacccugaccagcgacgaccugcucauccuggccgccgaccuggagaagcuccgguccaaggucauccgcaccgagcggccccugagcgccgggguguacaugggcaaccuguccagccagcagcucgaccagcgccgggcgcugcugaacaugaucgggauguccggcggcaaccagggggcccgcgccggccgggacggggugguccgcgugugggacgugaagaacgccgagcuccugagcaaccaguucggcaccaugccgucccugacgcucgcgugccugaccaagcaggggcaggucgaccugaacgacgccgugcaggcccucaccgaccugggccugaucuacaccgccaaguaccccaacacgagcgaccucgaccggcugacccagucccaccccauccugaacaugaucgacaccaagaaguccagccucaacaucuccggcuacaacuucagccugggggccgcggugaaggccggcgccugcaugcuggacgggggcaacaugcucgagaccaucaaggucagcccccagacgauggacggcauccucaagagcauccugaaggugaagaaggcccuggggauguucaucuccgacaccccgggcgagcgcaaccccuacgagaacauccuguacaagaucugccugagcggggacggcuggcccuacaucgccucccggaccagcaucaccgggcgcgcgugggagaacacgguggucgaccucgaguccgacggcaagccccagaaggccgacagcaacaacuccagcaagucccugcagagcgccggcuucaccgccgggcugaccuacucccagcucaugacccugaaggacgccaugcugcagcuggacccgaacgcgaagacguggauggacaucgagggccggcccgaggaccccguggagaucgcccucuaccagcccagcuccgggugcuacauccacuucuuccgcgagccgaccgaccugaagcaguucaagcaggacgccaaguacagccacggcaucgacgugaccgaccuguucgccacccagcccgggcucacguccgccgucaucgacgcgcugccccgcaacauggugaucacgugccagggcagcgacgacauccggaagcugcucgagagccagggccgcaaggacaucaagcugaucgacaucgaccuguccaagaccgacagccggaaguacgagaacgccgugugggaccaguacaaggaccucugccacaugcacaccggggucguggucgagaagaagaagcgcggcgggaaggaggagaucaccccgcacugcgcccugauggacugcaucauguucgacgccgcgguguccggcgggcugaacaccagcgugcuccgggccguccugccccgcgacaugguguuccggaccuccacgccccgcgugguccugugaggacuagucccuguucccagagcccacuuuuuuuucuuuuuuugaaauaaaauagccugucuuucagaucuaaaaaaaaaaaaaaaaaaaaaaaaaaaaaaaaaaaaaaaaaaaaaaaaaaaaaaaaaaaaaaaaaaaaaaaaaaaaaaaaaaaaaaaaaaaaaaaaaaaa

SEQ ID NO: 18644 - RNA, 2040 nt, Artificial Sequence
  mRNA product Design a-2 (A100) comprising derived and/or modified sequence from LASV(LM765-SLE-2012;Clade IV)__AIT17815__SP-HsPLAT_NP(2-569) (opt1)
aggagaguccgcucagccagguugcagaagcggcuuagcguguguccuaaucuucucucugcguguagguaggccugugccgcaaacaagcuuaccauggacgccaugaagcgcggccugugcugcgugcuccugcugugcggggccgucuucgugagccccagcgccuccaaggagaucaagagcuuccuguggacccagucccuccgccgggagcugagcggcuacugcuccaacaucaagcuccagguggucaaggacgcccaggcgcugcugcacgggcuggacuucagcgagguguccaacgugcagcgccucaugcggaaggagcgccgggacgacaacgaccugaagcgccugcgggaccucaaccaggccgucaacaaccugguggagcucaagagcacccagcagaaguccauccugcgcgugggcacccugaccagcgacgaccugcucauccuggccgccgaccuggagaagcucaaguccaaggucacccggaccgagcgcccccugagcgccgggguguacaugggcaaccuguccagccagcagcucgaccagcggcgcgcgcugcuggacaugaucgggauguccggcagcaaccagggcgcccgggccgggcgcgacggcgugguccgggugugggacgugaagaacgccgagcuccugaacaaccaguucgggacgaugccgucccugacccucgcgugccugaccaagcagggccaggucgaccugaacgacgccgugcaggcccucaccgaccuggggcugaucuacacggccaaguaccccaacaccagcgaccucgaccgccugacccagucccaccccauccugaacaugaucgacaccaagaaguccagccucaacaucuccggcuacaacuucagccugggcgccgcggugaaggccggggccugcaugcuggacggcgggaacaugcucgagacgaucaaggucagcccccagaccauggacggcauccucaagagcauccugaaggugaagaaggcccugggcauguucaucuccgacgccccgggggagcggaaccccuacgagaacauccuguacaagaucugccugagcggcgacggguggcccuacaucgcgucccgcaccagcaucaccggccgggccugggagaacacgguggucgaccucgaguccgacgggaagccccagaaggccggcagcaacggcuccaacaagagccugcaguccgccggguucaccgccggccugaccuacagccagcucaugacccugaaggacgcgaugcugcagcuggacccgaacgccaagacguggauggacaucgaggggcgccccgaggaccccguggagaucgcccucuaccagcccuccagcggcugcuacauccacuucuuccgggagccgaccgaccugaagcaguucaagcaggacgccaaguacucccacgggaucgacgugaccgaccuguucgccgcgcagcccggccucaccagcgccgucaucgacgcccugccccgcaacauggugaucacgugccagggcuccgacgacauccgcaagcuguucgagagccaggggcggaaggacaucaagcucaucgacaucgcccugagcaagaccgacucccgcaaguacgagaacgcggugugggaccaguacaaggaccugugccacaugcacaccggcaucgucguggagaagaagaagcgcgggggcaaggaggagaucacgccccacugcgcccucauggacugcaucauguucgacgccgccgucagcgggggccugaacaccuccgugcugcgggccgugcucccgcgggacauggucuuccgcaccagcacgccccggguggugcugugaggacuagucccuguucccagagcccacuuuuuuuucuuuuuuugaaauaaaauagccugucuuucagaucuaaaaaaaaaaaaaaaaaaaaaaaaaaaaaaaaaaaaaaaaaaaaaaaaaaaaaaaaaaaaaaaaaaaaaaaaaaaaaaaaaaaaaaaaaaaaaaaaaaaa

SEQ ID NO: 18645 - RNA, 2040 nt, Artificial Sequence
  mRNA product Design a-2 (A100) comprising derived and/or modified sequence from LASV(LM776-SLE-2012;Clade IV)__AIT17825__SP-HsPLAT_NP(2-569) (opt1)
aggagaguccgcucagccagguugcagaagcggcuuagcguguguccuaaucuucucucugcguguagguaggccugugccgcaaacaagcuuaccauggacgccaugaagcgcggccugugcugcgugcuccugcugugcggggccgucuucgugagccccagcgccuccaaggagaucaagagcuuccuguggacccagucccuccgccgggagcugagcuccuacugcagcaacaucaagcuccagguggucaaggacgcccaggcgcugcugcacggccuggacuucuccgaggugagcaacgugcagcgccucaugcggaaggagcgccgggacgacaacgaccugaagcgccugcgggaccucaaccaggccgucaacaaccugguggagcugaaguccacccagcagaaguccauccuccgcguggggacccugaccuccgacgaccugcucauccuggccgccgaccuggagaagcucaagagcaaggucacccggaccgagcgcccccuguccgccggcguguacauggggaaccugagcucccagcagcucgaccagcggcgcgcgcugcugagcaugaucggcauguccgggagcaaccagggcgcccgggccggccgcgacggggugguccgggugugggacgugaagaacgccgagcuccugaacaaccaguucggcacgaugccgucccugacccucgcgugccugaccaagcaggggcaggucgaccugaacgacgccgugcaggcccucaccgaccugggccugaucuacacggccaaguaccccaacaccagcgaccucgaccgccugacccagagccaccccauccugaacaugaucgacaccaagaaguccagccucaacaucuccggguacaacuucagccugggcgccgcggugaaggccggcgccugcaugcuggacgggggcaacaugcucgagacgaucaaggucagcccccagaccauggacgggauccucaagagcauccugaaggugaagaaggcccugggcauguucaucuccgacaccccgggcgagcggaaccccuacgagaacauccuguacaagaucugccugagcggggacggcuggcccuacaucgccucccgcaccagcaucacggggcgggcgugggagaacaccguggucgaccucgaguccgacggcaagccccagaaggccgggagcaacaacuccaacaagagccugcaguccgccggcuucaccgccggccugaccuacagccagcucaugacgcugaaggacgccaugcugcagcuggacccgaacgcgaagaccuggauggacaucgaggggcgccccgaggaccccguggagguggcccucuaccagcccuccagcggcugcuacauccacuucuuccgggagccgaccgaccugaagcaguucaagcaggacgccaaguacucccacgggaucgacgucaccgaccuguucgccgcccagcccggccucacgagcgcggugaucgacgcccugccccgcaacauggugaucacgugccaggggagcgacgacauccgcaagcugcucgagucccagggccggaaggacaucaagcugaucgacaucgcccugagcaagaccgacucccgcaaguacgagaacgccgucugggaccaguacaaggaccucugccacaugcacaccggcguggucguggagaagaagaagcgcgggggcaaggaggagaucaccccgcacugcgcgcugauggacugcaucauguucgacgccgccgugagcgggggccugaacaccuccguccuccgggccgugcugccccgggacaugguguuccgcaccagcacgccccgggucgugcugugaggacuagucccuguucccagagcccacuuuuuuuucuuuuuuugaaauaaaauagccugucuuucagaucuaaaaaaaaaaaaaaaaaaaaaaaaaaaaaaaaaaaaaaaaaaaaaaaaaaaaaaaaaaaaaaaaaaaaaaaaaaaaaaaaaaaaaaaaaaaaaaaaaaaa

SEQ ID NO: 18646 - RNA, 2040 nt, Artificial Sequence
  mRNA product Design a-2 (A100) comprising derived and/or modified sequence from LASV(Mad39;Clade IV)__ANH09723__SP-HsPLAT_NP(2-569) (opt1)
aggagaguccgcucagccagguugcagaagcggcuuagcguguguccuaaucuucucucugcguguagguaggccugugccgcaaacaagcuuaccauggacgccaugaagcgcggccugugcugcgugcuccugcugugcggggccgucuucgugagccccagcgccuccaaggagaucaagagcuuccuguggacccagucccuccgccgggagcugagcggcuacugcuccaacaucaagcuccagguggucaaggacgcccaggcgcugcugcacgggcuggacuucagcgagguguccaacgugcagcgccucaugcggaagcagcgccgggacgacaacgaccugaagcgccugcgggaccucaaccaggccgucaacaaccugguggagcugaaguccacccagcagaaguccgugcuccgcgucggcacgcugaccagcgacgaccugcucacccuggccgccgaccuggagaagcucaaguccaaggugacccggacggagcgcccccugaccgccgggguguacaugggcaaccugagcucccagcagcucgaccagcggcgcgcgcugcugaacaugaucgggaugagcggcggcaaccagggggcccggaccggccgcgacggggucgugcgggugugggacgucaagaacgccgagcuccugaacaaccaguucggcaccaugccgucccugacgcucgccugccugaccaagcagggccagguggaccugaacgacgugguccaggcgcucaccgaccuggggcugaucuacaccgccaaguaccccaacacgagcgaccucgaccgccugacccagucccaccccauccugaacaugaucgacaccaacaagagcucccucaacaucagcggcuacaacuucagccugggggccgccgugaaggccggcgcgugcaugcuggacgggggcaacaugcucgagaccaucaaggugagcccccagacgauggacggcauccucaagagcauccugaaggucaagaagucccuggggauguucaucagcgacaccccgggcgagcggaaccccuacgagaacauccuguacaagaucugccuguccggggacggcuggcccuacaucgccagccgcaccuccaucaccgggcgggccugggagaacacggugguggaccucgagagcggcggcaagccccagaaggccggguccaacaacagcaacaagucccugcagagcgccggcuucgcggccgggcugaccuacucccagcucaugacccugaaggacgccaugcugcagcuggacccgaacgccaagaccuggauggacaucgagggccgccccgaggaccccgucgagaucgcccucuaccagcccaucagcgggugcuacauccacuucuuccgggagccgacggaccugaagcaguucaagcaggacgcgaaguacucccacggcaucgacgugaccgaccuguucgccgcccagcccggccucaccagcgccgugaucgaggcccugccccgcaacauggucaucacgugccagggguccgacgacauccgcaagcuguucgagagccagggccggaaggacaucaagcucaucgacaucgcgcuguccaagaccgacagccgcaaguacgagaacgccgugugggaccaguacaaggaccugugccacaugcacaccggggucgugguggagaagaagaagaagggcgggaaggaggagaucacgccccacugcgcccucauggacugcaucauguucgacgccgcggucagcggcggccugaacacccuggugcuccgggccgugcugccgcgcgacauggucuuccggaccuccacccccaagguggugcugugaggacuagucccuguucccagagcccacuuuuuuuucuuuuuuugaaauaaaauagccugucuuucagaucuaaaaaaaaaaaaaaaaaaaaaaaaaaaaaaaaaaaaaaaaaaaaaaaaaaaaaaaaaaaaaaaaaaaaaaaaaaaaaaaaaaaaaaaaaaaaaaaaaaaa

SEQ ID NO: 18647 - RNA, 2040 nt, Artificial Sequence
  mRNA product Design a-2 (A100) comprising derived and/or modified sequence from LASV(Z0947-SLE-2011;Clade IV)__AIT17841__SP-HsPLAT_NP(2-569) (opt1)
aggagaguccgcucagccagguugcagaagcggcuuagcguguguccuaaucuucucucugcguguagguaggccugugccgcaaacaagcuuaccauggacgccaugaagcgcggccugugcugcgugcuccugcugugcggggccgucuucgugagccccagcgccuccaaggagaucaagagcuuccuguggacccagucccuccgccgggagcugagcggcuacugcuccaacaucaagcuccagguggucaaggacgcccaggcgcugcugcacgggcuggacuucagcgagguguccaacgugcagcgccucaugcggaaggagcgccgggacgacaacgaccugaagcgccugcgggaccucaaccaggccgucaacaaccugguggagcucaagagcacccagcagaaguccauccugcgcgugggcacccugaccagcgacgaccugcucauccuggccgccgaccuggagaagcucaaguccaaggucacccggaccgagcgcccccugagcgccgggguguacaugggcaaccuguccagccagcagcucgaccagcggcgcgcgcugcugaacaugaucgggauguccggcagcaaccagggcgcccggacggggcgcgacggcgugguccgggugugggacgugaagaacgccgagcuccugaacaaccaguucgggaccaugccgucccugacccucgccugccugaccaagcagggccaggucgaccugaacgacgcggugcaggcccucacggaccuggggcugaucuacaccgccaaguaccccaacaccagcgaccucgaccgccugacccagucccaccccauccugaacaugaucgacacgaagaaguccagccucaacaucuccggcuacaacuucagccugggcgccgccgugaaggcgggggccugcaugcuggacggcgggaacaugcucgagaccaucaaggucagcccccagaccauggacggcauccucaagagcauccugaaggugaagaaggcccugggcauguucaucuccgacgccccgggggagcggaaccccuacgagaacauccuguacaagaucugccugagcggcgacggguggcccuacaucgccucccgcaccagcaucacgggccgggcgugggagaacaccguggucgaccucgaguccgacgggaagccccagaaggccggcagcaacggcuccaacaagagccugcaguccgccggguucaccgccggccugaccuacagccagcucaugacgcugaaggacgccaugcugcagcuggacccgaacgcgaagaccuggauggacaucgaggggcgccccgaggaccccguggagaucgcccucuaccagcccuccagcggcugcuacauccacuucuuccgggagccgaccgaccugaagcaguucaagcaggacgccaaguacucccacgggaucgacgugaccgaccuguucgccgcccagcccggccucacgagcgcggucaucgacgcccugccccgcaacauggugaucacgugccagggcuccgacgacauccgcaagcuguucgagagccaggggcggaaggacaucaagcucaucgacaucgcccugagcaagaccgacucccgcaaguacgagaacgccgugugggaccaguacaaggaccugugccacaugcacaccggcaucgucguggagaagaagaagcgcgggggcaaggaggagaucaccccgcacugcgcgcucauggacugcaucauguucgacgccgccgucagcgggggccugaacaccuccgugcugcgggccgugcucccccgggacauggucuuccgcaccagcacgccccggguggugcugugaggacuagucccuguucccagagcccacuuuuuuuucuuuuuuugaaauaaaauagccugucuuucagaucuaaaaaaaaaaaaaaaaaaaaaaaaaaaaaaaaaaaaaaaaaaaaaaaaaaaaaaaaaaaaaaaaaaaaaaaaaaaaaaaaaaaaaaaaaaaaaaaaaaaa

SEQ ID NO: 18648 - RNA, 2040 nt, Artificial Sequence
  mRNA product Design a-2 (A100) comprising derived and/or modified sequence from LASV(Josiah;Clade IV)__NP_694869__SP-HsPLAT_NP(2-569) (opt4)
aggagaguccgcucagccagguugcagaagcggcuuagcguguguccuaaucuucucucugcguguagguaggccugugccgcaaacaagcuuaccauggacgccaugaagagaggccugugcugcgugcugcugcugugcggcgccguguucgugagccccagcgccagcaaggagaucaagagcuuccuguggacccagagccugagaagagagcugagcggcuacugcagcaacaucaagcugcagguggugaaggacgcccaggcccugcugcacggccuggacuucagcgaggugagcaacgugcagagacugaugagaaaggagagaagagacgacaacgaccugaagagacugagagaccugaaccaggccgugaacaaccugguggagcugaagagcacccagcagaagagcauccugagagugggcacccugaccagcgacgaccugcugauccuggccgccgaccuggagaagcugaagagcaaggugaucagaaccgagagaccccugagcgccggcguguacaugggcaaccugagcagccagcagcuggaccagagaagagcccugcugaacaugaucggcaugagcggcggcaaccagggcgccagagccggcagagacggcguggugagagugugggacgugaagaacgccgagcugcugaacaaccaguucggcaccaugcccagccugacccuggccugccugaccaagcagggccagguggaccugaacgacgccgugcaggcccugaccgaccugggccugaucuacaccgccaaguaccccaacaccagcgaccuggacagacugacccagagccaccccauccugaacaugaucgacaccaagaagagcagccugaacaucagcggcuacaacuucagccugggcgccgccgugaaggccggcgccugcaugcuggacggcggcaacaugcuggagaccaucaaggugagcccccagaccauggacggcauccugaagagcauccugaaggugaagaaggcccugggcauguucaucagcgacacccccggcgagagaaaccccuacgagaacauccuguacaagaucugccugagcggcgacggcuggcccuacaucgccagcagaaccagcaucaccggcagagccugggagaacaccgugguggaccuggagagcgacggcaagccccagaaggccgacagcaacaacagcagcaagagccugcagagcgccggcuucaccgccggccugaccuacagccagcugaugacccugaaggacgccaugcugcagcuggaccccaacgccaagaccuggauggacaucgagggcagacccgaggaccccguggagaucgcccuguaccagcccagcagcggcugcuacauccacuucuucagagagcccaccgaccugaagcaguucaagcaggacgccaaguacagccacggcaucgacgugaccgaccuguucgccacccagcccggccugaccagcgccgugaucgacgcccugcccagaaacauggugaucaccugccagggcagcgacgacaucagaaagcugcuggagagccagggcagaaaggacaucaagcugaucgacaucgcccugagcaagaccgacagcagaaaguacgagaacgccgugugggaccaguacaaggaccugugccacaugcacaccggcguggugguggagaagaagaagagaggcggcaaggaggagaucaccccccacugcgcccugauggacugcaucauguucgacgccgccgugagcggcggccugaacaccagcgugcugagagccgugcugcccagagacaugguguucagaaccagcacccccagaguggugcugugaggacuagucccuguucccagagcccacuuuuuuuucuuuuuuugaaauaaaauagccugucuuucagaucuaaaaaaaaaaaaaaaaaaaaaaaaaaaaaaaaaaaaaaaaaaaaaaaaaaaaaaaaaaaaaaaaaaaaaaaaaaaaaaaaaaaaaaaaaaaaaaaaaaaa

SEQ ID NO: 18649 - RNA, 2040 nt, Artificial Sequence
  mRNA product Design a-2 (A100) comprising derived and/or modified sequence from LASV(LP;Clade I)__AAF86702__SP-HsPLAT_NP(2-569) (opt4)
aggagaguccgcucagccagguugcagaagcggcuuagcguguguccuaaucuucucucugcguguagguaggccugugccgcaaacaagcuuaccauggacgccaugaagagaggccugugcugcgugcugcugcugugcggcgccguguucgugagccccagcaacagcaaggagaucaagagcuuccuguggacccagagccugagaagagagcugagcggcuacugcagcaacaucaagcugcagguggugaaggacgcccaggcccugcugcacggccuggacuucagcgaggugagcaacgugcagagacugaugagaaagcagaagagagacgacgccgaccugaagagacugagagaccugaaccaggccgugaacaaccugguggagcugaagagcacccagcagaagaacgugcugagagugggcacccugagcagcgacgaccugaucacccuggccgccgaccuggagaagcugaagagcaaggugaucagaaccgagagaccccugagcagcggcguguacaugggcaaccugagcagccagcagcuggaccagagaagagcccugcugagcaugaucggcaugagcggcggcccccagggcaacagaaccggcggcgacggcguggugagagugugggacgugaagaacgccgagcugcugaacaaccaguucggcaccaugcccagccugacccuggccugccugaccaagcagggccagguggaccugaacgacgccgugcaggcccugaccgaccugggccugaucuacaccgccaaguaccccaacagcagcgaccuggacaugcugacccagagccaccccauccugggcaugguggacaccaagaagagcagccugaacaucagcggcuacaacuucagccugggcgccgccgugaaggccggcgccugcaugcuggacggcggcaacaugcuggagaccaucaaggugagcccccagaccauggacggcauccugaagagcauccugaaggugaagagaagccugggcauguucaucagcgacacccccggcgagagaaaccccuacgagaacauccuguacaagaucugccugagcggcgagggcuggcccuacaucgccagcagaaccagcaucaccggcagagccugggagaacacccugguggaccuggagagcgacaacaagccccccaagcugaacagcgccggcagcaacaagagccugcaggccgccggccugaacgccggccugaccuacagccagcugaugacccugaaggacugcaugcugcagcuggaccccagcagcaagaccuggaucgacaucgagggcagacccgaggaccccguggagaucgcccuguuccagcccagcagcggcugcuacauccacuucuucagagagcccaccgaccugaagcaguucaagcaggacgccaaguacagccacggcaucgacgugaccgaccuguucagcacccagcccggccugaccagcgccgugaucgaggcccugcccagaaacauggugcugaccugccagggcagcgacgacaucaagaagcugcuggagagccagggcagaagagacaucaagcugaucgacaucagccugagcaaggccgacagcagaaaguucgagaacgccgugugggaccaguacaaggaccugugccacaugcacaccggcguggugguggagaagaagaagagaggcggcaaggaggagaucaccccccacugcgcccugcuggacugcaucauguucgacgccgccaccaccggcagccugaacaucaccacccugagagccgugcugcccagagacaugguguucagaaccagcacccccaagguggugcugugaggacuagucccuguucccagagcccacuuuuuuuucuuuuuuugaaauaaaauagccugucuuucagaucuaaaaaaaaaaaaaaaaaaaaaaaaaaaaaaaaaaaaaaaaaaaaaaaaaaaaaaaaaaaaaaaaaaaaaaaaaaaaaaaaaaaaaaaaaaaaaaaaaaaa

SEQ ID NO: 18650 - RNA, 2040 nt, Artificial Sequence
  mRNA product Design a-2 (A100) comprising derived and/or modified sequence from LASV(803213;Clade II)__AAF86704__SP-HsPLAT_NP(2-569) (opt4)
aggagaguccgcucagccagguugcagaagcggcuuagcguguguccuaaucuucucucugcguguagguaggccugugccgcaaacaagcuuaccauggacgccaugaagagaggccugugcugcgugcugcugcugugcggcgccguguucgugagccccagcgccagcaaggaggugaagagcuuccuguggacccagagccugagaagagagcugagcggcuacugcagcaacaucaagcugcagguggugaaggacgcccaggcccugcugcacggccuggacuucagcgaggugaacaacgugcagagacugaugagaaagcagaagagagacgacggcgaccugaagagacugagagaccugaaccaggccgugaacaaccugguggagcugaagagcacccagcagaagagcauccugagagugggcacccugaccagcgacgaccugcugacccuggccgccgaccuggagaagcugaagagcaaggugaucagaaccgagagaccccugagcagcggcguguacaugggcaaccugagcacccagcagcuggagcagagaagagcccugcugaacaugaucggcauggugggcggcgcccagggcacccagcccggcagagacggcguggugagagugugggacgugaagaaccccgaccugcugaacaaccaguucggcaccaugcccagccugacccuggccugccugaccaagcagggccagguggaccugaacgacgccgugcuggcccugaccgaccugggccugaucuacaccgccaaguaccccaacagcagcgaccuggacagacugagccagagccaccccauccugaacaugguggacaccaagaagagcagccugaacaucagcggcuacaacuucagccugggcgccgccgugaaggccggcgccugcaugcuggacggcggcaacaugcuggagaccaucaaggugaccccccagaccauggacggcauccugaagagcauccugaaggugaagagaagccugggcauguucgugagcgacacccccggcgagagaaaccccuacgagaacauccuguacaagaucugccugagcggcgacggcuggcccuacaucgccagcagaaccagcaucgugggcagagccugggagaacaccaccguggaccuggagagcgacggcaagccccagaaggugggcaccgccggcagcaacaagagccugcagagcgccggcuuccccaccggccugaccuacagccagcugaugacccugaaggacagcaugaugcagcuggaccccagcgccaagaccuggaucgacaucgagggcagacccgaggaccccguggagaucgcccuguaccagcccaugagcggcugcuacauccacuucuucagagagcccaccgaccugaagcaguucaagcaggacgccaaguacagccacggcaucgacguggccgaccuguuccccgcccagcccggccugaccagcgccgugaucgaggcccugcccagaaacauggugcugaccugccagggcagcgacgacaucaagaagcugcuggacagccagggcagaagagacaucaagcugaucgacaucagccugagcaagguggacagcagaaaguucgagaacgccgugugggaccagugcaaggaccugugccacaugcacaccggcguggugguggagaagaagaagagaggcggcaaggaggagaucaccccccacugcgcccugauggacugcaucauguucgacgccgccgugagcggcggccugaacauccccgugcugagagccgugcugcccagagacaugguguucagaaccagcagccccaagguggugcugugaggacuagucccuguucccagagcccacuuuuuuuucuuuuuuugaaauaaaauagccugucuuucagaucuaaaaaaaaaaaaaaaaaaaaaaaaaaaaaaaaaaaaaaaaaaaaaaaaaaaaaaaaaaaaaaaaaaaaaaaaaaaaaaaaaaaaaaaaaaaaaaaaaaaa

SEQ ID NO: 18651 - RNA, 2043 nt, Artificial Sequence
  mRNA product Design a-2 (A100) comprising derived and/or modified sequence from LASV(GA391;Clade III)__CAA36646__SP-HsPLAT_NP(2-570) (opt4)
aggagaguccgcucagccagguugcagaagcggcuuagcguguguccuaaucuucucucugcguguagguaggccugugccgcaaacaagcuuaccauggacgccaugaagagaggccugugcugcgugcugcugcugugcggcgccguguucgugagccccagcgccagcaaggaggugagaagcuuccuguggacccagagccugagaagagagcugagcggcuacugcagcaacaucaagcugcagguggugaaggacgcccaggcccugcugcacggccuggacuucagcgaggugagcaacgugcagagacugaugagaaagcagaagagagacgacggcgaccugaagagacugagagaccugaaccaggccgugaacaaccugguggagcugaagagcacccagcagaagagcgugcugagagugggcacccugagcagcgacgaccugcugauccuggccgccgaccuggagaagcugaagagcaaggugaccagaaccgagagaccccugagcagcggcguguacaugggcaaccugagcagccagcagcuggaccagagaagagcccugcugaacaugaucggcaugaccggcgugagcggcggcggcaagggcgccagcgacggcaucgugagagugugggacgugaagaacgccgagcugcugaacaaccaguucggcaccaugcccagccugacccuggccugccugaccaagcagggccagguggaccugaacgacgccgugcaggcccugaccgaccugggccugaucuacaccgccaaguaccccaacagcagcgaccuggacagacugagccagagccaccccauccugaacaugaucgacaccaagaagagcagccugaacaucagcggcuacaacuucagccugggcgccgccgugaaggccggcgccugcaugcuggacggcggcaacaugcuggagaccaucaaggugagcccccagaccauggacggcauccugaagagcauccugaaggugaagaagagccugggcauguucgugagcgacacccccggcgagagaaaccccuacgagaacauccuguacaagaucugccugagcggcgacggcuggcccuacaucgccagcagaaccagcaucgugggcagagccugggagaacaccgugguggaccuggagcaggacaacaagccccagaagaucggcaacggcggcagcaacaagagccugcagagcgccggcuucgccgccggccugaccuacagccagcugaugacccugaaggacuucaagugcuucaaccugauccccaacgccaagaccuggauggacaucgagggcagacccgaggaccccguggagaucgcccuguaccagcccagcagcggcugcuacgugcacuucuucagagagcccaccgaccugaagcaguucaagcaggacgccaaguacagccacggcaucgacgugaccgaccuguucgccgcccagcccggccugaccagcgccgugaucgaggcccugcccagaaacauggugaucaccugccagggcagcgaggacaucagaaagcugcuggagagccagggcagaagagacaucaagcugaucgacaucacccugagcaaggccgacagcagaaaguucgagaacgccgugugggaccaguucaaggaccugugccacaugcacaccggcguggugguggagaagaagaagagaggcggcaaggaggagaucaccccccacugcgcccugauggacugcaucauguucgacgccgccgugagcggcggccuggacgccaaggugcugagaguggugcugcccagagacaugguguucagaaccagcacccccaagguggugcugugaggacuagucccuguucccagagcccacuuuuuuuucuuuuuuugaaauaaaauagccugucuuucagaucuaaaaaaaaaaaaaaaaaaaaaaaaaaaaaaaaaaaaaaaaaaaaaaaaaaaaaaaaaaaaaaaaaaaaaaaaaaaaaaaaaaaaaaaaaaaaaaaaaaaa

SEQ ID NO: 18652 - RNA, 2040 nt, Artificial Sequence
  mRNA product Design a-2 (A100) comprising derived and/or modified sequence from LASV(AV;Clade V)__CCA30315__SP-HsPLAT_NP(2-569) (opt4)
aggagaguccgcucagccagguugcagaagcggcuuagcguguguccuaaucuucucucugcguguagguaggccugugccgcaaacaagcuuaccauggacgccaugaagagaggccugugcugcgugcugcugcugugcggcgccguguucgugagccccagcgccagcaaggaggugaagagcuuccuguggacccagagccugagaagagagcugagcggcuacugcagcaacaucaagcugcagguggugaaggacgcccaggcccugcugcacggccuggacuucagcgaggugagcaacgugcagagacugaugagaaagcagagaagagacgacagcgaccugaagagacugagagaccugaaccaggccgugaacaaccugguggagcugaagagcacccagcagaagagcgugcugagagugggcacccugagcagcgacgaccugcugacccuggccgccgaccuggagaagcugaagagcaaggugaccagaaccgagagaccccugagcagcggcguguacaugggcaaccugagcagccagcagcuggaccagagaagagcccugcugaaccugaucggcaugaccaacggcagccagggcagccaggccggcagagacggcguggugagagugugggacgugaagaacgccgagcugcugaacaaccaguucggcaccaugcccagccugacccuggccugccugaccaagcagggccagguggaccugaacgacguggugcaggcccugaccgaccugggccugaucuacaccgccaaguaccccaacaccagcgaccuggacagacugacccagagccaccccauccugaacaugaucgacaccaagaagagcagccugaacaucagcggcuacaacuucagccugggcgccgccgugaaggccggcgccugcaugcuggacggcggcaacaugcuggagaccaucaaggugagcccccagagcauggacggcauccugaagagcauccugaaggugaagagagcccugggcauguucgugagcgacacccccggcgagagaaaccccuacgagaacauccuguacaagaucugccugagcggcgacggcuggcccuacaucgccagcagaaccagcaucgugggcagagccugggagaacaccgugguggaccuggagaccgacggcaagccccagaagaucggcagcggcaacagcaacaagagccugcagagcgccggcuucagcgccggccugaccuacagccagcugaugacccugaaggacgccaugcugcagcuggaccccaacgccaagaccuggauggacaucgagggcagacccgaggaccccguggagguggcccuguaccagcccaucagcggcugcuacauccacuucuucagagagcccaccgaccugaagcaguucaagcaggacgccaaguacagccacggcaucgacaucgccgaccuguucgccgcccagcccggccugaccagcgccgugaucgaggcccugcccagaaacauggugaucaccugccagggcagcgaggacaucaagaagcugcuggagagccagggcagaaaggacaucaagcugaucgacaucgcccugagcaagaucgacagcagaaaguucgagaacgccgugugggaccaguacaaggaccugugccacaugcacaccggcguggugguggagaagaagaagagaggcggcaaggaggagaucaccccccacugcgcccugauggacugcaucauguucgacgccgccgugagcggcggccugaacacccuggugcugagagccgugcugcccagagacaugguguucagaaccagcacccccagaguggugcugugaggacuagucccuguucccagagcccacuuuuuuuucuuuuuuugaaauaaaauagccugucuuucagaucuaaaaaaaaaaaaaaaaaaaaaaaaaaaaaaaaaaaaaaaaaaaaaaaaaaaaaaaaaaaaaaaaaaaaaaaaaaaaaaaaaaaaaaaaaaaaaaaaaaaa

SEQ ID NO: 18653 - RNA, 2040 nt, Artificial Sequence
  mRNA product Design a-2 (A100) comprising derived and/or modified sequence from LASV(Togo/2016/7082;Clade VI)__AMR44578__SP-HsPLAT_NP(2-569) (opt4)
aggagaguccgcucagccagguugcagaagcggcuuagcguguguccuaaucuucucucugcguguagguaggccugugccgcaaacaagcuuaccauggacgccaugaagagaggccugugcugcgugcugcugcugugcggcgccguguucgugagccccagcaacagcaaggaggugaagagcuuccuguggacccagagccugagaagagagcugagcggcuacugcagcaacaucaagcugcagguggugaaggacgcccaggcccugcugcacggccuggacuucagcgaggugagcaacgugcagagacugaugagaaagcagaagagagacgacggcgaccugaagagacugagagaccugaaccaggccgugaacaaccugguggagcugaagagcgugcagcagaagagcauccugagagugggcacccugaccagcgacgaccugcugacccuggccgccgaccuggagaagcugaagagcaaggugaccagaaccgagagaccccugagcagcggcguguacaugggcaaccugagcagccagcagcuggaccagagaagagcccugcugagcaugaucggcaugagcggcggcaaccagaacagccagcccaagggcgacggcguggugagagugugggacgugaagaacgccgaccugcugaacaaccaguucggcaccaugcccagccugacccuggccugccugaccaagcagggccagguggaccugaacgacgccgugcaggcccugaccgaccugggccugaucuacaccgccaaguaccccaacagcagcgaccuggacagacugagccagagccaccccauccugaacaugaucgacaccaagaagagcagccugaacaucagcggcuacaacuucagccugggcgccgccaucaagaccggcgccugcaugcuggacggcggcaacaugcuggagaccaucaaggugaccccccagaccauggacggcauccugaagagcauccugaaggugaagagaagccugggcauguucaucagcgacacccccggcgagagaaaccccuacgagaacauccuguacaagaucugccugagcggcgacggcuggcccuacaucgccagcagaaccgccaucaucggcagagccugggagaacaccgugguggaccuggagagcgacagcaagccccagaagaucggcagcaacggcagcaacaagagccugcagagcgccggcuucgcccccggccugaccuacagccagcugaugacccugaaggacagcaugcugcagcuggaccccaacgccaagaccuggaucgacaucgagggcagacccgaggaccccguggagguggcccuguuccagcccaucagcggcugcuacauccacuucuucagagagcccaccgaccugaagcaguucaagcaggacgccaaguacagccacggcaucgacgugaccgaccuguucgccgcccagcccggccugaccagcgccgugaucgaggcccugcccagaaacauggugcugaccugccagggcagcgacgacaucaagaagcugcuggacagccagggcagaagagacaucaagcugaucgacgugagccugaacaagaucgacagcagaaaguucgagaacgccgugugggaccaguacaaggaccugugccacaugcacaccggcguggugguggagaagaagaagaagggcggcaaggaggagaucaccccccacugcgcccugcuggacugcaucauguucgacgccgccgugagcggcggccugaacgccaccgugcugagagccgugcugcccagagacaugguguucagaaccagcagccccaagguggugcugugaggacuagucccuguucccagagcccacuuuuuuuucuuuuuuugaaauaaaauagccugucuuucagaucuaaaaaaaaaaaaaaaaaaaaaaaaaaaaaaaaaaaaaaaaaaaaaaaaaaaaaaaaaaaaaaaaaaaaaaaaaaaaaaaaaaaaaaaaaaaaaaaaaaaa

SEQ ID NO: 18654 - RNA, 2040 nt, Artificial Sequence
  mRNA product Design a-2 (A100) comprising derived and/or modified sequence from LASV(KAK-428;Clade n.d. (VII))__ANH09741__SP-HsPLAT_NP(2-569) (opt4)
aggagaguccgcucagccagguugcagaagcggcuuagcguguguccuaaucuucucucugcguguagguaggccugugccgcaaacaagcuuaccauggacgccaugaagagaggccugugcugcgugcugcugcugugcggcgccguguucgugagccccagcaacagcaaggaggugaagagcuuccuguggacccagagccugagaagagagcugagcggcuacugcaccaacaucaagcugcagguggugaaggacgcccaggcccugcugcacggccuggacuucagcgaggugagcaacgugcagagacugaugagaaagcagaagagagacgacaacgaccugaagagacugagagaccugaaccaggccgugaacaaccugguggagcugaagagcgugcagcagaagagcgugcugaaggugggcacccugaacagcgacgaccugcugacccuggccgccgaccuggagaagcugaagagcaagguggugagaaccgagagaccccugagcagcggcguguacaugggcaaccugagcagccagcagcuggaccagagaagagcccugcugaacaugaucggcauggccggcggcagccagggcaaccagcccagcagagacggcguggugagagugugggacgugaagaacgccgaccugcugaacaaccaguucggcaccaugcccagccugacccuggccugccugaccaagcagggccagguggaccugaacgacguggugcuggcccugaccgaccugggccugaucuacaccgccaaguaccccaacagcagcgaccuggacagacugagccagaaccaccccgugcugaacaugaucgacgugaacaagagcagccugaacaucagcggcuacaacuucagccugggcgccgccgugaaggccggcgccugcaugcuggacggcggcaacaugcuggagaccaucaagaucagcccccagaccguggacggcauccugaagagcauccugaaggugaagagagcccugggcauguucgugagcgacacccccggcgagagaaaccccuacgagaacauccuguacaaggugugccugagcggcaacggcuggcccuacaucgccagcagaaccagcaucgugggcagagccugggagaacaccgugguggaccuggagagcaacaagaaccagcccaaggugggcaacaacggcagcaacaagaugcugcagagcagcggcuucgccaccggccugaccuacagccagcugaugacccugagagacagcaugcugcagcuggaccccaccgccaagaccuggaucgacaucgagggcagacccgaggaccccguggagcuggcccuguuccagcccagcagcggcugcuacauccacuucuucagagagcccaccgaccugaagcaguucaagcaggacgccaaguacagccacggcaucgacgugaacgaccuguucagcgcccagcccggccugaccagcgccgugcuggaggcccugcccagaaacauggugcugaccugccagggcagcgacgacaucagaaagcugcuggacagccaggacagaaaggacaucaagcugaucgacaucagccugagcaaggccgacgccagaaaguucgagaacgacgugugggaccaguucaaggaccugugccacaugcacaccggcaucgugguggagaagaagaagaagggcggcaagcaggagaugaccccccacugcgcccugcuggacugcaucauguucgacgccgccgugagcggcggccugaacgugcccacccugagagccgugcugcccaccgacaugguguucagaaccaucaccaccaagguggugcugugaggacuagucccuguucccagagcccacuuuuuuuucuuuuuuugaaauaaaauagccugucuuucagaucuaaaaaaaaaaaaaaaaaaaaaaaaaaaaaaaaaaaaaaaaaaaaaaaaaaaaaaaaaaaaaaaaaaaaaaaaaaaaaaaaaaaaaaaaaaaaaaaaaaaa

SEQ ID NO: 18655 - RNA, 2040 nt, Artificial Sequence; identical to SEQ ID NO: 18649
  mRNA product Design a-2 (A100) comprising derived and/or modified sequence from LASV(Pinneo-NIG-1969;Clade I)__AIT17837__SP-HsPLAT_NP(2-569) (opt4)

SEQ ID NO: 18656 - RNA, 2040 nt, Artificial Sequence
  mRNA product Design a-2 (A100) comprising derived and/or modified sequence from LASV(ISTH0009-NIG-2011;Clade II)__AIT17405__SP-HsPLAT_NP(2-569) (opt4)
aggagaguccgcucagccagguugcagaagcggcuuagcguguguccuaaucuucucucugcguguagguaggccugugccgcaaacaagcuuaccauggacgccaugaagagaggccugugcugcgugcugcugcugugcggcgccguguucgugagccccagcgugagcaaggaggugaagagcuuccuguggacccagagccugagaagagagcugagcggcuacugcagcaacaucaagcugcagguggugaaggacgcccaggcccugcugcacggccuggacuucagcgaggugagcaacgugcagagacugaugagaaagcagaagagagacgacagcgaccugaagagacugagagaccugaaccaggccgugaacaaccugguggagcugaagagcacccagcagaagagcauccugagagugggcacccugaccagcgacgaccugcugacccuggccgccgaccuggagaagcugaagagcaaggugaucagaaccgagagaccccugagcagcggcguguacaugggcaaccugagcacccagcagcuggagcagagaagagcccugcugaacaugaucggcauggugggcggcgcccagggcacccagcccggcagagacggcguggugagagugugggacgugaagaaccccgaccugcugaacaaccaguucggcaccaugcccagccugacccuggccugccugaccaagcagggccagguggaccugaacgacgccgugcuggcccugaccgaccugggccugaucuacaccgccaaguaccccaacagcagcgaccuggacagacugagccagagccaccccauccugaacaugguggacaucaagaagagcagccugaacaucagcggcuacaacuucagccugggcgccgccgugaaggccggcgccugcaugcuggacggcggcaacaugcuggagaccaucaaggugaccccccagaccauggacggcauccugaagagcauccugaaggugaagagaagccugggcauguucgugagcgacacccccggcgagagaaaccccuacgagaacauccuguacaagaucugccugagcggcgacggcuggcccuacaucgccagcagaaccagcaucgugggcagagccugggagaacaccaccguggaccuggagagcgacggcaagccccagaaggugggcagcgccggcagcaacaagagccugcagagcgccggcuuccccaccggccugaccuacagccagcugaugacccugaaggacagcaugaugcagcuggaccccagcgccaagaccuggaucgacaucgagggcagacccgaggaccccguggagaucgcccuguaccagcccaugagcggcugcuacauccacuucuucagagagcccaccgaccugaagcaguucaagcaggacgccaaguacagccacggcaucgacguggccgaccuguuccccgcccagcccggccugaccagcgccgugaucgaggcccugcccagaaacauggugcugaccugccagggcagcgacgacaucaagagacugcuggacagccagggcagaagagacaucaagcugaucgacaucgcccugagcaaggccgacagcagaagauucgagaacgccgugugggaccagugcaaggaccugugccacaugcacaccggcguggugguggagaagaagaagagaggcggcaaggaggagaucaccccccacugcgcccugauggacugcaucauguacgacgccgccgugagcggcggccugaacauccccgugcugagagccgugcugcccagagacaugguguucagaaccagcagccccaagguggugcugugaggacuagucccuguucccagagcccacuuuuuuuucuuuuuuugaaauaaaauagccugucuuucagaucuaaaaaaaaaaaaaaaaaaaaaaaaaaaaaaaaaaaaaaaaaaaaaaaaaaaaaaaaaaaaaaaaaaaaaaaaaaaaaaaaaaaaaaaaaaaaaaaaaaaa

SEQ ID NO: 18657 - RNA, 2040 nt, Artificial Sequence
  mRNA product Design a-2 (A100) comprising derived and/or modified sequence from LASV(ISTH2010-NIG-2012;Clade II)__AIT17483__SP-HsPLAT_NP(2-569) (opt4)
aggagaguccgcucagccagguugcagaagcggcuuagcguguguccuaaucuucucucugcguguagguaggccugugccgcaaacaagcuuaccauggacgccaugaagagaggccugugcugcgugcugcugcugugcggcgccguguucgugagccccagcgccagcaaggaggugaagagcuuccuguggacccagagccugagaagagagcugagcggcuacugcagcaacaucaagcugcagguggugaaggacgcccaggcccugcugcacggccuggacuucagcgaggugagcaacgugcagagacugaugagaaagcagaagagagacgacagcgaccugaagagacugagagaccugaaccaggccgugaacaaccugguggagcugaagagcacccagcagaagagcauccugagagugggcacccugaccagcgacgaccugcugacccuggccgccgaccuggagaagcugaagagcaaggugaucagaaccgagagaccccugagcagcggcguguacaugggcaaccugagcacccagcagcuggagcagagaagagcccugcugaaccugaucggcauggugggcggcgcccagggcacccagcccggcagagacggcguggugagagugugggacgugaagaaccccgaccugcugaacaaccaguucggcaccaugcccagccugacccuggccugccugaccaagcagggccagguggaccugaacgacgccgugcuggcccugaccgaccugggccugaucuacaccgccaaguaccccaacagcagcgaccuggacagacugagccagagccaccccauccugaacaugguggacaccaagaagagcagccugaacaucagcggcuucaacuucagccugggcgccgccgugaaggccggcgccugcaugcuggacggcggcaacaugcuggagaccaucaaggugaccccccagaccauggacggcauccugaagagcauccugaaggugaagaagagccugggcauguucgugagcgacacccccggcgagagaaaccccuacgagaacauccuguacaagaucugccugagcggcgacggcuggcccuacaucgccagcagaaccagcaucgugggcagagccugggagaacaccaccguggaccuggagagcgacggcaagccccacaaggugggcaccgccggcagcaacaagagccugcagagcgccggcuuccccaccggccugaccuacagccagcugaugacccugaaggacagcaugaugcagcuggaccccagcgccaagaccuggaucgacaucgagggcagacccgaggaccccguggagaucgcccuguaccagcccaugagcggcugcuacauccacuucuucagagagcccaccgaccugaagcaguucaagcaggacgccaaguacagccacggcaucgacguggccgaccuguuccccgcccagcccggccugaccagcgccgugaucgaggcccugcccagaaacauggugcugaccugccagggcagcgacgacaucaagagacugcuggacagccagggcagaagagacaucaagcugaucgacaucgcccugagcaaggccgacagcagaagauucgagaacgccgugugggaccagugcaaggaccugugccacaugcacaccggcguggugguggagaagaagaagagaggcggcaaggaggagaucaccccccacugcgcccugauggacugcaucauguacgacgccgccgugagcggcggccugaacauccccgugcugagagccgugcugcccagagacaugguguucagaaccagcagccccaagguggugcugugaggacuagucccuguucccagagcccacuuuuuuuucuuuuuuugaaauaaaauagccugucuuucagaucuaaaaaaaaaaaaaaaaaaaaaaaaaaaaaaaaaaaaaaaaaaaaaaaaaaaaaaaaaaaaaaaaaaaaaaaaaaaaaaaaaaaaaaaaaaaaaaaaaaaa

SEQ ID NO: 18658 - RNA, 2040 nt, Artificial Sequence
  mRNA product Design a-2 (A100) comprising derived and/or modified sequence from LASV(Lassa virus/H.sapiens-wt/NGA/2015/ISTH_0543;Clade II)__AVO03640__SP-HsPLAT_NP(2-569) (opt4)
aggagaguccgcucagccagguugcagaagcggcuuagcguguguccuaaucuucucucugcguguagguaggccugugccgcaaacaagcuuaccauggacgccaugaagagaggccugugcugcgugcugcugcugugcggcgccguguucgugagccccagcgccagcaaggaggugaagagcuuccuguggacccagagccugagaagagagcugagcggcuacugcagcaacaucaagcugcagguggugaaggacgcccaggcccugcugcacggccuggacuucagcgaggugagcaacgugcagagacugaugagaaagcagaagagagacgacagcgaccugaagagacugagagaccugaaccaggccgugaacaaccugguggagcugaagagcacccagcagaagagcauccugagagugggcacccugaccagcgacgaccugcugacccuggccgccgaccuggagaagcugaagagcaaggugaucagaaccgagagaccccugagcagcggcguguacaugggcaaccugagcacccagcagcuggagcagagaagagcccugcugaacaugaucggcauggugggcggcgcccagggcacccagcccggcagagacggcguggugagagugugggacgugaagaaccccgaccugcugaacaaccaguucggcaccaugcccagccugacccuggccugccugaccaagcagggccagguggaccugaacgacgccgugcuggcccugaccgaccugggccugaucuacaccgccaaguaccccaacagcagcgaccuggacagacugagccagagccaccccauccugaacaugguggacaccaagaagagcagccugaacaucagcggcuacaacuucagccugggcgccgccgugaaggccggcgccugcaugcuggacggcggcaacaugcuggagaccaucaaggugaccccccagaccauggacggcauccugaagagcauccugaaggugaagaagagccugggcauguucgugagcgacacccccggcgagagaaaccccuacgagaacauccuguacaagaucugccugagcggcgacggcuggcccuacaucgccagcagaaccagcaucgugggcagagccugggagaacaccaccguggaccuggagagcgacggcaagccccagaaggugggcagcgccggcagcaacaagagccugcagagcgccggcuuccccaccggccugaccuacagccagcugaugacccugaaggacagcaugaugcagcuggaccccagcgccaagaccuggaucgacaucgagggcagacccgaggaccccguggagaucgcccuguaccagcccaugagcggcugcuacauccacuucuucagagagcccaccgaccugaagcaguucaagcaggacgccaaguacagccacggcaucgacguggccgaccuguuccccgcccagcccggccugaccagcgccgugaucgaggcccugcccagaaacauggugcugaccugccagggcagcgacgacaucaagagacugcuggacagccagggcagaaaggacaucaagcugaucgacaucgcccugagcaaggccgacagcagaagauucgagaacgccgugugggaccagugcaaggaccugugccacaugcacaccggcguggugguggagaagaagaagagaggcggcaaggaggagaucaccccccacugcgcccugauggacugcaucauguacgacgccgccgugagcggcggccugaacauccccgugcugagagccgugcugcccagagacaugguguucagaaccagcagccccaagguggugcugugaggacuagucccuguucccagagcccacuuuuuuuucuuuuuuugaaauaaaauagccugucuuucagaucuaaaaaaaaaaaaaaaaaaaaaaaaaaaaaaaaaaaaaaaaaaaaaaaaaaaaaaaaaaaaaaaaaaaaaaaaaaaaaaaaaaaaaaaaaaaaaaaaaaaa

SEQ ID NO: 18659 - RNA, 2040 nt, Artificial Sequence
  mRNA product Design a-2 (A100) comprising derived and/or modified sequence from LASV(Lassa virus/H.sapiens-wt/NGA/2016/ISTH_0009;Clade II)__AVO03572__SP-HsPLAT_NP(2-569) (opt4)
aggagaguccgcucagccagguugcagaagcggcuuagcguguguccuaaucuucucucugcguguagguaggccugugccgcaaacaagcuuaccauggacgccaugaagagaggccugugcugcgugcugcugcugugcggcgccguguucgugagccccagcgccagcaaggaggugaagagcuuccuguggacccagagccugagaagagagcugagcggcuacugcagcaacaucaagcugcagguggugaaggacgcccaggcccugcugcacggccuggacuucagcgaggugagcaacgugcagagacugaugagaaagcagaagagagacgacagcgaccugaagagacugagagaccugaaccaggccgugaacaaccugguggagcugaagagcacccagcagaagagcauccugagagugggcacccugaccagcgacgaccugcugacccuggccgccgaccuggagaagcugaagagcaaggugaucagaaccgagagaccccugagcagcggcguguacaugggcaaccugagcacccagcagcuggagcagagaagagcccugcugaacaugaucggcauggugggcggcgcccagggcacccagcccggcagagacggcguggugagagugugggacgugaagaaccccgaccugcugaacaaccaguucggcaccaugcccagccugacccuggccugccugaccaagcagggccagguggaccugaacgacgccgugcuggcccugaccgaccugggccugaucuacaccgccaaguaccccaacagcagcgaccuggacagacugagccagagccaccccauccugaacaugguggacaccaagaagagcagccugaacaucagcggcuacaacuucagccugggcgccgccgugaaggccggcgccugcaugcuggacggcggcaacaugcuggagaccaucaaggugaccccccagaccauggacggcauccugaagagcauccugaaggugaagaagagccugggcauguucgugagcgacacccccggcgagagaaaccccuacgagaacauccuguacaagaucugccugagcggcgacggcuggcccuacaucgccagcagaaccagcaucgugggcagagccugggagaacaccaccguggaccuggagagcgacggcaagccccagaaggugggcagcgccggcagcaacaagagccugcagagcgccggcuuccccaccggccugaccuacagccagcugaugacccugaaggacagcaugaugcagcuggaccccagcgccaagaccuggaucgacaucgagggcagacccgaggaccccguggagaucgcccuguaccagcccaugagcggcugcuacauccacuucuucagagagcccaccgaccugaagcaguucaagcaggacgccaaguacagccacggcaucgacguggccgaccuguuccccgcccagcccggccugaccagcgccgugaucgaggcccugcccagaaacauggugcugaccugccagggcagcgacgacaucaagagacugcuggacagccagggcagaagagacaucaagcugaucgacaucgcccugagcaaggccgacagcagaagauucgagaacgccgugugggaccagugcaaggaccugugccacaugcacaccggcguggugguggagaagaagaagagaggcggcaaggaggagaucaccccccacugcgcccugauggacugcaucauguacgacgccgccgugagcggcggccugaacauccccgugcugagagccgugcugcccagagacaugguguucagaaccagcagccccaagguggugcugugaggacuagucccuguucccagagcccacuuuuuuuucuuuuuuugaaauaaaauagccugucuuucagaucuaaaaaaaaaaaaaaaaaaaaaaaaaaaaaaaaaaaaaaaaaaaaaaaaaaaaaaaaaaaaaaaaaaaaaaaaaaaaaaaaaaaaaaaaaaaaaaaaaaaa

SEQ ID NO: 18660 - RNA, 2040 nt, Artificial Sequence
  mRNA product Design a-2 (A100) comprising derived and/or modified sequence from LASV(Lassa virus/H.sapiens-wt/NGA/2016/ISTH_0017;Clade II)__AVO03568__SP-HsPLAT_NP(2-569) (opt4)
aggagaguccgcucagccagguugcagaagcggcuuagcguguguccuaaucuucucucugcguguagguaggccugugccgcaaacaagcuuaccauggacgccaugaagagaggccugugcugcgugcugcugcugugcggcgccguguucgugagccccagcgccagcaaggaggugaagagcuuccuguggacccagagccugagaagagagcugagcggcuacugcagcagcaucaagcugcagguggugaaggacgcccaggcccugcugcacggccuggacuucagcgaggugagcaacgugcagagacugaugagaaagcagaagagagacgacagcgaccugaagagacugagagaccugaaccaggccgugaacaaccugguggagcugaagagcacccagcagaagagcauccugagagugggcacccugaccagcgacgaccugcugacccuggccgccgaccuggagaagcugaagagcaaggugaucagaaccgagagaccccugagcagcggcguguacaugggcaaccugagcacccagcagcuggagcagagaagagcccugcugaacaugaucggcauggccggcggcgcccagggcacccagcccggcagagacggcguggugagagugugggacgugaagaaccccgaccugcugaacaaccaguucggcaccaugcccagccugacccuggccugccugaccaagcagggccagguggaccugaacgacgccgugcuggcccugaccgaccugggccugaucuacaccgccaaguaccccaacagcagcgaccuggacagacugagccagagccaccccauccugaacaugguggacaccaagaagagcagccugaacaucagcggcuacaacuucagccugggcgccgccgugaaggccggcgccugcaugcuggacggcggcaacaugcuggagaccaucaaggugaccccccagaccauggacggcauccugaagagcauccugaaggugaagagaagccugggcauguucgugagcgacgcccccggcgagagaaaccccuacgagaacauccuguacaagaucugccugagcggcgacggcuggcccuacaucgccagcagaaccagcaucgugggcagagccugggagaacaccaccguggaccuggagagcgacggcaagccccagaaggugggcgccaccggcagcaacaagagccugcagagcgccggcuuccccaccggccugaccuacagccagcugaugacccugaaggacagcaugaugcagcuggaccccagcgccaagaccuggaucgacaucgagggcagacccgaggaccccguggagguggcccuguaccagcccgugagcggcugcuacauccacuucuucagagagcccaccgaccugaagcaguucaagcaggacgccaaguacagccacggcaucgacguggccgaccuguuccccgcccagcccggccugaccagcgccgugaucgaggcccugcccagaaacauggugcugaccugccagggcagcgacgacaucaagaagcugcuggacagccagggcagaaaggacaucaagcugaucgacaucgcccugagcaaggccgacagcagaagauucgagaacgccgugugggaccagugcaaggaccugugccacaugcacaccggcguggugguggagaagaagaagagaggcggcaaggaggagaucaccccccacugcgcccugauggacugcaucauguacgacgccgccgugagcggcggccugaacauccccgugcugagagccgugcugcccagagacaugguguucagaaccagcagccccaagguggugcugugaggacuagucccuguucccagagcccacuuuuuuuucuuuuuuugaaauaaaauagccugucuuucagaucuaaaaaaaaaaaaaaaaaaaaaaaaaaaaaaaaaaaaaaaaaaaaaaaaaaaaaaaaaaaaaaaaaaaaaaaaaaaaaaaaaaaaaaaaaaaaaaaaaaaa

SEQ ID NO: 18661 - RNA, 2040 nt, Artificial Sequence
  mRNA product Design a-2 (A100) comprising derived and/or modified sequence from LASV(Lassa virus/H.sapiens-wt/NGA/2018/ISTH_0959;Clade II)__AVV65100__SP-HsPLAT_NP(2-569) (opt4)
aggagaguccgcucagccagguugcagaagcggcuuagcguguguccuaaucuucucucugcguguagguaggccugugccgcaaacaagcuuaccauggacgccaugaagagaggccugugcugcgugcugcugcugugcggcgccguguucgugagccccagcgccagcaaggaggugaagagcuuccuguggacccagagccugagaagagagcugagcggcuacugcagcaacaucaagcugcagguggugaaggacgcccaggcccugcugcacggccuggacuucagcgaggugagcaacgugcagagacugaugagaaagcagaagagagacgacagcgaccugaagagacugagagaccugaaccaggccgugaacaaccugguggagcugaagagcacccagcagaagagcauccugagagugggcacccugaccagcgacgaccugcugacccuggccgccgaccuggagaagcugaagagcaaggugaucagaaccgagagaccccugagcagcggcguguacaugggcaaccugagcacccagcagcuggagcagagaagagcccugcugaaccugaucggcauggugggcggcgcccagggcacccagcccggcagagacggcguggugagagugugggacgugaagaaccccgaccugcugaacaaccaguucggcaccaugcccagccugacccuggccugccugaccaagcagggccagguggaccugaacgacguggugcuggcccugaccgaccugggccugaucuacaccgccaaguaccccaacagcagcgaccuggacagacugagccagagccaccccauccugaacaugguggacaccaagaagagcagccugaacaucagcggcuucaacuucagccugggcgccgccgugaaggccggcgccugcaugcuggacggcggcaacaugcuggagaccaucaaggugaccccccagaccauggacggcauccugaagagcauccugaaggugaagaagagccugggcauguucgugagcgacacccccggcgagagaaaccccuacgagaacauccuguacaagaucugccugagcggcgacggcuggcccuacaucgccagcagaaccagcaucgugggcagagccugggagaacaccaccguggaccuggagagcgacggcaagccccacaaggugggcaccgccggcagcaacaagagccugcagagcgccggcuuccccaccggccugaccuacagccagcugaugacccugaaggacagcaugaugcagcuggaccccagcgccaagaccuggaucgacaucgagggcagacccgaggaccccguggagaucgcccuguaccagcccaugagcggcugcuacauccacuucuucagagagcccaccgaccugaagcaguucaagcaggacgccaaguacagccacggcaucgacguggccgaccuguuccccgcccagcccggccugaccagcgccgugaucgaggcccugcccagaaacauggugcugaccugccagggcagcgacgacaucaagagacugcuggacagccagggcagaaaggacaucaagcugaucgacaucgcccugagcaagaccgacagcagaagauucgagaacgccgugugggaccagugcaaggaccugugccacaugcacaccggcguggugguggagaagaagaagagaggcggcaaggaggagaucaccccccacugcgcccugauggacugcaucauguacgacgccgccgugagcggcggccugaacauccccgugcugagagccgugcugcccagagacaugguguucagaaccagcagccccaagguggugcugugaggacuagucccuguucccagagcccacuuuuuuuucuuuuuuugaaauaaaauagccugucuuucagaucuaaaaaaaaaaaaaaaaaaaaaaaaaaaaaaaaaaaaaaaaaaaaaaaaaaaaaaaaaaaaaaaaaaaaaaaaaaaaaaaaaaaaaaaaaaaaaaaaaaaa

SEQ ID NO: 18662 - RNA, 2040 nt, Artificial Sequence
  mRNA product Design a-2 (A100) comprising derived and/or modified sequence from LASV(LASV003-NIG-2008;Clade II)__AIT17581__SP-HsPLAT_NP(2-569) (opt4)
aggagaguccgcucagccagguugcagaagcggcuuagcguguguccuaaucuucucucugcguguagguaggccugugccgcaaacaagcuuaccauggacgccaugaagagaggccugugcugcgugcugcugcugugcggcgccguguucgugagccccagcgccagcaaggaggugaagagcuuccuguggacccagagccugagaagagagcugagcggcuacugcagcagcaucaagcugcagguggugaaggacgcccaggcccugcugcacggccuggacuucagcgaggugagcaacgugcagagacugaugagaaagcagaagagagacgacagcgaccugaagagacugagagaccugaaccaggccgugaacaaccugguggagcugaagagcacccagcagaagagcgugcugagagugggcacccugaccagcgacgaccugcugacccuggccgccgaccuggagaagcugaagagcaaggugaucagaaccgagagaccccugagcagcggcguguacaugggcaaccugagcgcccagcagcuggagcagagaagaacccugcugaacaugaucggcauggugggcggcgcccagggcacccagcccggcagagacggcguggugagagugugggacgugaagaaccccgaccugcugaacaaccaguucggcaccaugcccagccugacccuggccugccugaccaagcagggccagguggaccugaacgacguggugcuggcccugaccgaccugggccugaucuacaccgccaaguaccccaacagcagcgaccuggacagacugagccagagccaccccauccugagcaugguggacaccaagaagagcagccugaacaucagcggcuacaacuucagccugggcgccgccgugaaggccggcgccugcaugcuggacggcggcaacaugcuggagaccaucaaggugaccccccagaccauggacggcauccugaagagcauccugaaggugaagaagagccugggcauguucgugagcgacacccccggcgagagaaaccccuacgagaacauccuguacaagaucugccugagcggcgacggcuggcccuacaucgccagcagaaccagcaucgugggcagagccugggagaacaccaccguggaccuggagagcgacggcaagccccagaaggugggcaccgccggcagcaacaagagccugcagagcgccggcuuccccaccggccugaccuacagccagcugaugacccugaaggacagcaugaugcagcuggaccccagcgccaagaccuggaucgacaucgagggcagacccgaggaccccguggagaucgcccuguaccagcccaugagcggcugcuacauccacuucuucagagagcccaccgaccugaagcaguucaagcaggacgccaaguacagccacggcaucgacgugaccgaccuguuccccgcccagcccggccugaccagcgccgugaucgaggcccugcccagaaacauggugcugaccugccagggcagcgacgacaucaagagacugcuggacagccagggcagaagagacaucaagcugaucgacaucgcccugagcaaggccgacagcagaagauucgagaacgccgugugggaccagugcaaggaccugugccacaugcacaccggcguggugguggagaagaagaagagaggcggcaaggaggagaucaccccccacugcgcccugauggacugcaucauguacgacgccgccgugagcggcggccugaacauccccgugcugagagccgugcugcccagagacaugguguucagaaccagcagccccaagguggugcugugaggacuagucccuguucccagagcccacuuuuuuuucuuuuuuugaaauaaaauagccugucuuucagaucuaaaaaaaaaaaaaaaaaaaaaaaaaaaaaaaaaaaaaaaaaaaaaaaaaaaaaaaaaaaaaaaaaaaaaaaaaaaaaaaaaaaaaaaaaaaaaaaaaaaa

SEQ ID NO: 18663 - RNA, 2040 nt, Artificial Sequence
  mRNA product Design a-2 (A100) comprising derived and/or modified sequence from LASV(LASV035-NIG-2009;Clade II)__AIT17589__SP-HsPLAT_NP(2-569) (opt4)
aggagaguccgcucagccagguugcagaagcggcuuagcguguguccuaaucuucucucugcguguagguaggccugugccgcaaacaagcuuaccauggacgccaugaagagaggccugugcugcgugcugcugcugugcggcgccguguucgugagccccagcgccagcaaggaggugaagagcuuccuguggacccagagccugagaagagagcugagcggcuacugcagcagcaucaagcugcagguggugaaggacgcccaggcccugcugcacggccuggacuucagcgaggugagcaacgugcagagacugaugagaaagcagaagagagacgacagcgaccugaagagacugagagaccugaaccaggccgugaacaaccugguggagcugaagagcacccagcagaagagcauccugagagugggcacccugaccagcgacgaccugcugacccuggccgccgaccuggagaagcugaagagcaaggugaucagaaccgagagaccccugagcagcggcguguacaugggcaaccugagcgcccagcagcuggagcagagaagagcccugcugaacaugaucggcauggugggcggcgcccagggcacccagcccggcagagacggcguggugagagugugggacgugaagaaccccgaccugcugaacaaccaguucggcaccaugcccagccugacccuggccugccugaccaagcagggccagguggaccugaacgacgccgugcuggcccugaccgaccugggccugaucuacaccgccaaguaccccaacagcagcgaccuggacagacugagccagagccaccccauccugaacaugguggacaccaagaagagcagccugaacaucagcggcuacaacuucagccugggcgccgccgugaaggccggcgccugcaugcuggacggcggcaacaugcuggagaccaucaaggugaccccccagaccauggacggcauccugaagagcauccugaaggugaagagaagccugggcauguucgugagcgacacccccggcgagagaaaccccuacgagaacauccuguacaagaucugccugagcggcgacggcuggcccuacaucgccagcagaaccagcaucgugggcagagccugggagaacaccaccguggaccuggagagcgacggcaagccccagaaggugggcaccaccggcagcaacaagagccugcagagcgccggcuuccccaccggccugaccuacagccagcugaugacccugaaggacagcaugaugcagcuggaccccagcgccaagaccuggaucgacaucgagggcagacccgaggaccccguggagaucgcccuguaccagcccaugagcggcugcuacauccacuucuucagagagcccaccgaccugaagcaguucaagcaggacgccaaguacagccacggcaucgacguggccgaccuguuccccgcccagcccggccugaccagcgccgugaucgaggcccugcccagaaacauggugcugaccugccagggcagcgacgacaucaagaagcugcuggacagccagggcagaagagacaucaagcugaucgacaucgcccugagcaaggccgacagcagaaaguucgagaacgccgugugggaccagugcaaggaccugugccacaugcacaccggcguggugguggagaagaagaagagaggcggcaaggaggagaucaccccccacugcgcccugauggacugcaucauguacgacgccgccgugagcggcggccugaacauccccgugcugagagccgugcugcccagagacaugguguucagaaccagcagccccaagguggugcugugaggacuagucccuguucccagagcccacuuuuuuuucuuuuuuugaaauaaaauagccugucuuucagaucuaaaaaaaaaaaaaaaaaaaaaaaaaaaaaaaaaaaaaaaaaaaaaaaaaaaaaaaaaaaaaaaaaaaaaaaaaaaaaaaaaaaaaaaaaaaaaaaaaaaa

SEQ ID NO: 18664 - RNA, 2040 nt, Artificial Sequence
  mRNA product Design a-2 (A100) comprising derived and/or modified sequence from LASV(LASV1000-NIG-2009;Clade II)__AIT17783__SP-HsPLAT_NP(2-569) (opt4)
aggagaguccgcucagccagguugcagaagcggcuuagcguguguccuaaucuucucucugcguguagguaggccugugccgcaaacaagcuuaccauggacgccaugaagagaggccugugcugcgugcugcugcugugcggcgccguguucgugagccccagcgccagcaaggaggugaagagcuuccuguggacccagagccugagaagagagcugagcggcuacugcagcaacaucaagcugcagguggugaaggacgcccaggcccugcugcacggccuggacuucagcgaggugagcaacgugcagagacugaugagaaagcagaagagagacgacagcgaccugaagagacugagagaccugaaccaggccgugaacaaccugguggagcugaagagcacccagcagaagagcauccugagagugggcacccugaccagcgacgaccugcugacccuggccgccgaccuggagaagcugaagagcaaggugaucagaaccgagagaccccugagcagcggcguguacaugggcaaccugagcacccagcagcuggagcagagaagagcccugcugaacaugaucggcauggugggcggcgcccagggcacccagcccggcagagacggcguggugagagugugggacgugaagaaccccgaccugcugaacaaccaguucggcaccaugcccagccugacccuggccugccugaccaagcagggccagguggaccugaacgacguggugcuggcccugaccgaccugggccugaucuacaccgccaaguaccccaacagcagcgaccuggacagacugagccagagccaccccauccugaacaugguggacaccaagaagagcagccugaacaucagcggcuacaacuucagccugggcgccgccgugaaggccggcgccugcaugcuggacggcggcaacaugcuggagaccaucaaggugaccccccagaccauggacggcauccugaagagcauccugaaggugaagaagagccugggcauguucgugagcgacacccccggcgagagaaaccccuacgagaacauccuguacaagaucugccugagcggcgacggcuggcccuacaucgccagcagaaccagcaucgugggcagagccugggagaacaccaccguggaccuggagagcgacggcaagccccagaaggugggcaccgccggcagcaacaagagccugcagagcgccggcuuccccaccggccugaccuacagccagcugaugacccugaaggacagcaugaugcagcuggaccccagcgccaagaccuggaucgacaucgagggcagacccgaggaccccguggagaucgcccuguaccagcccgugagcggcugcuacauccacuucuucagagagcccaccgaccugaagcaguucaagcaggacgccaaguacagccacggcaucgacguggccgaccuguuccccgcccagcccggccugaccagcgccgugaucgaggcccugcccagaaacauggugcugaccugccagggcagcgacgacaucaagagacugcuggacagccagggcagaagagacaucaagcugaucgacaucgcccugagcaaggccgacagcagaagauucgagaacgccgugugggaccagugcaaggaccugugccacaugcacaccggcguggugguggagaagaagaagagaggcggcaaggaggagaucaccccccacugcgcccugauggacugcaucauguacgacgccgccgugagcggcggccugaacauccccgugcugagagccgugcugcccagagacaugguguucagaaccagcagccccaagguggugcugugaggacuagucccuguucccagagcccacuuuuuuuucuuuuuuugaaauaaaauagccugucuuucagaucuaaaaaaaaaaaaaaaaaaaaaaaaaaaaaaaaaaaaaaaaaaaaaaaaaaaaaaaaaaaaaaaaaaaaaaaaaaaaaaaaaaaaaaaaaaaaaaaaaaaa

SEQ ID NO: 18665 - RNA, 2040 nt, Artificial Sequence
  mRNA product Design a-2 (A100) comprising derived and/or modified sequence from LASV(LASV221-NIG-2010;Clade II)__AIT17625__SP-HsPLAT_NP(2-569) (opt4)
aggagaguccgcucagccagguugcagaagcggcuuagcguguguccuaaucuucucucugcguguagguaggccugugccgcaaacaagcuuaccauggacgccaugaagagaggccugugcugcgugcugcugcugugcggcgccguguucgugagccccagcgccagcaaggaggugaagagcuuccuguggacccagagccugagaagagagcugagcggcuacugcagcagcaucaagcugcagguggugaaggacgcccaggcccugcugcacggccuggacuucagcgaggugagcaacgugcagagacugaugagaaagcagagaagagacgacagcgaccugaagagacugagagaccugaaccaggccgugaacaaccugguggagcugaagagcacccagcagaagagcauccugagagugggcacccugaccagcgacgaccugcugacccuggccgccgaccuggagaagcugaagagcaaggugaucagaaccgagagaccccugagcagcggcguguacaugggcaaccugagcacccagcagcuggagcagagaagagcccugcugaacaugaucggcauggugggcggcgcccagggcacccagcccggcagagacggcguggugagagugugggacgugaagaaccccgaccugcugaacaaccaguucggcaccaugcccagccugacccuggccugccugaccaagcagggccagguggaccugaacgacgccgugcuggcccugaccgaccugggccugaucuacaccgccaaguaccccaacagcagcgaccuggacagacugagccagagccaccccauccugaacaugguggacaccaagaagagcagccugaacaucagcggcuacaacuucagccugggcgccgccgugaaggccggcgccugcaugcuggacggcggcaacaugcuggagaccaucaaggugaccccccagaccguggacggcauccugaagagcauccugaaggugaagagaagccugggcauguucgugagcgacacccccggcgagagaaaccccuacgagaacauccuguacaagaucugccugagcggcgacggcuggcccuacaucgccagcagaaccagcaucgugggcagagccugggagaacaccaccguggaccuggagagcgacggcaagccccagaaggugggcaccgccggcagcaacaagagccugcagagcgccggcuuccccaccggccugaccuacagccagcugaugacccugaaggacagcaugaugcagcuggaccccagcgccaagaccuggaucgacaucgagggcagacccgaggaccccguggagaucgcccuguaccagcccaugagcggcugcuacauccacuucuucagagagcccaccgaccugaagcaguucaagcaggacgccaaguacagccacggcaucgacguggccgaccuguuccccgcccagcccggccugaccagcgccgugaucgaggcccugcccagaaacauggugcugaccugccagggcagcgacgacaucaagagacugcuggacagccagggcagaagagacaucaagcugaucgacaucgcccugagcaaggccgacagcagaaaguucgagaacgccgugugggaccagugcaaggaccugugccacaugcacaccggcguggugguggagaagaagaagagaggcggcaaggaggagaucaccccccacugcgcccugauggacugcaucauguacgacgccgccgugagcggcggccugaacauccccgugcugagagccgugcugcccagagacaugguguucagaaccagcagccccaagguggugcugugaggacuagucccuguucccagagcccacuuuuuuuucuuuuuuugaaauaaaauagccugucuuucagaucuaaaaaaaaaaaaaaaaaaaaaaaaaaaaaaaaaaaaaaaaaaaaaaaaaaaaaaaaaaaaaaaaaaaaaaaaaaaaaaaaaaaaaaaaaaaaaaaaaaaa

SEQ ID NO: 18666 - RNA, 2040 nt, Artificial Sequence
  mRNA product Design a-2 (A100) comprising derived and/or modified sequence from LASV(LASV237-NIG-2010;Clade II)__AIT17639__SP-HsPLAT_NP(2-569) (opt4)
aggagaguccgcucagccagguugcagaagcggcuuagcguguguccuaaucuucucucugcguguagguaggccugugccgcaaacaagcuuaccauggacgccaugaagagaggccugugcugcgugcugcugcugugcggcgccguguucgugagccccagcgccagcaaggaggugaagagcuuccuguggacccagagccugagaagagagcugagcggcuacugcagcaacaucaagcugcagguggugaaggacgcccaggcccugcugcacggccuggacuucagcgaggugagcaacgugcagagacugaugagaaagcagaagagagacgacagcgaccugaagagacugagagaccugaaccaggccgugaacaaccugguggagcugaagagcacccagcagaagagcauccugagagugggcacccugaccagcgacgaccugcugacccuggccgccgaccuggagaagcugaagagcaaggugaucagaaccgagagaccccugagcagcggcguguacaugggcaaccugagcacccagcagcuggagcagagaagagcccugcugaacaugaucggcauggugggcggcgcccagggcacccagcccggcagagacggcguggugagagugugggacgugaagaaccccgaccugcugaacaaccaguucggcaccaugcccagccugacccuggccugccugaccaagcagggccagguggaccugaacgacgccgugcuggcccugaccgaccugggccugaucuacaccgccaaguaccccaacagcagcgaccuggacagacugagccagagccaccccauccugaacaugguggacaucaagaagagcagccugaacaucagcggcuacaacuucagccugggcgccgccgugaaggccggcgccugcaugcuggacggcggcaacaugcuggagaccaucaaggugaccccccagaccauggacggcauccugaagagcauccugaaggugaagagaagccugggcauguucgugagcgacacccccggcgagagaaaccccuacgagaacauccuguacaagaucugccugagcggcgacggcuggcccuacaucgccagcagaaccagcaucgugggcagagccugggagaacaccaccguggaccuggagagcgacggcaagccccagaaggugggcagcgccggcagcaacaagagccugcagagcgccggcuuccccaccggccugaccuacagccagcugaugacccugaaggacagcaugaugcagcuggaccccagcgccaagaccuggaucgacaucgagggcagacccgaggaccccguggagaucgcccuguaccagcccaugagcggcugcuacauccacuucuucagagagcccaccgaccugaagcaguucaagcaggacgccaaguacagccacggcaucgacguggccgaccuguuccccgcccagcccggccugaccagcgccgugaucgaggcccugcccagaaacauggugcugaccugccagggcagcgacgacaucaagagacugcuggacagccagggcagaagagacaucaagcugaucgacaucgcccugagcaaggccgacagcagaagauucgagaacgccgugugggaccagugcaaggaccugugccacaugcacaccggcguggugguggagaagaagaagagaggcggcaaggaggagaucaccccccacugcgcccugauggacugcaucauguacgacgccgccgugagcggcggccugaacauccccgugcugagagccgugcugcccagagacaugguguucagaaccagcagccccaagguggugcugugaggacuagucccuguucccagagcccacuuuuuuuucuuuuuuugaaauaaaauagccugucuuucagaucuaaaaaaaaaaaaaaaaaaaaaaaaaaaaaaaaaaaaaaaaaaaaaaaaaaaaaaaaaaaaaaaaaaaaaaaaaaaaaaaaaaaaaaaaaaaaaaaaaaaa

SEQ ID NO: 18667 - RNA, 2040 nt, Artificial Sequence
  mRNA product Design a-2 (A100) comprising derived and/or modified sequence from LASV(LASV253-NIG-2011;Clade II)__AIT17671__SP-HsPLAT_NP(2-569) (opt4)
aggagaguccgcucagccagguugcagaagcggcuuagcguguguccuaaucuucucucugcguguagguaggccugugccgcaaacaagcuuaccauggacgccaugaagagaggccugugcugcgugcugcugcugugcggcgccguguucgugagccccagcgccagcaaggaggugaagagcuuccuguggacccagagccugagaagagagcugagcggcuacugcagcagcaucaagcugcagguggugaaggacgcccaggcccugcugcacggccuggacuucagcgaggugagcaacgugcagagacugaugagaaagcagaagagagacgacagcgaccugaagagacugagagaccugaaccaggccgugaacaaccugguggagcugaagagcacccagcagaagagcgugcugagagugggcacccugaccagcgacgaccugcugacccuggccgccgaccuggagaagcugaagagcaaggugaucagaaccgagagaccccugagcagcggcguguacaugggcaaccugagcacccagcagcuggagcagagaagagcccugcugaacaugaucggcauggugggcggcgcccagggcacccagcccggcagagacggcguggugagagugugggacgugaagaaccccgaccugcugaacaaccaguucggcaccaugcccagccugacccuggccugccugaccaagcagggccagguggaccugaacgacguggugcuggcccugaccgaccugggccugaucuacaccgccaaguaccccaacagcagcgaccuggacagacugagccagagccaccccauccugaacaugguggacaccaagaagagcagccugaacaucagcggcuacaacuucagccugggcgccgccgugaaggccggcgccugcaugcuggacggcggcaacaugcuggagaccaucaaggugaccccccagaccauggacggcauccugaagagcauccugaaggugaagaagagccugggcauguucgugagcgacacccccggcgagagaaaccccuacgagaacauccuguacaagaucugccugagcggcgacggcuggcccuacaucgccagcagaaccagcaucgugggcagagccugggagaacaccaccguggaccuggagagcgacggcaagccccagaaggugggcaccgccggcagcaacaagagccugcagagcgccggcuuccccaccggccugaccuacagccagcugaugacccugaaggacagcaugaugcagcuggaccccagcgccaagaccuggaucgacaucgagggcagacccgaggaccccguggagaucgcccuguaccagcccaugagcggcugcuacauccacuucuucagagagcccaccgaccugaagcaguucaagcaggacgccaaguacagccacggcaucgacgugaccgaccuguuccccgcccagcccggccugaccagcgccgugaucgaggcccugcccagaaacauggugcugaccugccagggcagcgacgacaucaagagacugcuggacagccagggcagaagagacaucaagcugaucgacaucgcccugagcaaggccgacagcagaagauucgagaacgccgugugggaccagugcaaggaccugugccacaugcacaccggcguggugguggagaagaagaagagaggcggcaaggaggagaucaccccccacugcgcccugauggacugcaucauguacgacgccgccgugagcggcggccugaacauccccgugcugagagccgugcugcccagagacaugguguucagaaccagcagccccaagguggugcugugaggacuagucccuguucccagagcccacuuuuuuuucuuuuuuugaaauaaaauagccugucuuucagaucuaaaaaaaaaaaaaaaaaaaaaaaaaaaaaaaaaaaaaaaaaaaaaaaaaaaaaaaaaaaaaaaaaaaaaaaaaaaaaaaaaaaaaaaaaaaaaaaaaaaa

SEQ ID NO: 18668 - RNA, 2040 nt, Artificial Sequence
  mRNA product Design a-2 (A100) comprising derived and/or modified sequence from LASV(LASV254-NIG-2011;Clade II)__AIT17675__SP-HsPLAT_NP(2-569) (opt4)
aggagaguccgcucagccagguugcagaagcggcuuagcguguguccuaaucuucucucugcguguagguaggccugugccgcaaacaagcuuaccauggacgccaugaagagaggccugugcugcgugcugcugcugugcggcgccguguucgugagccccagcgccagcaaggaggugaagagcuuccuguggacccagagccugagaagagagcugagcggcuacugcagcagcaucaagcugcagguggugaaggacgcccaggcccugcugcacggccuggacuucagcgaggugagcaacgugcagagacugaugagaaagcagaagagagacgacagcgaccugaagagacugagagaccugaaccaggccgugaacaaccugguggagcugaagagcacccagcagaagagcgugcugagagugggcacccugaccagcgacgaccugcugacccuggccgccgaccuggagaagcugaagagcaaggugaucagaaccgagagaccccugagcagcggcguguacaugggcaaccugagcacccagcagcuggagcagagaagagcccugcugaacaugaucggcauggugggcggcgcccagggcacccagcccggcagagacggcguggugagagugugggacgugaagaaccccgaccugcugaacaaccaguucggcaccaugcccagccugacccuggccugccugaccaagcagggccagguggaccugaacgacgccgugcuggcccugaccgaccugggccugaucuacaccgccaaguaccccaacagcagcgaccuggacagacugagccagagccaccccauccugaacaugguggacaccaagaagagcagccugaacaucagcggcuacaacuucagccugggcgccgccgugaaggccggcgccugcaugcuggacggcggcaacaugcuggagaccaucaaggugaccccccagaccauggacggcauccugaagagcauccugaaggugaagaagagccugggcauguucgugagcgacacccccggcgagagaaaccccuacgagaacauccuguacaagaucugccugagcggcgacggcuggcccuacaucgccagcagaaccagcaucgugggcagagccugggagaacaccaucguggaccuggagagcgacggcaagccccagaaggugggcaccgccggcagcaacaagagccugcagagcgccggcuuccccaccggccugaccuacagccagcugaugacccugaaggacagcaugaugcagcuggaccccagcgccaagaccuggaucgacaucgagggcagacccgaggaccccguggagaucgcccuguaccagcccaugagcggcugcuacauccacuucuucagagagcccaccgaccugaagcaguucaagcaggacgccaaguacagccacggcaucgacguggccgaccuguuccccgcccagcccggccugaccagcgccgugaucgaggcccugcccagaaacauggugcugaccugccagggcagcgacgacaucaagagacugcuggacagccagggcagaagagacaucaagcugaucgacaucgcccugagcaaggccgacagcagaagauucgagaacgccgugugggaccagugcaaggaccugugccacaugcacaccggcguggugguggagaagaagaagagaggcggcaaggaggagaucaccccccacugcgcccugauggacugcaucauguacgacgccgccgugagcggcggccugaacauccccgugcugagagccgugcugcccagagacaugguguucagaaccagcagccccaagguggugcugugaggacuagucccuguucccagagcccacuuuuuuuucuuuuuuugaaauaaaauagccugucuuucagaucuaaaaaaaaaaaaaaaaaaaaaaaaaaaaaaaaaaaaaaaaaaaaaaaaaaaaaaaaaaaaaaaaaaaaaaaaaaaaaaaaaaaaaaaaaaaaaaaaaaaa

SEQ ID NO: 18669 - RNA, 2040 nt, Artificial Sequence
  mRNA product Design a-2 (A100) comprising derived and/or modified sequence from LASV(Nig08-04;Clade II)__ADU56611__SP-HsPLAT_NP(2-569) (opt4)
aggagaguccgcucagccagguugcagaagcggcuuagcguguguccuaaucuucucucugcguguagguaggccugugccgcaaacaagcuuaccauggacgccaugaagagaggccugugcugcgugcugcugcugugcggcgccguguucgugagccccagcgccagcaaggaggugaagagcuuccuguggacccagagccugagaagagagcugagcggcuacugcagcaacaucaagcugcagguggugaaggacgcccaggcccugcugcacggccuggacuucagcgaggugagcaacgugcagagacugaugagaaagcagaagagagacgacggcgaccugaagagacugagagaccugaaccaggccgugaacaaccugguggagcugaagagcacccagcagaagagcgugcugagagugggcacccugaccagcgacgaccugcugacccuggccgccgaccuggagaagcugaagagcaaggugaucagaaccgagagaccccugagcagcggcguguacaugggcaaccugagcacccagcagcuggagcagagaaaggcccugcugagcaugaucggcauggugggcggcgcccagggcacccagcccggcagagacggcguggugagagugugggacgugaagaaccccgaccugcugaacaaccaguucggcaccaugcccagccugacccuggccugccugaccaagcagggccagguggaccugaacgacgccgugcuggcccugaccgaccugggccugaucuacaccgccaaguaccccaacagcagcgaccuggacagacugagccagagccaccccauccugaacaugguggacaccaagaagagcagccugaacaucagcggcuacaacuucagccugggcgccgccgugaaggccggcgccugcaugcuggacggcggcaacaugcuggagaccaucaaggugaccccccagaccauggacggcauccugaagagcauccugaaggugaagagaagccugggcauguucgugagcgacacccccggcgagagaaaccccuacgagaacauccuguacaagaucugccugagcggcgacggcuggcccuacaucgccagcagaaccagcaucgugggcagagccugggagaacaccaccguggaccuggagagcgacggcaagccccagaaggugggcaccgccggcagcaacaagagccugcagagcgccggcuuccccaccggccugaccuacagccagcugaugacccugaaggacagcaugaugcagcuggaccccagcgccaagaccuggaucgacaucgagggcagacccgaggaccccguggagaucgcccuguaccagcccaugagcggcugcuacauccacuucuucagagagcccaccgaccugaagcaguucaagcaggacgccaaguacagccacggcaucgacgugaccgaccuguucagcgcccagcccggccugaccagcgccgugaucgaggcccugcccagaaacauggugcugaccugccagggcagcgacgacaucaagaagcugcuggacagccagggcagaagagacaucaagcugaucgacaucagccugaacaaggccgacagcagaagauucgagaacgccgugugggaccagugcaaggaccugugccacaugcacaccggcguggugguggagaagaagaagagaggcggcaaggaggagaucaccccccacugcgcccugauggacugcaucauguucgacgccgccgugagcggcggccugaacauccccauccugagagccgugcugcccagagacaugguguucagaaccagcagccccaagguggugcugugaggacuagucccuguucccagagcccacuuuuuuuucuuuuuuugaaauaaaauagccugucuuucagaucuaaaaaaaaaaaaaaaaaaaaaaaaaaaaaaaaaaaaaaaaaaaaaaaaaaaaaaaaaaaaaaaaaaaaaaaaaaaaaaaaaaaaaaaaaaaaaaaaaaaa

SEQ ID NO: 18670 - RNA, 2043 nt, Artificial Sequence
  mRNA product Design a-2 (A100) comprising derived and/or modified sequence from LASV(GA391;Clade III)__AAA46284__SP-HsPLAT_NP(2-570) (opt4)
aggagaguccgcucagccagguugcagaagcggcuuagcguguguccuaaucuucucucugcguguagguaggccugugccgcaaacaagcuuaccauggacgccaugaagagaggccugugcugcgugcugcugcugugcggcgccguguucgugagccccagcgccagcaaggaggugagaagcugccuguggacccagagccugagaagagagcugagcggcuacugcagcaacaucaagcugcagguggugaaggacgcccaggcccugcugcacggccuggacuucagcgaggugagcaacgugcagagacugaugagaaagcagaagagagacgacggcgaccugaagagacugagagaccugaaccaggccgugaacaaccugguggagcugaagagcacccagcagaagagcgugcugagagugggcacccugagcagcgacgaccugcugauccuggccgccgaccuggagaagcugaagagcaaggugaccagaaccgagagaccccugagcagcggcguguacaugggcaaccugagcagccagcagcuggaccagagaagagcccugcugaacaugaucggcaugaccggcgugagcggcggcggcaagggcgccagcaacggcaucgugagagugugggacgugaagaacgccgagcugcugaacaaccaguucggcaccaugcccagccugacccuggccugccugaccaagcagggccagguggaccugaacgacgccgugcaggcccugaccgaccugggccugaucuacaccgccaaguaccccaacagcagcgaccuggacagacugagccagagccaccccauccugaacaugaucgacaccaagaagagcagccugaacaucagcggcuacaacuucagccugggcgccgccgugaaggccggcgccugcaugcuggacggcggcaacaugcuggagaccaucaaggugagcccccagaccauggacggcauccugaagagcauccugaaggugaagaagagccugggcauguucgugagcgacacccccggcgagagaaaccccuacgagaacauccuguacaagaucugccugagcggcgacggcuggagcuacaucgccagcagaaccagcaucgugggcagagccugggagaacaccgugguggaccuggagcaggacaacaagccccagaagaucggcaacggcggcagcaacaagagccugcagagcgccggcuucgccgccggccugaucuacagccagcugaugacccugaaggacuucaagugcuucaaccugauccccaacgccaagaccuggauggacaucgagggcagacccgaggaccccguggagaucgcccuguaccagcccagcagcggcugcuacgugcacuucuucagagagcccaccgaccugaagcaguucaagcaggacgccaaguacagccacggcagagacgugaccgaccuguucgccgcccagcccggccugaccagcgccgugaucgaggcccugcccagaaacauggugaucaccugccagggcagcgaggacaucagaaagcugcuggagagccagggcagaagagacaucaagcugaucgacaucacccugagcaaggccgacagcagaaaguucgagaacgccgugugggaccaguucaaggaccugugccacaugcacaccggcguggugguggagaagaagaagagaggcggcaaggaggagaucaccccccacugcgcccugauggacugcaucauguucgacgccgccgugagcggcggccuggacgccaaggugcugagaguggugcugcccagagacaugguguucagaaccagcacccccaagguggugcugugaggacuagucccuguucccagagcccacuuuuuuuucuuuuuuugaaauaaaauagccugucuuucagaucuaaaaaaaaaaaaaaaaaaaaaaaaaaaaaaaaaaaaaaaaaaaaaaaaaaaaaaaaaaaaaaaaaaaaaaaaaaaaaaaaaaaaaaaaaaaaaaaaaaaa

SEQ ID NO: 18671 - RNA, 2040 nt, Artificial Sequence
  mRNA product Design a-2 (A100) comprising derived and/or modified sequence from LASV(Nig08-A19;Clade III)__ADU56619__SP-HsPLAT_NP(2-569) (opt4)
aggagaguccgcucagccagguugcagaagcggcuuagcguguguccuaaucuucucucugcguguagguaggccugugccgcaaacaagcuuaccauggacgccaugaagagaggccugugcugcgugcugcugcugugcggcgccguguucgugagccccagcgccagcaaggaggugaagagcuuccuguggacccagagccugagaagagagcugagcggcuacugcagcaacaucaagcugcagguggugaaggacgcccaggcccugcugcacggccuggacuucagcgaggugagcaacgugcagagacugaugagaaagcagaagagagacgacggcgaccugaagagacugagagaccugaaccaggccgugaacaaccugguggagcugaagagcacccagcagaagagcgugcugagagugggcacccugagcagcgacgaccugcuggugcuggccgccgaccuggagaagcugaagagcaagguggugagaaccgagagaccccugagcagcggcaucuacaugggcaaccugagcagccagcagcuggaccagagaaaggcccugcugaacaugaucggcaugaccggcggcaacggcggcagaaacaccaccagcgacggcaucgugagagugugggacgugaagaacgccgagcugcugaacaaccaguucggcaccaugcccagccugacccuggccugccugaccaagcagggccagguggaccugaacgacgccgugcaggcccugaccgaccugggccugaucuacaccgccaaguaccccaacagcagcgaccuggacagacuggcccagagccaccccauccugaacaugaucgacaccaagaagagcagccugaacaucagcggcuacaacuucagccugggcgccgccgugaaggccggcgccugcaugcuggacggcggcaacaugcuggagaccaucaaggugagcccccagaccauggacggcauccugaagagcauccugaaggugaagagaagccugggcauguucaucagcgacacccccggcgagagaaaccccuacgagaacauccuguacaagaucugccugagcggcgacggcuggcccuacaucgccagcagaaccagcaucgugggcagagccugggagaacaccgugguggaccuggagagcgacaacaagccccagaagaccggcaacggcggcagcaacaagagccugcagagcgccggcuucgccgccggccugaccuacagccagcugaugacccugaaggacagcaugcugcagcuggaccccaacgccaagaccuggauggacaucgagggcagacccgaggaccccguggagaucgcccuguaccagcccagcagcggcugcuacauccacuucuucagagagcccaccgaccugaagcaguucaagcaggacgccaaguacagccacggcaucgacgugaccgaccuguucgccgcccagcccggccugaccagcgccgugaucgaggcccugcccagaaacauggugaucaccugccagggcagcgaggacaucagaaagcugcuggagagccagggcagaagagacaucaagcugaucgacaucagccugagcaagguggacagcagaaaguucgagaacgccgugugggaccaguucaaggaccugugccacaugcacaccggcaucgugguggagaagaagaagagaggcggcaaggaggagaucaccccccacugcgcccugauggacugcaucauguucgacgccgccgugagcggcggcguggacgccaaggugcugagagccgugcugcccagagacaugguguucagaaccagcacccccaagguggugcugugaggacuagucccuguucccagagcccacuuuuuuuucuuuuuuugaaauaaaauagccugucuuucagaucuaaaaaaaaaaaaaaaaaaaaaaaaaaaaaaaaaaaaaaaaaaaaaaaaaaaaaaaaaaaaaaaaaaaaaaaaaaaaaaaaaaaaaaaaaaaaaaaaaaaa

SEQ ID NO: 18672 - RNA, 2040 nt, Artificial Sequence
  mRNA product Design a-2 (A100) comprising derived and/or modified sequence from LASV(G1180-SLE-2010;Clade IV)__AIT17169__SP-HsPLAT_NP(2-569) (opt4)
aggagaguccgcucagccagguugcagaagcggcuuagcguguguccuaaucuucucucugcguguagguaggccugugccgcaaacaagcuuaccauggacgccaugaagagaggccugugcugcgugcugcugcugugcggcgccguguucgugagccccagcgccagcaaggagaucaagagcuuccuguggacccagagccugagaagagagcugagcggcuacugcagcaacaucaagcugcagguggugaaggacgcccaggcccugcugcacggccuggacuucagcgaggugagcaacgugcagagacugaugagaaaggagagaagagacgacaacgaccugaagagacugagagaccugaaccaggccgugaacaaccugguggagcugaagagcacccagcagaagagcauccugagagugggcacccugaccagcgacgaccugcugauccuggccgccgaccuggagaagcugaagagcaaggugaucagaaccgagagaccccugagcgccggcguguacaugggcaaccugagcagccagcagcuggaccagagaagagcccugcugagcaugaucggcaugagcagcggcaaccagagagcccaggccggcagagacggcguggugagagugugggacgugaagaacguggagcugcugaacaaccaguucggcaccaugcccagccugacccuggccugccugaccaagcagggccagguggaccugaacgacgccgugcaggcccugaccgaccugggccugaucuacaccgccaaguaccccaacaccagcgaccuggacagacugacccagagccaccccauccugaacaugaucgacaccaagaagagcagccugaacaucagcggcuacaacuucagccugggcgccgccgugaaggccggcgccugcaugcuggacggcggcaacaugcuggagaccaucaaggugagcccccagaccauggacggcauccugaagagcauccugaaggugaagaaggcccugggcauguucaucagcgacacccccggcgagagaaaccccuacgagaacauccuguacaagaucugccugagcggcgacggcuggcccuacaucgccagcagaaccagcaucaccggcagagccugggagaacaccgugguggaccuggagagcgacggcaagccccagaaggccggcagcaacaacagcaacaagagccugcagagcgugggcuucaccgccggccugaccuacagccagcugaugacccugaaggacgccaugcugcagcuggaccccaacgccaagaccuggauggacaucgagggcagacccgaggaccccguggagaucgcccuguaccagcccagcagcggcugcuacauccacuucuucagagagcccaccgaccugaagcaguucaagcaggacgccaaguacagccacggcaucgacgugaccgaccuguucgccgcccagcccggccugaccagcgccgugaucgacgcccugcccagaaacauggugaucaccugccagggcagcgacgacaucagaaagcugcuggagagccagggcagaaaggacaucaagcugaucgacaucgcccugagcaagaccgacagcagaaaguacgagaacgccgugugggaccaguacaaggaccugugccacaugcacaccggcguggugguggagaagaagaagagaggcggcaaggaggagaucaccccccacugcgcccugauggacugcaucauguucgacgccgccgugagcggcggccugaacaccagcgugcugagagccgugcugcccagagacaugguguucagaaccagcacccccagaguggugcugugaggacuagucccuguucccagagcccacuuuuuuuucuuuuuuugaaauaaaauagccugucuuucagaucuaaaaaaaaaaaaaaaaaaaaaaaaaaaaaaaaaaaaaaaaaaaaaaaaaaaaaaaaaaaaaaaaaaaaaaaaaaaaaaaaaaaaaaaaaaaaaaaaaaaa

SEQ ID NO: 18673 - RNA, 2040 nt, Artificial Sequence
  mRNA product Design a-2 (A100) comprising derived and/or modified sequence from LASV(G1442-SLE-2011;Clade IV)__AIT17181__SP-HsPLAT_NP(2-569) (opt4)
aggagaguccgcucagccagguugcagaagcggcuuagcguguguccuaaucuucucucugcguguagguaggccugugccgcaaacaagcuuaccauggacgccaugaagagaggccugugcugcgugcugcugcugugcggcgccguguucgugagccccagcgccagcaaggaggugaagagcuuccuguggacccagagccugagaagagagcugagcggcuacugcagcaacaucaagcugcagguggugaaggacgcccaggcccugcugcacggccuggacuucagcgaggugagcaacgugcagagacugaugagaaagcagagaagagacgacaacgaccugaagagacugagagaccugaaccaggccgugaacaaccugguggagcugaagagcacccagcagaagagcgugcugagagugggcacccugaccagcgacgaccugcuggugcuggccgccgaccuggagaagcugaagagcaaggugaucagaaccgagagaccccugagcgccggcguguacaugggcaaccugagcagccagcagcuggaccagagaagagcccugcugaacaugaucggcaugagcggcggcauccagggcaccagaaccggcagagacggcguggugagagugugggacgugaagaacgccgaccugcugaacaaccaguucggcaccaugcccagccugacccuggccugccugaccaagcagggccagguggaccugaacgacguggugcaggcccugaccgaccugggccugaucuacaccgccaaguaccccaacgccagcgaccuggacagacugacccagagccaccccauccugaacaugaucgacaccaagaagagcagccugaacaucagcggcuacaacuucagccugggcgccgccgugaaggccggcgccugcaugcuggacggcggcaacaugcuggagaccaucaaggugagcccccagaccauggacggcauccugaagagcauccugaaggugaagaagacccugggcauguucaucagcgacacccccggcgagagaaaccccuacgagaacauccuguacaagaucugccugagcggcgacggcuggcccuacaucgccagcagaaccagcaucaccggcagagccugggagaacaccgugguggaccuggagagcgacggcaagccccagaaggccggcagcaacaacagcaacaagagccugcagagcgccggcuucgccgccggccugaccuacagccagcugaugacccugaaggacgccaugcugcagcuggaccccaacgccaagaccuggauggacaucgagggcagacccgaggaccccguggagaucgcccuguaccagcccagcagcggcugcuacauccacuucuucagagagcccaccgaccugaagcaguucaagcaggacgccaaguacagccacggcaucgacgugaccgaccuguucgccgcccagcccggccugaccagcgccgugaucgaggcccugcccagaaacauggugaucaccugccagggcagcgacgacaucaagaagcugcuggagagccagggcagaaaggacaucaagcugaucgacaucgcccugagcaagaccgacagcagaaaguacgagaacgccgugugggaccaguacaaggaccugugccacaugcacaccggcguggugguggagaagaagaagagaggcggcaaggaggagaucaccccccacugcgcccugauggacugcaucauguucgacgccgccgugagcggcggccugaacacccuggugcugagagccgugcugcccagagacaugguguucagaaccagcacccccagaguggugcugugaggacuagucccuguucccagagcccacuuuuuuuucuuuuuuugaaauaaaauagccugucuuucagaucuaaaaaaaaaaaaaaaaaaaaaaaaaaaaaaaaaaaaaaaaaaaaaaaaaaaaaaaaaaaaaaaaaaaaaaaaaaaaaaaaaaaaaaaaaaaaaaaaaaaa

SEQ ID NO: 18674 - RNA, 2040 nt, Artificial Sequence
  mRNA product Design a-2 (A100) comprising derived and/or modified sequence from LASV(G3010-SLE-2013;Clade IV)__AIT17345__SP-HsPLAT_NP(2-569) (opt4)
aggagaguccgcucagccagguugcagaagcggcuuagcguguguccuaaucuucucucugcguguagguaggccugugccgcaaacaagcuuaccauggacgccaugaagagaggccugugcugcgugcugcugcugugcggcgccguguucgugagccccagcgccagcaaggagaucaagagcuuccuguggacccagagccugagaagagagcugagcggcuacugcagcaacaucaagcugcagguggugaaggacgcccaggcccugcugcacggccuggacuucagcgaggugagcaacgugcagagacugaugagaaaggagagaagagacgacaacgaccugaagagacugagagaccugaaccaggccgugaacaaccugguggagcugaagagcacccagcagaagagcauccugagagugggcacccugaccagcgacgaccugcugauccuggccgccgaccuggagaagcugaagagcaaggugaccagaaccgagagaccccugagcgccggcguguacaugggcaaccugagcagccagcagcuggaccagagaagagcccugcugagcaugaucggcaugagcagcggcgugcagggcgccagagccggcagagacggcguggugagagugugggacgugaagaacgccgagcugcugaacaaccaguucggcaccaugcccagccugacccuggccugccugaccaagcagggccagguggaccugaacgacguggugcaggcccugaccgaccugggccugaucuacaccgccaaguaccccaacaccagcgaccuggacagacugacccagagccaccccauccugaacaugaucgacaccaagaagagcagccugaacaucagcggcuacaacuucagccugggcgccgccgugaaggccggcgccugcaugcuggacggcggcaacaugcuggagaccaucaaggugagcccccagaccauggacggcauccugaagagcauccugaaggugaagaaggcccugggcauguucaucagcgagacccccggcgagagaaaccccuacgagaacauccuguacaagaucugccugagcggcgacggcuggcccuacaucgccagcagaaccagcaucaccggcagagccugggagaacaccgugguggaccuggagagcgacggcaagccccagaaggccggcagcaacaacagcaacaagagccugcagagcgccggcuucaccgccggccugaccuacagccagcugaugacccugaaggacgccaugcugcagcuggaccccaacgccaagaccuggauggacaucgagggcagacccgaggaccccguggagguggcccuguaccagcccagcagcggcugcuacauccacuucuucagagagcccaccgaccugaagcaguucaagcaggacgccaaguacagccacggcaucgacgugaccgaccuguucgccgcccagcccggccugaccagcgccgugaucgacgcccugcccagaaacauggugaucaccugccagggcagcgacgacaucaagaagcugcuggagagccagggcagaaaggacaucaagcugaucgacaucgcccugagcaagaccgacagcagaaaguacgagaacgccgugugggaccaguacaaggaccugugccacaugcacaccggcguggugguggagaagaagaagagaggcggcaaggaggagaucaccccccacugcgcccugauggacugcaucauguucgacgccgccgugagcggcggccugaacaccagcgugcugagagccgugcugcccagagacaugguguucagaaccagcacccccagaguggugcugugaggacuagucccuguucccagagcccacuuuuuuuucuuuuuuugaaauaaaauagccugucuuucagaucuaaaaaaaaaaaaaaaaaaaaaaaaaaaaaaaaaaaaaaaaaaaaaaaaaaaaaaaaaaaaaaaaaaaaaaaaaaaaaaaaaaaaaaaaaaaaaaaaaaaa

SEQ ID NO: 18675 - RNA, 2040 nt, Artificial Sequence
  mRNA product Design a-2 (A100) comprising derived and/or modified sequence from LASV(G502-SLE-2009;Clade IV)__AIT17127__SP-HsPLAT_NP(2-569) (opt4)
aggagaguccgcucagccagguugcagaagcggcuuagcguguguccuaaucuucucucugcguguagguaggccugugccgcaaacaagcuuaccauggacgccaugaagagaggccugugcugcgugcugcugcugugcggcgccguguucgugagccccagcgccagcaaggagaucaagagcuuccuguggacccagagccugagaagagagcugagcggcuacugcagcaacaucaagcugcagguggugaaggacgcccaggcccugcugcacggccuggacuucagcgaggugagcaacgugcagagacugaugagaaaggagagaagagacgacaacgaccugaagagacugagagaccugaaccaggccgugaacaaccugguggagcugaagagcacccagcagaagagcauccugagagugggcacccugaccagcgacgaccugcugauccuggccgccgaccuggagaagcugaagagcaaggugaucagaaccgagagaccccugagcgccggcguguacaugggcaaccugagcagccagcagcuggaccagagaagagcccugcugagcaugaucggcaugagcggcggcaaccagggcgugagagccggcaaggacggcguggugagagugugggacgugaagaacgccgagcugcugaacaaccaguucggcaccaugcccagccugacccuggccugccugaccaagcagggccagguggaccugaacgacgccgugcaggcccugaccgaccugggccugaucuacaccgccaaguaccccaacaccagcgaccuggacagacugacccagagccaccccauccugaacaugaucgacaccaagaagagcagccugaacaucagcggcuacaacuucagccugggcgccgccgugaaggccggcgccugcaugcuggacggcggcaacaugcuggagaccaucaaggugagcccccagaccauggacggcauccugaagagcauccugaaggugaagaaggcccugggcauguucaucagcgacacccccggcgagagaaaccccuacgagaacauccuguacaagaucugccugagcggcgacggcuggcccuacaucgccagcagaaccagcaucaccggcagagccugggagaacaccgugguggaccuggagagcgacggcaagccccagaaggccggcagcaacaacagcaacaagagccugcagagcgccggcuucaccgccggccugaccuacagccagcugaugacccugaaggacgccaugcugcagcuggaccccaacaccaagaccuggauggacaucgagggcagacccgaggaccccguggagaucgcccuguaccagcccagcagcggcugcuacauccacuucuucagagagcccaccgaccugaagcaguucaagcaggacgccaaguacagccacggcaucgacgugaccgaccuguucgccgcccagcccggccugaccagcgccgugaucgacgcccugcccagaaacauggugaucaccugccagggcagcgacgacaucagaaagcugcuggagagccagggcagaaaggacaucaagcugaucgacaucgcccugaacaagaccgacagcagaaaguacgagaacgccgugugggaccaguacaaggaccugugccacaugcacaccggcguggugguggagaagaagaagagaggcggcaaggaggagaucaccccccacugcgcccugauggacugcaucauguucgacgccgccgugagcggcggccugaacaccagcgugcugagagccgugcugcccagagacaugguguucagaaccagcacccccagaguggugcugugaggacuagucccuguucccagagcccacuuuuuuuucuuuuuuugaaauaaaauagccugucuuucagaucuaaaaaaaaaaaaaaaaaaaaaaaaaaaaaaaaaaaaaaaaaaaaaaaaaaaaaaaaaaaaaaaaaaaaaaaaaaaaaaaaaaaaaaaaaaaaaaaaaaaa

SEQ ID NO: 18676 - RNA, 2040 nt, Artificial Sequence
  mRNA product Design a-2 (A100) comprising derived and/or modified sequence from LASV(G733-SLE-2010;Clade IV)__AIT17155__SP-HsPLAT_NP(2-569) (opt4)
aggagaguccgcucagccagguugcagaagcggcuuagcguguguccuaaucuucucucugcguguagguaggccugugccgcaaacaagcuuaccauggacgccaugaagagaggccugugcugcgugcugcugcugugcggcgccguguucgugagccccagcgccagcaaggagaucaagagcuuccuguggacccagagccugagaagagagcugagcggcuacugcagcaacaucaagcugcagguggugaaggacgcccaggcccugcugcacggccuggacuucagcgaggugagcaacgugcagagacugaugagaaaggagagaagagacgacaacgaccugaagagacugagagaccugaaccaggccgugaacaaccugguggagcugaagagcacccagcagaagagcgugcugagagugggcacccugaccagcgacgagcugcuggugcuggccgccgaccuggagaagcugaagagcaaggugaucagaaccgagagaccccugagcgccggcguguacaugggcaaccugagcagccagcagcuggaccagagaagagcccugcugagcaugaucggcaugagcggcggcaaccagggcgccagaaccggcagagacggcguggugagagugugggacgugaagaacgccgagcugcugaacaaccaguucggcaccaugcccagccugacccuggccugccugaccaagcagggccagguggaccugaacgacgccgugcaggcccugaccgaccugggccugaucuacaccgccaaguaccccaacaccagcgaccuggacagacugacccagagccaccccauccugaacaugaucgacaccaagaagagcagccugaacaucagcggcuacaacuucagccugggcgccgccgugaaggccggcgccugcaugcuggacggcggcaacaugcuggagaccaucaaggugagcccccagaccauggacggcauccugaagagcauccugaaggugaagaaggcccugggcauguucaucagcgacacccccggcgagagaaaccccuacgagaacauccuguacaagaucugccugagcggcgacggcuggcccuacaucgccagcagaaccagcaucaccggcagagccugggagaacaccgugguggaccuggagagcgacggcaagccccagaaggccggcagcaacaacagcaacaagagccugcagagcgccggcuucaccgccggccugaccuacagccagcugaugacccugaaggacgccaugcugcagcuggaccccaacgccaagaccuggauggacaucgagggcagacccgaggaccccguggagaucgcccuguaccagcccagcagcggcugcuacauccacuucuucagagagcccaccgaccugaagcaguucaagcaggacgccaaguacagccacggcaucgacgugaccgaccuguucgccgcccagcccggccugaccagcgccgugaucgacgcccugcccagaaacauggugaucaccugccagggcagcgacgacaucagaaagcugcuggagagccagggcagaaaggacaucaagcugaucgacaucgcccugagcaagaucgacagcagaaaguacgagaacgccgugugggaccaguacaaggaccugugccacaugcacaccggcguggugguggagaagaagaagagaggcggcaaggaggagaucaccccccacugcgcccugauggacugcaucauguucgacgccgccgugagcggcggccugaacagccuggugcugagagccgugcugcccagagacaugguguucagaaccagcacccccagaguggugcugugaggacuagucccuguucccagagcccacuuuuuuuucuuuuuuugaaauaaaauagccugucuuucagaucuaaaaaaaaaaaaaaaaaaaaaaaaaaaaaaaaaaaaaaaaaaaaaaaaaaaaaaaaaaaaaaaaaaaaaaaaaaaaaaaaaaaaaaaaaaaaaaaaaaaa

SEQ ID NO: 18677 - RNA, 2040 nt, Artificial Sequence
  mRNA product Design a-2 (A100) comprising derived and/or modified sequence from MOPV/LASV reassortant(IGS-1;Clade IV)__AFY05578__SP-HsPLAT_NP(2-569) (opt4)
aggagaguccgcucagccagguugcagaagcggcuuagcguguguccuaaucuucucucugcguguagguaggccugugccgcaaacaagcuuaccauggacgccaugaagagaggccugugcugcgugcugcugcugugcggcgccguguucgugagccccagcgccagcaaggagaucaagagcuuccuguggacccagagccugagaagagagcugagcggcuacugcagcaacaucaagcugcagguggugaaggacgcccaggcccugcugcacggccuggacuucagcgaggugagcaacgugcagagacugaugagaaaggagagaagagacgacaacgaccugaagagacugagagaccugaaccaggccgugaacaaccugguggagcugaagagcacccagcagaagagcauccugagagugggcacccugaccagcgacgaccugcugauccuggccgccgaccuggagaagcugagaagcaaggugaucagaaccgagagaccccugagcgccggcguguacaugggcaaccugagcagccagcagcuggaccagagaagagcccugcugaacaugaucggcaugagcggcggcaaccagggcgccagagccggcagagacggcguggugagagugugggacgugaagaacgccgagcugcugagcaaccaguucggcaccaugcccagccugacccuggccugccugaccaagcagggccagguggaccugaacgacgccgugcaggcccugaccgaccugggccugaucuacaccgccaaguaccccaacaccagcgaccuggacagacugacccagagccaccccauccugaacaugaucgacaccaagaagagcagccugaacaucagcggcuacaacuucagccugggcgccgccgugaaggccggcgccugcaugcuggacggcggcaacaugcuggagaccaucaaggugagcccccagaccauggacggcauccugaagagcauccugaaggugaagaaggcccugggcauguucaucagcgacacccccggcgagagaaaccccuacgagaacauccuguacaagaucugccugagcggcgacggcuggcccuacaucgccagcagaaccagcaucaccggcagagccugggagaacaccgugguggaccuggagagcgacggcaagccccagaaggccgacagcaacaacagcagcaagagccugcagagcgccggcuucaccgccggccugaccuacagccagcugaugacccugaaggacgccaugcugcagcuggaccccaacgccaagaccuggauggacaucgagggcagacccgaggaccccguggagaucgcccuguaccagcccagcagcggcugcuacauccacuucuucagagagcccaccgaccugaagcaguucaagcaggacgccaaguacagccacggcaucgacgugaccgaccuguucgccacccagcccggccugaccagcgccgugaucgacgcccugcccagaaacauggugaucaccugccagggcagcgacgacaucagaaagcugcuggagagccagggcagaaaggacaucaagcugaucgacaucgaccugagcaagaccgacagcagaaaguacgagaacgccgugugggaccaguacaaggaccugugccacaugcacaccggcguggugguggagaagaagaagagaggcggcaaggaggagaucaccccccacugcgcccugauggacugcaucauguucgacgccgccgugagcggcggccugaacaccagcgugcugagagccgugcugcccagagacaugguguucagaaccagcacccccagaguggugcugugaggacuagucccuguucccagagcccacuuuuuuuucuuuuuuugaaauaaaauagccugucuuucagaucuaaaaaaaaaaaaaaaaaaaaaaaaaaaaaaaaaaaaaaaaaaaaaaaaaaaaaaaaaaaaaaaaaaaaaaaaaaaaaaaaaaaaaaaaaaaaaaaaaaaa

SEQ ID NO: 18678 - RNA, 2040 nt, Artificial Sequence
  mRNA product Design a-2 (A100) comprising derived and/or modified sequence from LASV(LM765-SLE-2012;Clade IV)__AIT17815__SP-HsPLAT_NP(2-569) (opt4)
aggagaguccgcucagccagguugcagaagcggcuuagcguguguccuaaucuucucucugcguguagguaggccugugccgcaaacaagcuuaccauggacgccaugaagagaggccugugcugcgugcugcugcugugcggcgccguguucgugagccccagcgccagcaaggagaucaagagcuuccuguggacccagagccugagaagagagcugagcggcuacugcagcaacaucaagcugcagguggugaaggacgcccaggcccugcugcacggccuggacuucagcgaggugagcaacgugcagagacugaugagaaaggagagaagagacgacaacgaccugaagagacugagagaccugaaccaggccgugaacaaccugguggagcugaagagcacccagcagaagagcauccugagagugggcacccugaccagcgacgaccugcugauccuggccgccgaccuggagaagcugaagagcaaggugaccagaaccgagagaccccugagcgccggcguguacaugggcaaccugagcagccagcagcuggaccagagaagagcccugcuggacaugaucggcaugagcggcagcaaccagggcgccagagccggcagagacggcguggugagagugugggacgugaagaacgccgagcugcugaacaaccaguucggcaccaugcccagccugacccuggccugccugaccaagcagggccagguggaccugaacgacgccgugcaggcccugaccgaccugggccugaucuacaccgccaaguaccccaacaccagcgaccuggacagacugacccagagccaccccauccugaacaugaucgacaccaagaagagcagccugaacaucagcggcuacaacuucagccugggcgccgccgugaaggccggcgccugcaugcuggacggcggcaacaugcuggagaccaucaaggugagcccccagaccauggacggcauccugaagagcauccugaaggugaagaaggcccugggcauguucaucagcgacgcccccggcgagagaaaccccuacgagaacauccuguacaagaucugccugagcggcgacggcuggcccuacaucgccagcagaaccagcaucaccggcagagccugggagaacaccgugguggaccuggagagcgacggcaagccccagaaggccggcagcaacggcagcaacaagagccugcagagcgccggcuucaccgccggccugaccuacagccagcugaugacccugaaggacgccaugcugcagcuggaccccaacgccaagaccuggauggacaucgagggcagacccgaggaccccguggagaucgcccuguaccagcccagcagcggcugcuacauccacuucuucagagagcccaccgaccugaagcaguucaagcaggacgccaaguacagccacggcaucgacgugaccgaccuguucgccgcccagcccggccugaccagcgccgugaucgacgcccugcccagaaacauggugaucaccugccagggcagcgacgacaucagaaagcuguucgagagccagggcagaaaggacaucaagcugaucgacaucgcccugagcaagaccgacagcagaaaguacgagaacgccgugugggaccaguacaaggaccugugccacaugcacaccggcaucgugguggagaagaagaagagaggcggcaaggaggagaucaccccccacugcgcccugauggacugcaucauguucgacgccgccgugagcggcggccugaacaccagcgugcugagagccgugcugcccagagacaugguguucagaaccagcacccccagaguggugcugugaggacuagucccuguucccagagcccacuuuuuuuucuuuuuuugaaauaaaauagccugucuuucagaucuaaaaaaaaaaaaaaaaaaaaaaaaaaaaaaaaaaaaaaaaaaaaaaaaaaaaaaaaaaaaaaaaaaaaaaaaaaaaaaaaaaaaaaaaaaaaaaaaaaaa

SEQ ID NO: 18679 - RNA, 2040 nt, Artificial Sequence
  mRNA product Design a-2 (A100) comprising derived and/or modified sequence from LASV(LM776-SLE-2012;Clade IV)__AIT17825__SP-HsPLAT_NP(2-569) (opt4)
aggagaguccgcucagccagguugcagaagcggcuuagcguguguccuaaucuucucucugcguguagguaggccugugccgcaaacaagcuuaccauggacgccaugaagagaggccugugcugcgugcugcugcugugcggcgccguguucgugagccccagcgccagcaaggagaucaagagcuuccuguggacccagagccugagaagagagcugagcagcuacugcagcaacaucaagcugcagguggugaaggacgcccaggcccugcugcacggccuggacuucagcgaggugagcaacgugcagagacugaugagaaaggagagaagagacgacaacgaccugaagagacugagagaccugaaccaggccgugaacaaccugguggagcugaagagcacccagcagaagagcauccugagagugggcacccugaccagcgacgaccugcugauccuggccgccgaccuggagaagcugaagagcaaggugaccagaaccgagagaccccugagcgccggcguguacaugggcaaccugagcagccagcagcuggaccagagaagagcccugcugagcaugaucggcaugagcggcagcaaccagggcgccagagccggcagagacggcguggugagagugugggacgugaagaacgccgagcugcugaacaaccaguucggcaccaugcccagccugacccuggccugccugaccaagcagggccagguggaccugaacgacgccgugcaggcccugaccgaccugggccugaucuacaccgccaaguaccccaacaccagcgaccuggacagacugacccagagccaccccauccugaacaugaucgacaccaagaagagcagccugaacaucagcggcuacaacuucagccugggcgccgccgugaaggccggcgccugcaugcuggacggcggcaacaugcuggagaccaucaaggugagcccccagaccauggacggcauccugaagagcauccugaaggugaagaaggcccugggcauguucaucagcgacacccccggcgagagaaaccccuacgagaacauccuguacaagaucugccugagcggcgacggcuggcccuacaucgccagcagaaccagcaucaccggcagagccugggagaacaccgugguggaccuggagagcgacggcaagccccagaaggccggcagcaacaacagcaacaagagccugcagagcgccggcuucaccgccggccugaccuacagccagcugaugacccugaaggacgccaugcugcagcuggaccccaacgccaagaccuggauggacaucgagggcagacccgaggaccccguggagguggcccuguaccagcccagcagcggcugcuacauccacuucuucagagagcccaccgaccugaagcaguucaagcaggacgccaaguacagccacggcaucgacgugaccgaccuguucgccgcccagcccggccugaccagcgccgugaucgacgcccugcccagaaacauggugaucaccugccagggcagcgacgacaucagaaagcugcuggagagccagggcagaaaggacaucaagcugaucgacaucgcccugagcaagaccgacagcagaaaguacgagaacgccgugugggaccaguacaaggaccugugccacaugcacaccggcguggugguggagaagaagaagagaggcggcaaggaggagaucaccccccacugcgcccugauggacugcaucauguucgacgccgccgugagcggcggccugaacaccagcgugcugagagccgugcugcccagagacaugguguucagaaccagcacccccagaguggugcugugaggacuagucccuguucccagagcccacuuuuuuuucuuuuuuugaaauaaaauagccugucuuucagaucuaaaaaaaaaaaaaaaaaaaaaaaaaaaaaaaaaaaaaaaaaaaaaaaaaaaaaaaaaaaaaaaaaaaaaaaaaaaaaaaaaaaaaaaaaaaaaaaaaaaa

SEQ ID NO: 18680 - RNA, 2040 nt, Artificial Sequence
  mRNA product Design a-2 (A100) comprising derived and/or modified sequence from LASV(Mad39;Clade IV)__ANH09723__SP-HsPLAT_NP(2-569) (opt4)
aggagaguccgcucagccagguugcagaagcggcuuagcguguguccuaaucuucucucugcguguagguaggccugugccgcaaacaagcuuaccauggacgccaugaagagaggccugugcugcgugcugcugcugugcggcgccguguucgugagccccagcgccagcaaggagaucaagagcuuccuguggacccagagccugagaagagagcugagcggcuacugcagcaacaucaagcugcagguggugaaggacgcccaggcccugcugcacggccuggacuucagcgaggugagcaacgugcagagacugaugagaaagcagagaagagacgacaacgaccugaagagacugagagaccugaaccaggccgugaacaaccugguggagcugaagagcacccagcagaagagcgugcugagagugggcacccugaccagcgacgaccugcugacccuggccgccgaccuggagaagcugaagagcaaggugaccagaaccgagagaccccugaccgccggcguguacaugggcaaccugagcagccagcagcuggaccagagaagagcccugcugaacaugaucggcaugagcggcggcaaccagggcgccagaaccggcagagacggcguggugagagugugggacgugaagaacgccgagcugcugaacaaccaguucggcaccaugcccagccugacccuggccugccugaccaagcagggccagguggaccugaacgacguggugcaggcccugaccgaccugggccugaucuacaccgccaaguaccccaacaccagcgaccuggacagacugacccagagccaccccauccugaacaugaucgacaccaacaagagcagccugaacaucagcggcuacaacuucagccugggcgccgccgugaaggccggcgccugcaugcuggacggcggcaacaugcuggagaccaucaaggugagcccccagaccauggacggcauccugaagagcauccugaaggugaagaagagccugggcauguucaucagcgacacccccggcgagagaaaccccuacgagaacauccuguacaagaucugccugagcggcgacggcuggcccuacaucgccagcagaaccagcaucaccggcagagccugggagaacaccgugguggaccuggagagcggcggcaagccccagaaggccggcagcaacaacagcaacaagagccugcagagcgccggcuucgccgccggccugaccuacagccagcugaugacccugaaggacgccaugcugcagcuggaccccaacgccaagaccuggauggacaucgagggcagacccgaggaccccguggagaucgcccuguaccagcccaucagcggcugcuacauccacuucuucagagagcccaccgaccugaagcaguucaagcaggacgccaaguacagccacggcaucgacgugaccgaccuguucgccgcccagcccggccugaccagcgccgugaucgaggcccugcccagaaacauggugaucaccugccagggcagcgacgacaucagaaagcuguucgagagccagggcagaaaggacaucaagcugaucgacaucgcccugagcaagaccgacagcagaaaguacgagaacgccgugugggaccaguacaaggaccugugccacaugcacaccggcguggugguggagaagaagaagaagggcggcaaggaggagaucaccccccacugcgcccugauggacugcaucauguucgacgccgccgugagcggcggccugaacacccuggugcugagagccgugcugcccagagacaugguguucagaaccagcacccccaagguggugcugugaggacuagucccuguucccagagcccacuuuuuuuucuuuuuuugaaauaaaauagccugucuuucagaucuaaaaaaaaaaaaaaaaaaaaaaaaaaaaaaaaaaaaaaaaaaaaaaaaaaaaaaaaaaaaaaaaaaaaaaaaaaaaaaaaaaaaaaaaaaaaaaaaaaaa

SEQ ID NO: 18681 - RNA, 2040 nt, Artificial Sequence
  mRNA product Design a-2 (A100) comprising derived and/or modified sequence from LASV(Z0947-SLE-2011;Clade IV)__AIT17841__SP-HsPLAT_NP(2-569) (opt4)
aggagaguccgcucagccagguugcagaagcggcuuagcguguguccuaaucuucucucugcguguagguaggccugugccgcaaacaagcuuaccauggacgccaugaagagaggccugugcugcgugcugcugcugugcggcgccguguucgugagccccagcgccagcaaggagaucaagagcuuccuguggacccagagccugagaagagagcugagcggcuacugcagcaacaucaagcugcagguggugaaggacgcccaggcccugcugcacggccuggacuucagcgaggugagcaacgugcagagacugaugagaaaggagagaagagacgacaacgaccugaagagacugagagaccugaaccaggccgugaacaaccugguggagcugaagagcacccagcagaagagcauccugagagugggcacccugaccagcgacgaccugcugauccuggccgccgaccuggagaagcugaagagcaaggugaccagaaccgagagaccccugagcgccggcguguacaugggcaaccugagcagccagcagcuggaccagagaagagcccugcugaacaugaucggcaugagcggcagcaaccagggcgccagaaccggcagagacggcguggugagagugugggacgugaagaacgccgagcugcugaacaaccaguucggcaccaugcccagccugacccuggccugccugaccaagcagggccagguggaccugaacgacgccgugcaggcccugaccgaccugggccugaucuacaccgccaaguaccccaacaccagcgaccuggacagacugacccagagccaccccauccugaacaugaucgacaccaagaagagcagccugaacaucagcggcuacaacuucagccugggcgccgccgugaaggccggcgccugcaugcuggacggcggcaacaugcuggagaccaucaaggugagcccccagaccauggacggcauccugaagagcauccugaaggugaagaaggcccugggcauguucaucagcgacgcccccggcgagagaaaccccuacgagaacauccuguacaagaucugccugagcggcgacggcuggcccuacaucgccagcagaaccagcaucaccggcagagccugggagaacaccgugguggaccuggagagcgacggcaagccccagaaggccggcagcaacggcagcaacaagagccugcagagcgccggcuucaccgccggccugaccuacagccagcugaugacccugaaggacgccaugcugcagcuggaccccaacgccaagaccuggauggacaucgagggcagacccgaggaccccguggagaucgcccuguaccagcccagcagcggcugcuacauccacuucuucagagagcccaccgaccugaagcaguucaagcaggacgccaaguacagccacggcaucgacgugaccgaccuguucgccgcccagcccggccugaccagcgccgugaucgacgcccugcccagaaacauggugaucaccugccagggcagcgacgacaucagaaagcuguucgagagccagggcagaaaggacaucaagcugaucgacaucgcccugagcaagaccgacagcagaaaguacgagaacgccgugugggaccaguacaaggaccugugccacaugcacaccggcaucgugguggagaagaagaagagaggcggcaaggaggagaucaccccccacugcgcccugauggacugcaucauguucgacgccgccgugagcggcggccugaacaccagcgugcugagagccgugcugcccagagacaugguguucagaaccagcacccccagaguggugcugugaggacuagucccuguucccagagcccacuuuuuuuucuuuuuuugaaauaaaauagccugucuuucagaucuaaaaaaaaaaaaaaaaaaaaaaaaaaaaaaaaaaaaaaaaaaaaaaaaaaaaaaaaaaaaaaaaaaaaaaaaaaaaaaaaaaaaaaaaaaaaaaaaaaaa

SEQ ID NO: 18682 - RNA, 2040 nt, Artificial Sequence
  mRNA product Design a-2 (A100) comprising derived and/or modified sequence from LASV(Josiah;Clade IV)__NP_694869__SP-HsPLAT_NP(2-569) (opt5)
aggagaguccgcucagccagguugcagaagcggcuuagcguguguccuaaucuucucucugcguguagguaggccugugccgcaaacaagcuuaccauggacgccaugaagagaggccugugcugugugcuccugcuuugcggggcugucuucguuagccccagcgccuccaaggagaucaaaucuuuccuguggacccagagccucagacgggaacuguccggcuacugcucuaacauuaagcugcaaguggucaaagacgcucaggcccugcuccacgggcuggauuuuagcgagguuuccaaugugcagcgccuuaugagaaaggaacggcgcgacgauaacgaccugaaaagacuccgggaucugaaucaggcggugaacaaucuggucgagcucaagucuacacaacaaaagagcauccugcgcgugggaacgcuuaccuccgacgaucugcucauucuggcugccgaccuugaaaaacuuaagagcaaaguuaucagaacagagcggccccucucugccggcguguauauggggaaccuguccagccagcagcuggaucagcgcagagcucuccugaauaugauuggaaugucuggcgggaaccagggagcccgggcuggccgcgacggcgucgugagaguuugggaugugaagaaugccgagcuucugaacaaucaguucgggaccaugccuucccucacacuggcgugucuuaccaaacagggacaagucgaccugaacgaugccgugcaggcucucacagaccugggccugaucuacaccgccaaguauccgaauacgagcgaccucgaucggcugacccagucucaucccauccuuaacaugauugacacaaagaaauccagccugaauaucuccggguacaacuuuucucucggagcugccgugaaggcgggcgccugcaugcuggaugggggaaacaugcuugaaaccauuaaagucagcccucaaacaauggacggcauccugaaguccauucucaaaguuaagaaagcucugggcauguucaucagcgauacccccggggagcgcaauccuuaugaaaacauucuguacaagaucugucucucuggagacggcuggcccuauaucgccuccagaacgagcauuacagggcgggcuugggagaauaccgugguggaucuggagucugacggaaagccucagaaagccgauagcaacaauuccucuaagagccuucaguccgccggcuuuacagcugggcugaccuacagccagcucaugacccugaaagacgcgaugcugcaacuugauccgaacgccaagacauggauggacaucgaaggaagacccgaggacccugucgaaauugcucucuaccagcccucuuccggcugcuauauccacuucuuucgcgagccuacggaucugaaacaguucaagcaggacgccaaguacagccauggcauugaugugaccgaccuguuugccacacaacccgggcucaccucugcuguuaucgaugcccugccgcggaauauggugaucacaugucagggauccgacgauauuagaaaacuucuggaaagccagggccgcaaggacaucaaacucauugauaucgcgcuguccaagaccgacucucggaaauaugagaacgcugucugggaucaguacaaggaccugugccacaugcauacgggggugguuguggagaagaaaaagagaggaggcaaagaagagauuacaccucacugugcccuuauggauugcaucauguucgacgccgcugucagcgggggccucaauaccuccgugcugcgcgccguccugccccgggacaugguguuuagaaccucuacaccucgcguugugcucugaggacuagucccuguucccagagcccacuuuuuuuucuuuuuuugaaauaaaauagccugucuuucagaucuaaaaaaaaaaaaaaaaaaaaaaaaaaaaaaaaaaaaaaaaaaaaaaaaaaaaaaaaaaaaaaaaaaaaaaaaaaaaaaaaaaaaaaaaaaaaaaaaaaaa

SEQ ID NO: 18683 - RNA, 2040 nt, Artificial Sequence
  mRNA product Design a-2 (A100) comprising derived and/or modified sequence from LASV(LP;Clade I)__AAF86702__SP-HsPLAT_NP(2-569) (opt5)
aggagaguccgcucagccagguugcagaagcggcuuagcguguguccuaaucuucucucugcguguagguaggccugugccgcaaacaagcuuaccauggacgccaugaagagaggccugugcugugugcuccugcuuugcggggcugucuucguuagccccagcaacuccaaggagaucaaaucuuuccuguggacccagagccucagacgggaacuguccggcuacugcucuaauauuaagcuccaaguggucaaagacgcccaggcucugcuccacgggcuggauuuuagcgagguuuccaacgugcagcgccuuaugagaaagcagaaacgggacgaugccgaccugaagcgccucagagaucugaaucaagcggugaacaaucuggucgaacucaagucuacacagcagaaaaacgugcugcggguuggaacgcuuagcuccgacgaucugaucacccucgcugccgaccuggagaaacuuaaaagcaaggugauucgcacagaaagaccccugucuuccggcgucuauauggggaaucucagcucucagcaacuggaucagcggcgcgcccugcucuccaugaucggaaugagcggcgggccucagggaaacagaaccggcggcgacggggugguucgggugugggaugucaaaaaugcugagcugcuuaacaaucaguucggaacaaugccgucucugacccucgccugucugacaaagcaaggccagguggaccuuaacgaugcugugcaggcccugaccgaccucgggcugauuuacacggcgaaguaucccaauuccagcgaccuggauaugcucacccaaucccauccuauccugggaauggucgacacaaagaagucuagccuuaacaucuccggcuacaauuuuagccugggggccgcuguuaaagccggagcuugcaugcucgauggcggcaacaugcuggagaccauuaaggugucuccccagacaauggacgggauccuuaaauccauucugaaggugaaacgcagccucggaauguucaucucugauaccccuggcgaaagaaaccccuaugagaauauucuguacaagaucugucugagcggggaaggauggccuuauauugccucccggacgucuaucacaggccgcgcgugggagaacacccucgucgaccuggagagcgauaauaagccgcccaaacuuaacuccgccgggagcaauaagucucugcaggcugccggacucaacgcuggccugacauacucccagcugaugacccuuaaagacugcaugcuccaacuggauccuagcucuaagaccuggaucgacauugaaggcagacccgaggauccuguggaaaucgcccuguuucagcccuccagcggguguuacauucacuucuuucgggagccgacagaccucaaacaguucaagcaggacgccaaguauucccauggaaucgauguuacggaccuguuuucuacccaaccuggccuuacaagcgcugugauugaagcgcugcccagaaauaugguccuuaccugccagggguccgaugacaucaaaaagcugcuggagucucagggacgccgggauaucaaacuuauugacaucagccucuccaaggccgauagcagaaaauucgagaacgcugugugggaccaguacaaggaucugugucacaugcauacaggcguuguggucgaaaagaaaaagcgcgggggcaaagaggaaauuaccccucacugcgcccugcucgacuguaucauguuugaugccgcuacgacaggaucucugaauauuaccacccuucgggccgugcugcccagagacauggucuuccgcacauccacccccaaggugguucucugaggacuagucccuguucccagagcccacuuuuuuuucuuuuuuugaaauaaaauagccugucuuucagaucuaaaaaaaaaaaaaaaaaaaaaaaaaaaaaaaaaaaaaaaaaaaaaaaaaaaaaaaaaaaaaaaaaaaaaaaaaaaaaaaaaaaaaaaaaaaaaaaaaaaa

SEQ ID NO: 18684 - RNA, 2040 nt, Artificial Sequence
  mRNA product Design a-2 (A100) comprising derived and/or modified sequence from LASV(803213;Clade II)__AAF86704__SP-HsPLAT_NP(2-569) (opt5)
aggagaguccgcucagccagguugcagaagcggcuuagcguguguccuaaucuucucucugcguguagguaggccugugccgcaaacaagcuuaccauggacgccaugaagagaggccugugcugugugcuccugcuuugcggggcugucuucguuagccccagcgccuccaaggaggugaaaucuuuccuguggacccagagccucagacgggaacuguccggcuacugcucuaacaucaaacuucaagucguuaaggacgcucaggcccugcuccacgggcuggauuuuagcgaggugaauaacgugcagcgccuuaugagaaagcagaaacgggacgauggagaccugaagcgccucagagaucugaaucaagcggucaacaaucugguggaacucaaguccacacagcagaaaucuauucugcggguuggcacgcuuaccagcgacgaucugcucacacuggcugccgaccuugagaagcugaaauccaaggugauccgcaccgaaagaccccucagcucuggggucuauaugggaaaccuguccacacagcaacuggagcagcggcgcgcccuccugaauaugauuggcauggugggaggagcucagggcacccagccuggcagagaugggguugugcgggucugggacgugaaaaacccggaucuucugaauaaccaauucggaacaaugcccagccucacccuggccugucuuacgaagcagggccagguggaccugaaugaugcuguccucgcccugaccgaccuggggcucaucuacacagcgaaguauccuaacucuuccgaccuggaucgccuuagccaaucucaucccauucugaauaugguugacaccaaaaaguccagccucaacaucuccggauacaauuuuucucugggcgccgcugugaaagccggggcuugcaugcuugauggaggcaacaugcuggagacaaucaaggugaccccucagacgauggacggcauucucaaaagcauccugaaggucaaaagaucccuggggauguucgugagcgauacacccggagaacggaacccuuaugagaauauucucuacaagaucugucugucuggcgacggguggccguauauugccucccgcaccagcaucguugggagagcgugggaaaacacaaccguggaucuugagucugacggcaagccccagaaagucgggaccgccggaagcaauaagucccugcagucugcuggcuuuccuacaggccucacguacagccaacugaugacccugaaagauuccaugaugcagcuugaccccagcgccaagacauggauugauaucgaggggcggccugaagaccccguggagaucgcucucuaccagccgaugucuggaugcuauauucacuucuuuagagaaccuaccgaccugaaacaguucaagcaagaugccaaguacucccauggcaucgacguugccgaucuguuucccgcucagccugggcucacaagcgcggugauugaggcccugccccgcaacaugguccuuaccugucagggaucugacgauaucaaaaagcugcucgacucccagggccggagagauauuaaacugaucgacaucagccuguccaagguggauucucgcaaauucgaaaaugcugucugggaccaaugcaaggaucuuugucacaugcauacgggggugguuguggagaagaaaaagcggggcggaaaagaggaaauuacaccccacugcgcccucauggacuguaucauguuugaugccgcugucagcggcgggcugaacauuccugugcugagagccguucucccgcgcgacaugguguuccggaccuccucucccaaggucgugcugugaggacuagucccuguucccagagcccacuuuuuuuucuuuuuuugaaauaaaauagccugucuuucagaucuaaaaaaaaaaaaaaaaaaaaaaaaaaaaaaaaaaaaaaaaaaaaaaaaaaaaaaaaaaaaaaaaaaaaaaaaaaaaaaaaaaaaaaaaaaaaaaaaaaaa

SEQ ID NO: 18685 - RNA, 2043 nt, Artificial Sequence
  mRNA product Design a-2 (A100) comprising derived and/or modified sequence from LASV(GA391;Clade III)__CAA36646__SP-HsPLAT_NP(2-570) (opt5)
aggagaguccgcucagccagguugcagaagcggcuuagcguguguccuaaucuucucucugcguguagguaggccugugccgcaaacaagcuuaccauggacgccaugaagagaggccugugcugugugcuccugcuuugcggggcugucuucguuagccccagcgccuccaaggaggugagaucuuuccuguggacccagagccuccggcgcgaacuguccggcuacugcucuaacaucaaacuucaagucguuaaggacgcucaggcccugcuccacgggcuggauuuuagcgagguguccaaugugcagagacuuaugcggaaacagaagcgcgacgauggagaccugaaaagacuccgggaucugaaccaagcggucaauaaccugguggaacucaagucuacacagcagaaaagcguucugcgcgugggcacgcuuuccagcgacgaucugcucauucuggcugccgaccuugagaaacugaagucuaaagucaccagaacagaacggccccucuccagcgggguguauaugggaaaucugucuucccagcaacuggaucagcgcagagcccuccugaacaugaucggcaugaccgggguuagcggaggcggcaagggggcuucugacggaauugugcgggucugggaugugaaaaaugccgagcuucugaacaaucaguucggcacaaugccuucccucacccuggcuugucuuacaaagcaggggcaaguggaccugaacgaugccguccaggcgcucaccgaccugggacugaucuacacggccaaguauccgaauagcuccgaccucgaucgccugucucagagccaucccauucuuaacaugaucgacaccaaaaaguccagccugaauaucucuggcuacaacuuuucccucggggcugccguuaaagcuggagccugcaugcuggauggcggcaauaugcuugagacaauuaaggugagcccucaaaccauggacgggauccugaaaucuauucucaaggugaaaaagagccugggaauguucgucuccgauacacccggcgaaagaaacccuuaugagaacauccuguacaagauuugucucucuggggacggauggcccuauaucgcgagccggaccuccauugugggccgcgccugggaaaauacgguuguggaucuggagcaggacaacaaaccucagaagaucgggaauggaggcagcaacaaaucucuucaguccgcuggcuuugccgcugggcugacauacagccaacucaugacccugaaggauuucaaaugcuuuaaucugaucccgaacgccaagacauggauggacauugagggaagacccgaagauccugucgagaucgcccuuuaccagcccucuuccggcuguuaugugcacuucuuucgggaaccuaccgaccucaagcaguucaaacaggacgcuaaguacagccaugggauugauguuaccgaccuguuugcggcccaacccggacugacauccgcugugaucgaggcccucccgagaaauauggucauuacgugccagggcucugaagauauccgcaaacugcuugagagccaggggcggagagacaucaagcugauugauaucacccucuccaaagccgacucucgcaaguucgagaacgcugugugggaucaguuuaaggaccugugucacaugcauacaggcgucgugguugaaaagaagaaacggggaggcaaggaggaaauuaccccucacugcgcccugauggauuguaucauguucgacgcggcugugagcgggggacuugaugccaaaguccucagagugguucugccccgcgacaugguguuccggacauccaccccuaaggucgugcugugaggacuagucccuguucccagagcccacuuuuuuuucuuuuuuugaaauaaaauagccugucuuucagaucuaaaaaaaaaaaaaaaaaaaaaaaaaaaaaaaaaaaaaaaaaaaaaaaaaaaaaaaaaaaaaaaaaaaaaaaaaaaaaaaaaaaaaaaaaaaaaaaaaaaa

SEQ ID NO: 18686 - RNA, 2040 nt, Artificial Sequence
  mRNA product Design a-2 (A100) comprising derived and/or modified sequence from LASV(AV;Clade V)__CCA30315__SP-HsPLAT_NP(2-569) (opt5)
aggagaguccgcucagccagguugcagaagcggcuuagcguguguccuaaucuucucucugcguguagguaggccugugccgcaaacaagcuuaccauggacgccaugaagagaggccugugcugugugcuccugcuuugcggggcugucuucguuagccccagcgccuccaaggaggugaaaucuuuccuguggacccagagccucagacgggaacuguccggcuacugcucuaacaucaaacuucaagucguuaaggacgcucaggcccugcuccacgggcuggauuuuagcgagguguccaaugugcagcgccuuaugagaaagcagcggcgcgacgauucugaccugaaaagacuccgggaucugaaccaagcggucaauaaccugguggaacucaagagcacacagcagaaguccguucugcgcgugggaacgcuuagcucugacgaucugcucacccuggcugccgaccuugagaaacugaaguccaaagucacaagaaccgaacggccccucagcucuggcguguauauggggaaucuguccagccagcaacuggaucagcgcagagcccuccugaaccuuauuggaaugacaaauggcucucaggggucccaggcuggacgggacggcguugugcgcgucugggaugugaagaacgccgagcugcucaauaaccaauucggcaccaugccuagccugacacuugcuugucugaccaaacagggacagguggaccucaaugaugucguucaagcccugacggaccuggggcucaucuacaccgcgaaguauccgaacacauccgaccuggauagacuuacccagucucaucccauucugaauaugaucgacacaaagaaaagcucccucaacauuagcggcuacaauuuuucucugggggccgcugugaaggccggagcuugcaugcuugauggcgggaacaugcuggagaccaucaaaguguccccucagagcauggacggaauccucaagucuauucugaaagucaagcgggcccugggcauguucgugagcgauacgcccggcgaacgcaacccuuaugagaauauccucuacaaaauuugucuguccggggacggauggcccuauaucgcgucuagaacaagcauuguuggccgggccugggaaaacaccguggucgaucuugagacagacgggaagccucagaagaucggauccggcaauagcaacaaaucucugcaauccgcuggguuuagcgccggacucaccuacucucagcugaugacccugaaggaugcuaugcuucagcucgacccgaaugccaaaacauggauggauauugagggcagacccgaagacccuguggagguugcccuguaccagcccaucuccggcugcuauauccacuucuuucgcgaaccuacggaccugaagcaauucaaacaggaugcuaaguacagccaugggauugacaucgcggaucucuuugccgcucagcccggacugaccuccgccgugauugaggcccuuccgcggaacauggucaucacaugucagggcucugaagacauuaagaaacugcucgagagccaagggagaaaggauaucaaacugaucgacauugcucuguccaagaucgauucucgcaaauucgagaaugccgugugggaccaguauaaggaucuuugccacaugcauaccggagucgugguugaaaagaaaaagcggggcgggaaagaggaaauuacaccucacugugcgcucauggacugcaucauguuugaugcugccgugagcggcggacugaacacccugguccucagagccgugcugccccgcgacaugguuuuccggacguccacaccuagagugguccuuugaggacuagucccuguucccagagcccacuuuuuuuucuuuuuuugaaauaaaauagccugucuuucagaucuaaaaaaaaaaaaaaaaaaaaaaaaaaaaaaaaaaaaaaaaaaaaaaaaaaaaaaaaaaaaaaaaaaaaaaaaaaaaaaaaaaaaaaaaaaaaaaaaaaaa

SEQ ID NO: 18687 - RNA, 2040 nt, Artificial Sequence
  mRNA product Design a-2 (A100) comprising derived and/or modified sequence from LASV(Togo/2016/7082;Clade VI)__AMR44578__SP-HsPLAT_NP(2-569) (opt5)
aggagaguccgcucagccagguugcagaagcggcuuagcguguguccuaaucuucucucugcguguagguaggccugugccgcaaacaagcuuaccauggacgccaugaagagaggccugugcugugugcuccugcuuugcggggcugucuucguuagccccagcaacuccaaggaggugaaaucuuuccuguggacccagagccucagacgggaacuguccggcuacugcucuaauaucaaacuucaagucguuaaagacgcccaggcucugcuccacgggcuggauuuuagcgagguguccaacgugcagcgccuuaugagaaagcagaaacgggacgauggagaccugaagcgccucagagaucugaaucaagccgucaacaaucugguggaacucaagucuguucagcagaaaagcauucugcgggugggcacacuuacguccgacgaucugcucacccuggcggcugaccuugagaagcugaaaagcaaggucacacgcaccgaaagaccccucucuuccgggguguauaugggaaaccugagcucucagcaacuggaucagcggcgcgcccuccuguccaugaucggcaugagcgggggaaaucagaacucucagccuaaaggcgacggcguugugagagucugggaugugaagaaugccgaccuucugaacaaucaauucgggacaaugccgucccucacccuggcuugucuuacaaagcagggacagguggaucugaacgacgccguccaagcucucaccgaccugggccugauuuacacggccaaauaucccaauagcuccgaucucgaccggcugucucagagccauccuauccuuaacaugauugauaccaagaaauccagccugaauaucucuggguacaacuuuucccucggagcggccaucaagacaggcgcuugcaugcuggacgggggaaacaugcuugagaccauuaaaguuacaccccagaccauggauggcauccucaagagcauucugaaagugaagcgcucucugggcauguucaucagcgacacgccuggggagagaaaucccuaugaaaacauucuguacaagaucugucucuccggagauggcuggccuuauauugccucucggacagcuaucaucgggcgcgccugggagaauaccguggucgaccuggaaagcgauuccaaaccgcagaagauuggaagcaacggcucuaauaaaucccuucaaagcgcgggguuugcccccggacugacauacucucagcucaugacccugaaggacuccaugcugcagcuugauccuaacgcuaaaaccuggaucgacauugagggcagacccgaggacccuguggaaguugcccucuuccagcccaucagcggcugcuacauucacuuuuuccgggagccgacagaucugaagcaauuuaagcaggacgcuaaauauucccaugggaucgaugugacggaccuguucgccgcccagccuggacucaccucugcugucaucgaagcgcugcccagaaauauggugcuuacaugucagggcagcgaugacauuaagaaacugcucgauucccaagggcgccgggacaucaagcugauugauguuucucugaacaaaaucgacagcagaaaguuugagaaugccgugugggaucaguacaaggaccuuugccacaugcauaccggagucguggucgaaaagaagaaaaagggcgggaaagaggagauuacaccucacugugcucuccuggauugcaucauguucgacgccgccguguccggcggacugaacgcuaccguucuccgcgccgugcugccccgggacauggucuuuagaacgagcucucccaaggugguucuuugaggacuagucccuguucccagagcccacuuuuuuuucuuuuuuugaaauaaaauagccugucuuucagaucuaaaaaaaaaaaaaaaaaaaaaaaaaaaaaaaaaaaaaaaaaaaaaaaaaaaaaaaaaaaaaaaaaaaaaaaaaaaaaaaaaaaaaaaaaaaaaaaaaaaa

SEQ ID NO: 18688 - RNA, 2040 nt, Artificial Sequence
  mRNA product Design a-2 (A100) comprising derived and/or modified sequence from LASV(KAK-428;Clade n.d. (VII))__ANH09741__SP-HsPLAT_NP(2-569) (opt5)
aggagaguccgcucagccagguugcagaagcggcuuagcguguguccuaaucuucucucugcguguagguaggccugugccgcaaacaagcuuaccauggacgccaugaagagaggccugugcugugugcuccugcuuugcggggcugucuucguuagccccagcaacuccaaggaggugaaaucuuuccuguggacccagagccucagacgggaacuguccggcuacugcacaaauaucaaacuucaagucguuaaggacgcccaggcucugcuccacgggcuggauuuuucugaggugagcaacgugcagcgccuuaugagaaagcagaaacgggacgauaaugaccugaagcgccucagagaucugaaccaagccgucaauaaccugguggaacucaaguccguucagcagaaaucugugcugaaggucggaacgcuuaauagcgacgaucugcucacccuggcggcugaccuugagaaacugaaguccaaagugguucggacagaacgcccccucagcucuggcguguauauggggaaccuguccagccagcaacuggaucagagacgggcccuccugaauaugauuggaauggccggcgggucucagggaaaccagccuucccgcgacggcgucgugagagugugggaugucaagaaugcugaccuucugaacaaucaauucggcaccaugccgagccucacacuggccugucuuaccaagcaggggcagguugaucugaacgacguggugcucgcucugacagaccugggacucaucuacaccgccaaauaucccaauucuuccgaucuggaccggcuuagccaaaaccauccuguccugaacaugauugaugugaauaaguccucucucaacaucagcggcuacaauuuuucccugggggcggccguuaaagcuggagccugcaugcuugacggcgggaacaugcuggagacgauuaagaucagcccccagaccguggauggaauccucaaaucuauucugaaggucaaacgcgcucugggcauguucguguccgacacaccuggcgagagaaaucccuaugaaaacauccucuacaagguuugucugagcgggaauggauggccuuauauugccucucggaccagcaucgugggccgcgcgugggagaacacagucguggaucuugaauccaauaagaaccagccgaaagucgggaauaacggaucuaauaagaugcugcagagcuccggcuuugccaccgggcucacguacagccaacugaugacacugagagacucuaugcuucagcucgaucccaccgcuaaaacauggauugacaucgagggacggccugaggaucccguggaacuggcccuguuccagccuuccagcggcugcuacauucacuuuuucagagagcccaccgaccucaagcaguuuaaacaagacgcuaaguauucucauggcaucgauguuaacgaccuguucuccgcccagccggggcuuaccagcgccgugcuggaagcucucccucgcaauaugguccugacaugucagggauccgaugacauccggaagcugcuugauucucaggacagaaaagauauuaagcucaucgacauuagccuguccaaagcggaugcccgcaaguuugagaacgacgugugggaucaauucaaagaccugugccacaugcauacgggcaucguuguggaaaagaagaaaaagggagggaaacaggagaugacaccccacugugcucuccuggauugcauuauguuugacgccgccgucucuggcgggcuuaacgugccuacccugcgggcugugcuccccaccgacaugguuuucagaacaaucaccacgaaggucgugcugugaggacuagucccuguucccagagcccacuuuuuuuucuuuuuuugaaauaaaauagccugucuuucagaucuaaaaaaaaaaaaaaaaaaaaaaaaaaaaaaaaaaaaaaaaaaaaaaaaaaaaaaaaaaaaaaaaaaaaaaaaaaaaaaaaaaaaaaaaaaaaaaaaaaaa

SEQ ID NO: 18689 - RNA, 2040 nt, Artificial Sequence; identical to SEQ ID NO: 18683
  mRNA product Design a-2 (A100) comprising derived and/or modified sequence from LASV(Pinneo-NIG-1969;Clade I)__AIT17837__SP-HsPLAT_NP(2-569) (opt5)

SEQ ID NO: 18690 - RNA, 2040 nt, Artificial Sequence
  mRNA product Design a-2 (A100) comprising derived and/or modified sequence from LASV(ISTH0009-NIG-2011;Clade II)__AIT17405__SP-HsPLAT_NP(2-569) (opt5)
aggagaguccgcucagccagguugcagaagcggcuuagcguguguccuaaucuucucucugcguguagguaggccugugccgcaaacaagcuuaccauggacgccaugaagagaggccugugcugugugcuccugcuuugcggggcugucuucguuagccccagcguguccaaggaggucaaaucuuuccuguggacccagagccucagacgggaacuguccggcuacugcucuaacaucaaacuucaaguugugaaggacgcccaggcucugcuccacgggcuggauuuuagcgagguguccaauguccagcgccuuaugagaaagcagaaacgggacgauucugaccugaagcgccucagagaucugaaccaagccgugaauaaccugguugaacucaagagcacacagcagaaauccauucugcgggugggaacgcuuaccagcgacgaucugcucacacuggcggcugaccuugagaagcugaaaucuaaggucauccgcaccgaaagaccccucuccagcggcguguauauggggaaucugucuacacagcaacuggagcagcggcgcgcccuccugaacaugauuggaaugguuggcggggcccagggaacccagccuggcagagauggcgugguccgggugugggacgugaaaaauccggaucuucugaacaaucaauucgggacaaugcccucccucacccuggcuugucuuacgaagcagggacaggucgaccugaacgaugccguucucgcucugaccgaccugggccucaucuacacagccaaguauccuaauagcucugaccuggaucgccuuucccaaagccaucccauucugaacaugguggacaucaaaaaguccucucucaauaucagcggguacaacuuuucccugggagcggccgugaaagcuggcgccugcaugcuugaugggggaaauaugcuggagaccauuaaggucacaccucagaccauggacggcauccucaaaagcauucugaaggugaaaagaucucugggcauguucguuuccgauacgcccggggaacggaacccuuaugagaacauccucuacaagauuugucugagcggagacggcuggccguauaucgcuucucgcacaagcauuguggggagagccugggaaaauaccacagucgaucuugaguccgacggaaagccccagaaagugggcucugcggggagcaacaagucccugcagagcgccggauuuccuaccggccucaccuacucucaacugaugacacugaaagauuccaugaugcagcuugaccccagcgcuaagacguggaucgauaucgagggccggccugaagaccccguugagauugcccucuaccagccgaugucugggugcuauauccacuucuuuagagaaccuaccgaccugaaacaguucaagcaagaugcuaaguacucccauggaauugacguggccgaucuguuucccgcccagccuggccucacaagcgcugucaucgaggcgcugccccgcaauauggugcuuaccugucagggguccgacgauauuaaacggcugcucgacucucagggaagacgcgauaucaagcugaucgacauugcccugagcaaagcugauucccggagauucgaaaacgccgucugggaccaaugcaaggaucuuugucacaugcauacaggcgugguuguggagaaaaagaagcgcgggggcaaagaggaaaucacgccccacugcgcccucauggacuguauuauguaugaugcugccgucucuggaggccugaauaucccugugcugcgggcgguucucccgagagacaugguguuucgcaccagcucccccaaggucgugcugugaggacuagucccuguucccagagcccacuuuuuuuucuuuuuuugaaauaaaauagccugucuuucagaucuaaaaaaaaaaaaaaaaaaaaaaaaaaaaaaaaaaaaaaaaaaaaaaaaaaaaaaaaaaaaaaaaaaaaaaaaaaaaaaaaaaaaaaaaaaaaaaaaaaaa

SEQ ID NO: 18691 - RNA, 2040 nt, Artificial Sequence
  mRNA product Design a-2 (A100) comprising derived and/or modified sequence from LASV(ISTH2010-NIG-2012;Clade II)__AIT17483__SP-HsPLAT_NP(2-569) (opt5)
aggagaguccgcucagccagguugcagaagcggcuuagcguguguccuaaucuucucucugcguguagguaggccugugccgcaaacaagcuuaccauggacgccaugaagagaggccugugcugugugcuccugcuuugcggggcugucuucguuagccccagcgccuccaaggaggugaaaucuuuccuguggacccagagccucagacgggaacuguccggcuacugcucuaacaucaaacuucaagucguuaaggacgcucaggcccugcuccacgggcuggauuuuagcgagguguccaaugugcagcgccuuaugagaaagcagaaacgggacgauucugaccugaagcgccucagagaucugaaccaagcggucaauaaccugguggaacucaagagcacacagcagaaauccauucugcggguuggaacgcuuaccagcgacgaucugcucacacuggcugccgaccuugagaagcugaaaucuaaggugauccgcaccgaaagaccccucuccagcggcgucuauauggggaaucugucuacacagcaacuggagcagcggcgcgcccuccugaaccuuauuggaauggugggcggggcucagggaacccagccuggcagagauggcguugugcgggucugggacgugaaaaauccggaucugcucaacaaucaauucgggacaaugcccucccugacccuugccugucugacgaagcagggacagguggaccucaacgaugcuguccuggcccugaccgaccucggccugaucuacacagcgaaguauccuaauagcucugaccuugaucgccugucccaaagccaucccauucucaacaugguugacaccaaaaaguccucucugaauaucagcggguuuaacuucucccuuggagccgcugugaaagccggcgcuugcaugcuggaugggggaaauaugcucgagacaaucaaggugaccccucagacgauggacggcauucugaaaagcauccugaaggucaaaaagucucucggcauguuuguguccgauacacccggggaaagaaacccuuacgagaacauucuguauaagaucugucuuagcggagacggcuggccguacauugccucucggaccagcaucguugggcgcgcgugggaaaauacaaccguggaucuggaguccgacggaaaaccccacaaggucggcaccgccgggucuaacaaaagccuccaguccgcuggauucccuacaggccugacguauagccagcugaugacccuuaaggauucuaugaugcaacucgaccccuccgccaaaacauggauugauaucgagggcagaccugaagaccccguggagaucgcucuguaccagccgaugagcgggugcuacauucacuuuuuccgggaaccuaccgaccugaagcaguuuaagcaggaugccaaauauucucauggaaucgacguugccgaucucuuccccgcucaaccuggccugacauccgcggugauugaggcccuucccagaaauaugguccugaccugucaggggagcgacgauaucaagcgccuccuggacucccagggacggagagauauuaaacugaucgacaucgcucuuucuaaggccgauagccgccgguuugaaaacgccgugugggaccagugcaaagaucucugucauaugcacacgggcgucgugguugagaagaagaaaagagggggcaaggaggaaauuacaccccacugcgcucugauggacuguaucauguacgaugccgcgguguccggaggccugaauauuccuguccuccgcgcugugcugccgcgggacaugguuuucagaaccucuagccccaaagugguccuuugaggacuagucccuguucccagagcccacuuuuuuuucuuuuuuugaaauaaaauagccugucuuucagaucuaaaaaaaaaaaaaaaaaaaaaaaaaaaaaaaaaaaaaaaaaaaaaaaaaaaaaaaaaaaaaaaaaaaaaaaaaaaaaaaaaaaaaaaaaaaaaaaaaaaa

SEQ ID NO: 18692 - RNA, 2040 nt, Artificial Sequence
  mRNA product Design a-2 (A100) comprising derived and/or modified sequence from LASV(Lassa virus/H.sapiens-wt/NGA/2015/ISTH_0543;Clade II)__AVO03640__SP-HsPLAT_NP(2-569) (opt5)
aggagaguccgcucagccagguugcagaagcggcuuagcguguguccuaaucuucucucugcguguagguaggccugugccgcaaacaagcuuaccauggacgccaugaagagaggccugugcugugugcuccugcuuugcggggcugucuucguuagccccagcgccuccaaggaggugaaaucuuuccuguggacccagagccucagacgggaacuguccggcuacugcucuaacaucaaacuucaagucguuaaggacgcucaggcccugcuccacgggcuggauuuuagcgagguguccaaugugcagcgccuuaugagaaagcagaaacgggacgauucugaccugaagcgccucagagaucugaaccaagcggucaauaaccugguggaacucaagagcacacagcagaaauccauucugcggguuggaacgcuuaccagcgacgaucugcucacacuggcugccgaccuugagaagcugaaaucuaaggugauccgcaccgaaagaccccucuccagcggcgucuauauggggaaucugucuacacagcaacuggagcagcggcgcgcccuccugaacaugauuggaauggugggcggggcucagggaacccagccuggcagagauggcguugugcgggucugggacgugaaaaauccggaucuucugaacaaucaauucgggacaaugcccucccucacccuggccugucuuacgaagcagggacagguggaccugaacgaugcuguccucgcccugaccgaccugggccucaucuacacagcgaaguauccuaauagcucugaccuggaucgccuuucccaaagccaucccauucugaacaugguugacaccaaaaaguccucucucaauaucagcggguacaacuuuucccugggagccgcugugaaagccggcgcuugcaugcuugaugggggaaauaugcuggagacaaucaaggugaccccucagacgauggacggcauucucaaaagcauccugaaggucaaaaagucucugggcauguucguguccgauacacccggggaaagaaacccuuaugagaacauucucuacaagaucugucugagcggagacggcuggccguauauugccucucggaccagcaucguugggcgcgcgugggaaaauacaaccguggaucuugaguccgacggaaaaccccagaaggucggcucugccgggagcaacaaaucccugcagagcgcuggauuuccuaccggccucacauacucucaacugaugacgcugaaggauuccaugaugcagcuugaccccagcgccaaaaccuggauugauaucgagggcagaccugaagaccccguggagaucgcucucuaccagccgaugucugggugcuauauucacuucuuucgggaaccuacagaccugaagcaguucaagcaagaugccaaauacucccauggaaucgacguugccgaucuguuucccgcucagccuggccucaccagcgcggugauugaggcccugcccagaaauaugguccuuacaugucagggguccgacgauaucaagcgccugcucgacucucagggacggaaagauauuaagcugaucgacaucgcucugagcaaagccgauuccagacgcuucgaaaacgccgugugggaccaaugcaaggaucuuugucacaugcauaccggcgucgugguugagaagaaaaagagagggggcaaagaggaaauuacgccccacugcgcucucauggacuguaucauguaugaugccgcggugucuggaggccugaauauuccuguccugcgggcugugcucccgcgcgacaugguuuuucggacaagcucccccaaggugguccugugaggacuagucccuguucccagagcccacuuuuuuuucuuuuuuugaaauaaaauagccugucuuucagaucuaaaaaaaaaaaaaaaaaaaaaaaaaaaaaaaaaaaaaaaaaaaaaaaaaaaaaaaaaaaaaaaaaaaaaaaaaaaaaaaaaaaaaaaaaaaaaaaaaaaa

SEQ ID NO: 18693 - RNA, 2040 nt, Artificial Sequence
  mRNA product Design a-2 (A100) comprising derived and/or modified sequence from LASV(Lassa virus/H.sapiens-wt/NGA/2016/ISTH_0009;Clade II)__AVO03572__SP-HsPLAT_NP(2-569) (opt5)
aggagaguccgcucagccagguugcagaagcggcuuagcguguguccuaaucuucucucugcguguagguaggccugugccgcaaacaagcuuaccauggacgccaugaagagaggccugugcugugugcuccugcuuugcggggcugucuucguuagccccagcgccuccaaggaggugaaaucuuuccuguggacccagagccucagacgggaacuguccggcuacugcucuaacaucaaacuucaagucguuaaggacgcucaggcccugcuccacgggcuggauuuuagcgagguguccaaugugcagcgccuuaugagaaagcagaaacgggacgauucugaccugaagcgccucagagaucugaaccaagcggucaauaaccugguggaacucaagagcacacagcagaaauccauucugcggguuggaacgcuuaccagcgacgaucugcucacacuggcugccgaccuugagaagcugaaaucuaaggugauccgcaccgaaagaccccucuccagcggcgucuauauggggaaucugucuacacagcaacuggagcagcggcgcgcccuccugaacaugauuggaauggugggcggggcucagggaacccagccuggcagagauggcguugugcgggucugggacgugaaaaauccggaucuucugaacaaucaauucgggacaaugcccucccucacccuggccugucuuacgaagcagggacagguggaccugaacgaugcuguccucgcccugaccgaccugggccucaucuacacagcgaaguauccuaauagcucugaccuggaucgccuuucccaaagccaucccauucugaacaugguugacaccaaaaaguccucucucaauaucagcggguacaacuuuucccugggagccgcugugaaagccggcgcuugcaugcuugaugggggaaauaugcuggagacaaucaaggugaccccucagacgauggacggcauucucaaaagcauccugaaggucaaaaagucucugggcauguucguguccgauacacccggggaaagaaacccuuaugagaacauucucuacaagaucugucugagcggagacggcuggccguauauugccucucggaccagcaucguugggcgcgcgugggaaaauacaaccguggaucuugaguccgacggaaaaccccagaaggucggcucugccgggagcaacaaaucccugcagagcgcuggauuuccuaccggccucacauacucucaacugaugacgcugaaggauuccaugaugcagcuugaccccagcgccaaaaccuggauugauaucgagggcagaccugaagaccccguggagaucgcucucuaccagccgaugucugggugcuauauucacuucuuucgggaaccuacagaccugaagcaguucaagcaagaugccaaauacucccauggaaucgacguugccgaucuguuucccgcucagccuggccucaccagcgcggugauugaggcccugcccagaaauaugguccuuacaugucagggguccgacgauaucaagcgccugcucgacucucagggacggagagauauuaaacugaucgacaucgcucugagcaaggccgauucccgccgguucgaaaacgccgugugggaccaaugcaaagaucuuugucacaugcauaccggcgucgugguugagaagaagaaaagagggggcaaggaggaaauuacgccccacugcgcucucauggacuguaucauguaugaugccgcggugucuggaggccugaauauuccuguccugcgcgcugugcucccgcgggacaugguuuuuagaacaagcucccccaaagugguccugugaggacuagucccuguucccagagcccacuuuuuuuucuuuuuuugaaauaaaauagccugucuuucagaucuaaaaaaaaaaaaaaaaaaaaaaaaaaaaaaaaaaaaaaaaaaaaaaaaaaaaaaaaaaaaaaaaaaaaaaaaaaaaaaaaaaaaaaaaaaaaaaaaaaaa

SEQ ID NO: 18694 - RNA, 2040 nt, Artificial Sequence
  mRNA product Design a-2 (A100) comprising derived and/or modified sequence from LASV(Lassa virus/H.sapiens-wt/NGA/2016/ISTH_0017;Clade II)__AVO03568__SP-HsPLAT_NP(2-569) (opt5)
aggagaguccgcucagccagguugcagaagcggcuuagcguguguccuaaucuucucucugcguguagguaggccugugccgcaaacaagcuuaccauggacgccaugaagagaggccugugcugugugcuccugcuuugcggggcugucuucguuagccccagcgccuccaaggaggugaaaucuuuccuguggacccagagccucagacgggaacuguccggcuacugcucuagcaucaaacuucaagucguuaaggacgcucaggcccugcuccacgggcuggauuuuuccgaggugucuaacgugcagcgccuuaugagaaagcagaaacgggacgauagcgaccugaagcgccucagagaucugaaucaagcggucaacaaucugguggaacucaaguccacacagcagaaaagcauucugcggguuggaacgcuuaccucugacgaucugcucacacuggcugccgaccuugagaagcugaaauccaaggugauccgcaccgaaagaccccucagcucuggcgucuauauggggaaccuguccacacagcaacuggagcagcggcgcgcccuccugaauaugauuggaauggcuggcggggcccagggaacccagccuggcagagauggcgugguucgggugugggacgucaaaaacccggaucuucugaauaaccaauucgggacaaugcccagccucacccuggcuugucuuacgaagcagggacagguggaccugaaugaugccgugcucgcgcugaccgaccugggccucaucuacacagccaaguauccuaacucuuccgaccuggaucgccuuagccaaucccaucccauucugaauauggucgacaccaaaaagucuagccucaacaucuccggguacaauuuuagccugggagcugccguuaaagcuggcgccugcaugcuugaugggggaaacaugcuggagacaaucaaggugaccccucagacgauggacggcauucucaaaucuauccugaaggugaaaagaucccugggcauguucgucagcgaugcgcccggggaacggaauccuuaugagaacauucucuacaagaucugucugucuggagacggcuggccguauauugccagccgcacauccaucguggggagagcuugggaaaacaccacaguugaucuugagucugacggaaagccccagaaagugggcgccaccgggagcaauaagucccugcagagcgcuggauuuccuaccggccucacauacucucaacugaugacgcugaaagauuccaugaugcagcuugaccccagcgccaagaccuggauugauaucgagggccggccugaagaccccgucgagguggcccucuaccagccgguuucugggugcuauauccacuucuuuagagaaccuacagaccugaaacaguucaagcaagaugcuaaguacucccauggaauugacguggcggaucuguuucccgcccagccuggccucaccagcgcugucaucgaggcccugccccgcaacauggugcuuacaugucagggguccgacgauauuaaaaagcugcucgacucucagggacggaaagauaucaagcugauugacaucgcccugagcaaagcugauuccagacgcuucgaaaaugccgucugggaccaaugcaaggaucuuugucacaugcauaccggcgugguuguggagaagaaaaagagagggggcaaagaggaaaucacgccccacugcgcgcucauggacuguauuauguaugaugcugccgucucuggaggccugaacaucccugugcugcgggccguucucccgcgcgacaugguguuucggacaagcucccccaaggucgugcugugaggacuagucccuguucccagagcccacuuuuuuuucuuuuuuugaaauaaaauagccugucuuucagaucuaaaaaaaaaaaaaaaaaaaaaaaaaaaaaaaaaaaaaaaaaaaaaaaaaaaaaaaaaaaaaaaaaaaaaaaaaaaaaaaaaaaaaaaaaaaaaaaaaaaa

SEQ ID NO: 18695 - RNA, 2040 nt, Artificial Sequence
  mRNA product Design a-2 (A100) comprising derived and/or modified sequence from LASV(Lassa virus/H.sapiens-wt/NGA/2018/ISTH_0959;Clade II)__AVV65100__SP-HsPLAT_NP(2-569) (opt5)
aggagaguccgcucagccagguugcagaagcggcuuagcguguguccuaaucuucucucugcguguagguaggccugugccgcaaacaagcuuaccauggacgccaugaagagaggccugugcugugugcuccugcuuugcggggcugucuucguuagccccagcgccuccaaggaggugaaaucuuuccuguggacccagagccucagacgggaacuguccggcuacugcucuaacaucaaacuucaagucguuaaggacgcucaggcccugcuccacgggcuggauuuuagcgagguguccaaugugcagcgccuuaugagaaagcagaaacgggacgauucugaccugaagcgccucagagaucugaaccaagcggucaauaaccugguggaacucaagagcacccagcagaaauccauucugcggguuggaacgcuuaccagcgacgaucugcucacacuggcugccgaccuugagaagcugaaaucuaaggugauccgcaccgaaagaccccucuccagcggcgucuauauggggaaucugucuacacagcaacuggagcagcggcgcgcccuccugaaccuuauuggaauggugggcggggcucagggaacccagccuggcagagauggcguugugcgggucugggacgugaaaaauccggaucugcucaacaaucaauucgggacaaugcccucccugacccuugccugucugacgaagcagggacagguggaccucaacgaugucguucuggcucugaccgaccucggccugaucuacacagccaaguauccuaauagcucugaccuugaucgccugucccaaagccaucccauucucaacaugguggacaccaaaaaguccucucugaauaucagcggguuuaacuucucccuuggagcggccgugaaagcuggcgccugcaugcuggaugggggaaauaugcucgagacaaucaaggucaccccucagacgauggacggcauucugaaaagcauccugaaggugaaaaagucucucggcauguuuguuuccgauacacccggggaaagaaacccuuacgagaacauucuguauaagaucugucuuagcggagacggcuggccguacauugcuucucggaccagcaucguggggcgcgccugggaaaauacaaccgucgaucuggaguccgacggaaaaccccacaaggugggcaccgcggggucuaacaaaagccuccaguccgccggauucccuacaggccugacguauagccagcugaugacccuuaaggauucuaugaugcaacucgaccccuccgcuaaaacauggauugauaucgagggcagaccugaagaccccguugagaucgcccuguaccagccgaugagcgggugcuacauucacuuuuuccgggaaccuaccgaccugaagcaguuuaagcaggaugcuaaauauucucauggaaucgacguggccgaucucuuccccgcccaaccuggccugacauccgcugucauugaggcgcuucccagaaauauggugcugaccugucaggggagcgacgauaucaagcgccuccuggacucccagggacggaaagauauuaagcugaucgacaucgcccuuucuaaaacggauagcagacgcuuugaaaacgcugucugggaccagugcaaggaucucugucauaugcacacaggcgugguuguggagaagaaaaagagagggggcaaagaggaaauuacaccccacugcgcccugauggacuguaucauguacgaugccgcugucuccggaggccugaauauuccugugcuccgggccguucugccgcgcgacaugguguuccggaccucuagccccaaggucgugcuuugaggacuagucccuguucccagagcccacuuuuuuuucuuuuuuugaaauaaaauagccugucuuucagaucuaaaaaaaaaaaaaaaaaaaaaaaaaaaaaaaaaaaaaaaaaaaaaaaaaaaaaaaaaaaaaaaaaaaaaaaaaaaaaaaaaaaaaaaaaaaaaaaaaaaa

SEQ ID NO: 18696 - RNA, 2040 nt, Artificial Sequence
  mRNA product Design a-2 (A100) comprising derived and/or modified sequence from LASV(LASV003-NIG-2008;Clade II)__AIT17581__SP-HsPLAT_NP(2-569) (opt5)
aggagaguccgcucagccagguugcagaagcggcuuagcguguguccuaaucuucucucugcguguagguaggccugugccgcaaacaagcuuaccauggacgccaugaagagaggccugugcugugugcuccugcuuugcggggcugucuucguuagccccagcgccuccaaggaggugaaaucuuuccuguggacccagagccucagacgggaacuguccggcuacugcucuagcaucaaacuucaagucguuaaggacgcucaggcccugcuccacgggcuggauuuuuccgaggugucuaacgugcagcgccuuaugagaaagcagaaacgggacgauagcgaccugaagcgccucagagaucugaaucaagcggucaacaaucugguggaacucaaguccacccagcagaaaagcguucugcgggugggaacgcuuaccucugacgaucugcucacacuggcugccgaccuugagaagcugaaauccaaggucauucgcaccgaaagaccccucagcucuggcguguauauggggaaccuguccgcccagcaacuggagcagcggcgcacacuccugaauaugaucggaaugguuggcggggcucagggaacccagccuggcagagauggcgugguccgggugugggacgugaaaaacccggaucuucugaauaaccaauucgggacaaugcccagccucacccuggccugucuuacgaagcagggacaggucgaccugaaugauguugugcucgcucugaccgaccugggccucauuuacacagccaaguauccuaacucuuccgaccuggaucgccuuagccaaucccaucccauccugucuaugguggacaccaaaaagagcucccucaauauuagcggguacaacuuuucucugggagcggccgucaaagcuggcgccugcaugcuugaugggggaaauaugcuggagacaaucaaggugaccccucagacgauggacggcauccucaaauccauucugaagguuaaaaagagccugggcauguucgugucugauacacccggggaaagaaacccuuaugagaauauccucuacaagauuugucugagcggagacggcuggccguauaucgcuucccggaccucuauugucgggcgcgccugggaaaacacaaccguggaucuugagagcgacggaaaaccccagaagguuggcaccgcgggguccaacaaaagccugcagucugccggauuuccuacaggccucacguacucccaacugaugacccugaaggauagcaugaugcagcuugaccccucugcuaaaacauggaucgauauugagggcagaccugaagaccccguggagaucgcccucuaccagccgauguccgggugcuauauccacuucuuucgggaaccuaccgaccugaagcaguucaagcaagaugcuaaauacagccauggaauugacgucacagaucuguuucccgcccagccuggccucaccuccgccgugaucgaggcucugcccagaaauaugguccuuacgugucaggggucugacgauauuaagcgccugcucgacagccagggacggagagauaucaaacugauugacaucgcgcuguccaaggccgauucucgccgguucgaaaacgcugugugggaccaaugcaaagaucuuugucacaugcauacaggcguuguggucgagaagaagaaaagagggggcaaggaggaaaucacaccccacugcgcccucauggacuguauuauguaugaugccgcugugagcggaggccugaauaucccuguucugcgcgccgugcucccgcgggacauggucuuuagaaccuccagccccaaaguggugcugugaggacuagucccuguucccagagcccacuuuuuuuucuuuuuuugaaauaaaauagccugucuuucagaucuaaaaaaaaaaaaaaaaaaaaaaaaaaaaaaaaaaaaaaaaaaaaaaaaaaaaaaaaaaaaaaaaaaaaaaaaaaaaaaaaaaaaaaaaaaaaaaaaaaaa

SEQ ID NO: 18697 - RNA, 2040 nt, Artificial Sequence
  mRNA product Design a-2 (A100) comprising derived and/or modified sequence from LASV(LASV035-NIG-2009;Clade II)__AIT17589__SP-HsPLAT_NP(2-569) (opt5)
aggagaguccgcucagccagguugcagaagcggcuuagcguguguccuaaucuucucucugcguguagguaggccugugccgcaaacaagcuuaccauggacgccaugaagagaggccugugcugugugcuccugcuuugcggggcugucuucguuagccccagcgccuccaaggaggugaaaucuuuccuguggacccagagccucagacgggaacuguccggcuacugcucuagcaucaaacuucaagucguuaaagacgcucaggcccugcuccacgggcuggauuuuuccgaggugucuaacgugcagcgccuuaugagaaagcagaaacgggacgauagcgaccugaagcgccucagagaucugaaucaagcggucaacaaucugguggaacucaaguccacacagcagaaaagcauucugcggguuggaacgcuuaccucugacgaucugcucacacuggcugccgaccuugagaagcugaaauccaaggugauccgcaccgaaagaccccucagcucuggcgucuauauggggaaccuguccgcccagcaacuggagcagcggcgcgcucuccugaauaugauuggaauggugggcggggcccagggaacacagccuggcagagauggcguugugcgggucugggacgugaaaaacccggaucuucugaauaaccaauucgggaccaugcccagccucacacuggcuugucuuaccaagcagggacagguggaccugaaugaugccguccucgcgcugacggaccugggccucaucuacaccgccaaguauccuaacucuuccgaccuggaucgccuuagccaaucccaucccauucugaauaugguugacacaaagaagucuagccucaacaucuccggguacaauuuuagccugggagcugccgugaaagcuggcgccugcaugcuugaugggggaaacaugcuggagaccaucaaggugacaccucagaccauggacggcauucucaaaucuauccugaaggucaaaagaucccugggcauguucgugagcgauacgcccggggaacggaauccuuaugagaacauucucuacaagaucugucugucuggagacggcuggccguauauugcgagccgcacauccaucguugggagagccugggaaaacaccacaguggaucuugagucugacggaaagccccagaaagucggcaccaccgggagcaauaagucccugcagagcgcuggauuuccuacaggccucacguacucucaacugaugacccugaaagauuccaugaugcagcuugaccccagcgccaagacauggauugauaucgagggccggccugaagaccccguggagaucgcucucuaccagccgaugucugggugcuauauucacuucuuuagagaaccuaccgaccugaaacaguucaagcaagaugccaaguacucccauggaaucgacguugccgaucuguuucccgcucagccuggccucacaagcgcggugauugaggcccugccccgcaacaugguccuuaccugucagggguccgacgauaucaaaaagcugcucgacucucagggacggagagauauuaaacugaucgacaucgcucugagcaaggccgauucccgcaaauucgaaaaugccgugugggaccaaugcaaggaucuuugucacaugcauacgggcgucgugguugagaagaaaaagagagggggcaaagaggaaauuacaccccacugcgcucucauggacuguaucauguaugaugccgcggugucuggaggccugaacauuccuguccugcgggcugugcucccgcgcgacaugguuuuucggaccagcucccccaaggugguccugugaggacuagucccuguucccagagcccacuuuuuuuucuuuuuuugaaauaaaauagccugucuuucagaucuaaaaaaaaaaaaaaaaaaaaaaaaaaaaaaaaaaaaaaaaaaaaaaaaaaaaaaaaaaaaaaaaaaaaaaaaaaaaaaaaaaaaaaaaaaaaaaaaaaaa

SEQ ID NO: 18698 - RNA, 2040 nt, Artificial Sequence
  mRNA product Design a-2 (A100) comprising derived and/or modified sequence from LASV(LASV1000-NIG-2009;Clade II)__AIT17783__SP-HsPLAT_NP(2-569) (opt5)
aggagaguccgcucagccagguugcagaagcggcuuagcguguguccuaaucuucucucugcguguagguaggccugugccgcaaacaagcuuaccauggacgccaugaagagaggccugugcugugugcuccugcuuugcggggcugucuucguuagccccagcgccuccaaggaggugaaaucuuuccuguggacccagagccucagacgggaacuguccggcuacugcucuaacaucaaacuucaagucguuaaggacgcucaggcccugcuccacgggcuggauuuuagcgagguguccaaugugcagcgccuuaugagaaagcagaaacgggacgauucugaccugaagcgccucagagaucugaaccaagcggucaauaaccugguggaacucaagagcacacagcagaaauccauucugcggguuggaacgcuuaccagcgacgaucugcucacacuggcugccgaccuugagaagcugaaaucuaaggugauccgcaccgaaagaccccucuccagcggcgucuauauggggaaucugucuacacagcaacuggagcagcggcgcgcccuccugaacaugauuggaauggugggcggggcucagggaacccagccuggcagagauggcguugugcgggucugggacgugaaaaauccggaucuucugaacaaucaauucgggacaaugcccucccucacccuggccugucuuacgaagcagggacagguggaccugaacgaugucguucucgcucugaccgaccugggccucaucuacacagccaaguauccuaauagcucugaccuggaucgccuuucccaaagccaucccauucugaacaugguggacaccaaaaaguccucucucaauaucagcggguacaacuuuucccugggagcggccgugaaagcuggcgccugcaugcuugaugggggaaauaugcuggagacaaucaaggucaccccucagacgauggacggcauucucaaaagcauccugaaggugaaaaagucucugggcauguucguuuccgauacacccggggaaagaaacccuuaugagaacauucucuacaagaucugucugagcggagacggcuggccguauauugcuucucggaccagcaucguggggcgcgccugggaaaauacaaccgucgaucuugaguccgacggaaaaccccagaaggugggcaccgcggggucuaacaaaagccugcaguccgccggauuuccuacaggccucacguacagccaacugaugacccugaaggauucuaugaugcagcuugaccccuccgcuaaaacauggauugauaucgagggcagaccugaagaccccguugagaucgcccucuaccagccggugagcgggugcuauauucacuucuuucgggaaccuaccgaccugaagcaguucaagcaagaugcuaaauacucucauggaaucgacgucgccgaucuguuucccgcccagccuggccucacauccgcugugauugaggcgcugcccagaaauaugguccuuaccugucaggggagcgacgauaucaagcgccugcucgacucccagggacggagagauauuaaacugaucgacaucgcccugucuaaggcugauagccgccgguucgaaaacgccgugugggaccaaugcaaagaucuuugucacaugcauacgggcguuguggucgagaagaagaaaagagggggcaaggaggaaauuacaccccacugcgcccucauggacuguaucauguaugaugcugccguguccggaggccugaauauuccuguucugcgcgcggugcucccgcgggacauggucuuuagaaccucuagccccaaaguggugcugugaggacuagucccuguucccagagcccacuuuuuuuucuuuuuuugaaauaaaauagccugucuuucagaucuaaaaaaaaaaaaaaaaaaaaaaaaaaaaaaaaaaaaaaaaaaaaaaaaaaaaaaaaaaaaaaaaaaaaaaaaaaaaaaaaaaaaaaaaaaaaaaaaaaaa

SEQ ID NO: 18699 - RNA, 2040 nt, Artificial Sequence
  mRNA product Design a-2 (A100) comprising derived and/or modified sequence from LASV(LASV221-NIG-2010;Clade II)__AIT17625__SP-HsPLAT_NP(2-569) (opt5)
aggagaguccgcucagccagguugcagaagcggcuuagcguguguccuaaucuucucucugcguguagguaggccugugccgcaaacaagcuuaccauggacgccaugaagagaggccugugcugugugcuccugcuuugcggggcugucuucguuagccccagcgccuccaaggaggugaaaucuuuccuguggacccagagccucagacgggaacuguccggcuacugcucuagcaucaaacuucaagucguuaaggacgcucaggcccugcuccacgggcuggauuuuuccgaggugucuaacgugcagcgccuuaugagaaagcagcggcgcgacgauagcgaccugaaaagacuccgggaucugaaucaagcggucaacaaucugguggaacucaaguccacacagcaaaagagcauucugcgcguuggaacgcuuaccucugacgaucugcucacacuggcugccgaccuugagaaacugaaguccaaagugaucagaaccgaacggccccucagcucuggcgucuauauggggaaccuguccacacagcagcuggagcagcgcagagcccuccugaauaugauuggaauggugggcggggcucagggaacccagccuggccgggauggcguugugcgcgucugggacgugaagaacccggaucuucugaauaaccaauucgggacaaugcccagccucacccuggccugucuuacgaaacagggacagguggaccugaaugaugcuguccucgcccugaccgaccugggccucaucuacacagcgaaguauccuaacucuuccgaccuggauagacuuagccaaucccaucccauucugaauaugguugacaccaagaaaucuagccucaacaucuccggguacaauuuuagccugggagccgcugugaaggccggcgcuugcaugcuugaugggggaaacaugcuggagacaaucaaagugaccccucagacggucgacggcauucucaagucuauccugaaagugaagcggucccugggcauguucguuagcgauacacccggggaacgcaauccuuaugagaacauucucuacaaaaucugucugucuggagacggcuggccguauauugccagcagaaccuccaucguggggcgggcgugggaaaacacaaccgucgaucuugagucugacggaaagccccagaaggugggcaccgccgggagcaauaaaucccugcagagcgcuggauuuccuacaggccucacguacucucaacugaugacccugaaggauuccaugaugcagcuugaccccagcgccaaaacauggauugauaucgagggcagaccugaagaccccguugagaucgcucucuaccagccgaugucugggugcuauauucacuucuuucgcgaaccuaccgaccugaagcaguucaaacaagaugccaaguacucccauggaaucgacguggccgaucuguuucccgcucagccuggccucacaagcgcggucauugaggcccugccccggaacauggugcuuaccugucagggguccgacgauaucaagagacugcucgacucucagggacgccgggauauuaaacugaucgacaucgcucugagcaaggccgauuccagaaaauucgaaaaugccgucugggaccaaugcaaggaucuuugucacaugcauacgggcgugguuguggagaaaaagaagcgcgggggcaaagaggaaauuacaccccacugcgcucucauggacuguaucauguaugaugccgcggucucuggaggccugaacauuccugugcugcgggcuguucucccgagagacaugguguuucgcaccagcucccccaaggucgugcugugaggacuagucccuguucccagagcccacuuuuuuuucuuuuuuugaaauaaaauagccugucuuucagaucuaaaaaaaaaaaaaaaaaaaaaaaaaaaaaaaaaaaaaaaaaaaaaaaaaaaaaaaaaaaaaaaaaaaaaaaaaaaaaaaaaaaaaaaaaaaaaaaaaaaa

SEQ ID NO: 18700 - RNA, 2040 nt, Artificial Sequence
  mRNA product Design a-2 (A100) comprising derived and/or modified sequence from LASV(LASV237-NIG-2010;Clade II)__AIT17639__SP-HsPLAT_NP(2-569) (opt5)
aggagaguccgcucagccagguugcagaagcggcuuagcguguguccuaaucuucucucugcguguagguaggccugugccgcaaacaagcuuaccauggacgccaugaagagaggccugugcugugugcuccugcuuugcggggcugucuucguuagccccagcgccuccaaggaggugaaaucuuuccuguggacccagagccucagacgggaacuguccggcuacugcucuaacaucaaacuucaagucguuaaggacgcucaggcccugcuccacgggcuggauuuuagcgagguguccaaugugcagcgccuuaugagaaagcagaaacgggacgauucugaccugaagcgccucagagaucugaaccaagcggucaauaaccugguggaacucaagagcacacagcagaaauccauucugcggguuggaacgcuuaccagcgacgaucugcucacacuggcugccgaccuugagaagcugaaaucuaaggugauccgcaccgaaagaccccucuccagcggcgucuauauggggaaucugucuacacagcaacuggagcagcggcgcgcccuccugaacaugauuggaauggugggcggggcucagggaacccagccuggcagagauggcguugugcgggucugggacgugaaaaauccggaucuucugaacaaucaauucgggacaaugcccucccucacccuggccugucuuacgaagcagggacagguggaccugaacgaugcuguccucgcccugaccgaccugggccucaucuacacagcgaaguauccuaauagcucugaccuggaucgccuuucccaaagccaucccauucugaacaugguugacaucaaaaaguccucucucaauaucagcggguacaacuuuucccugggagccgcugugaaagccggcgcuugcaugcuugaugggggaaauaugcuggagaccauuaaggugacaccucagaccauggacggcauccucaaaagcauucugaaggucaaaagaucucugggcauguucguguccgauacgcccggggaacggaacccuuaugagaacauccucuacaagauuugucugagcggagacggcuggccguauaucgccucucgcacaagcauuguugggagagcgugggaaaauaccacaguggaucuugaguccgacggaaagccccagaaagucggcucugccgggagcaacaagucccugcagagcgcuggauuuccuaccggccucaccuacucucaacugaugacacugaaagauuccaugaugcagcuugaccccagcgccaagacguggaucgauaucgagggccggccugaagaccccguggagauugcucucuaccagccgaugucugggugcuauauccacuucuuuagagaaccuaccgaccugaaacaguucaagcaagaugccaaguacucccauggaauugacguugccgaucuguuucccgcucagccuggccucacaagcgcggugaucgaggcccugccccgcaauaugguccuuaccugucagggguccgacgauauuaaacggcugcucgacucucagggaagacgcgauaucaagcugaucgacauugcucugagcaaagccgauucccggagauucgaaaacgccgugugggaccaaugcaaggaucuuugucacaugcauacaggcgucgugguugagaaaaagaagcgcgggggcaaagaggaaaucacgccccacugcgcucucauggacuguauuauguaugaugccgcggugucuggaggccugaauaucccuguccugcgggcugugcucccgagagacaugguuuuucgcaccagcucccccaaggugguccugugaggacuagucccuguucccagagcccacuuuuuuuucuuuuuuugaaauaaaauagccugucuuucagaucuaaaaaaaaaaaaaaaaaaaaaaaaaaaaaaaaaaaaaaaaaaaaaaaaaaaaaaaaaaaaaaaaaaaaaaaaaaaaaaaaaaaaaaaaaaaaaaaaaaaa

SEQ ID NO: 18701 - RNA, 2040 nt, Artificial Sequence
  mRNA product Design a-2 (A100) comprising derived and/or modified sequence from LASV(LASV253-NIG-2011;Clade II)__AIT17671__SP-HsPLAT_NP(2-569) (opt5)
aggagaguccgcucagccagguugcagaagcggcuuagcguguguccuaaucuucucucugcguguagguaggccugugccgcaaacaagcuuaccauggacgccaugaagagaggccugugcugugugcuccugcuuugcggggcugucuucguuagccccagcgccuccaaggaggugaaaucuuuccuguggacccagagccucagacgggaacuguccggcuacugcucuagcaucaaacuucaagucguuaaggacgcucaggcccugcuccacgggcuggauuuuuccgaggugucuaacgugcagcgccuuaugagaaagcagaaacgggacgauagcgaccugaagcgccucagagaucugaaucaagcggucaacaaucugguggaacucaaguccacccagcagaaaagcguucugcgggugggaacgcuuaccucugacgaucugcucacacuggcugccgaccuugagaagcugaaauccaaggucauucgcaccgaaagaccccucagcucuggcguguauauggggaaccuguccacacagcaacuggagcagcggcgcgcccuccugaauaugaucggaaugguuggcggggcucagggaacccagccuggcagagauggcgugguccgggugugggacgugaaaaacccggaucuucugaauaaccaauucgggacaaugcccagccucacccuggccugucuuacgaagcagggacaggucgaccugaaugauguugugcucgcucugaccgaccugggccucauuuacacagccaaguauccuaacucuuccgaccuggaucgccuuagccaaucccaucccauccugaauaugguggacaccaaaaagucuagccucaacauuuccggguacaauuuuagccugggagcggccgucaaagcuggcgccugcaugcuugaugggggaaacaugcuggagacaaucaaggugaccccucagacgauggacggcauccucaaaucuauucugaagguuaaaaagucccugggcauguucgugagcgauacacccggggaaagaaauccuuaugagaacauccucuacaagauuugucugucuggagacggcuggccguauaucgcuagccggaccuccauugucgggcgcgccugggaaaacacaaccguggaucuugagucugacggaaaaccccagaagguuggcaccgcggggagcaauaaaucccugcagagcgccggauuuccuacaggccucacguacucucaacugaugacccugaaggauuccaugaugcagcuugaccccagcgcuaaaacauggaucgauauugagggcagaccugaagaccccguggagaucgcccucuaccagccgaugucugggugcuauauccacuucuuucgggaaccuaccgaccugaagcaguucaagcaagaugcuaaauacucccauggaauugacgucacagaucuguuucccgcccagccuggccucaccagcgccgugaucgaggcucugcccagaaacaugguccuuacgugucagggguccgacgauauuaagcgccugcucgacucucagggacggagagauaucaaacugauugacaucgcgcugagcaaggccgauucccgccgguucgaaaaugcugugugggaccaaugcaaagaucuuugucacaugcauacaggcguuguggucgagaagaagaaaagagggggcaaggaggaaaucacaccccacugcgcccucauggacuguauuauguaugaugccgcugugucuggaggccugaacaucccuguucugcgcgccgugcucccgcgggacauggucuuuagaaccagcucccccaaaguggugcugugaggacuagucccuguucccagagcccacuuuuuuuucuuuuuuugaaauaaaauagccugucuuucagaucuaaaaaaaaaaaaaaaaaaaaaaaaaaaaaaaaaaaaaaaaaaaaaaaaaaaaaaaaaaaaaaaaaaaaaaaaaaaaaaaaaaaaaaaaaaaaaaaaaaaa

SEQ ID NO: 18702 - RNA, 2040 nt, Artificial Sequence
  mRNA product Design a-2 (A100) comprising derived and/or modified sequence from LASV(LASV254-NIG-2011;Clade II)__AIT17675__SP-HsPLAT_NP(2-569) (opt5)
aggagaguccgcucagccagguugcagaagcggcuuagcguguguccuaaucuucucucugcguguagguaggccugugccgcaaacaagcuuaccauggacgccaugaagagaggccugugcugugugcuccugcuuugcggggcugucuucguuagccccagcgccuccaaggaggugaaaucuuuccuguggacccagagccucagacgggaacuguccggcuacugcucuagcaucaaacuucaagucguuaaggacgcucaggcccugcuccacgggcuggauuuuuccgaggugucuaacgugcagcgccuuaugagaaagcagaaacgggacgauagcgaccugaagcgccucagagaucugaaucaagcggucaacaaucugguggaacucaaguccacacagcagaaaagcguucugcgggugggaacgcuuaccucugacgaucugcucacacuggcugccgaccuugagaagcugaaauccaaggucauucgcaccgaaagaccccucagcucuggcguguauauggggaaccuguccacacagcaacuggagcagcggcgcgcccuccugaauaugaucggaaugguuggcggggcucagggaacccagccuggcagagauggcgugguccgggugugggacgugaaaaacccggaucuucugaauaaccaauucgggacaaugcccagccucacccuggccugucuuacgaagcagggacaggucgaccugaaugaugcuguucucgcccugaccgaccugggccucauuuacacagcgaaguauccuaacucuuccgaccuggaucgccuuagccaaucccaucccauccugaauaugguggacaccaaaaagucuagccucaacauuuccggguacaauuuuagccugggagccgcugugaaagccggcgcuugcaugcuugaugggggaaacaugcuggagacaaucaaggucaccccucagacgauggacggcauccucaaaucuauucugaaggugaaaaagucccugggcauguucguuagcgauacacccggggaaagaaauccuuaugagaacauccucuacaagauuugucugucuggagacggcuggccguauaucgccagccggaccuccauuguggggcgcgcgugggaaaacacaaucgucgaucuugagucugacggaaaaccccagaaggugggcaccgccgggagcaauaaaucccugcagagcgcuggauuuccuaccggccucacauacucucaacugaugacgcugaaggauuccaugaugcagcuugaccccagcgccaaaaccuggauugauaucgagggcagaccugaagaccccguugagaucgcucucuaccagccgaugucugggugcuauauucacuucuuucgggaaccuacagaccugaagcaguucaagcaagaugccaaauacucccauggaaucgacguggccgaucuguuucccgcucagccuggccucaccagcgcggucauugaggcccugcccagaaacauggugcuuacaugucagggguccgacgauaucaagcgccugcucgacucucagggacggagagauauuaaacugaucgacaucgcucugagcaaggccgauucccgccgguucgaaaaugccgucugggaccaaugcaaagaucuuugucacaugcauaccggcgugguuguggagaagaagaaaagagggggcaaggaggaaauuacgccccacugcgcucucauggacuguaucauguaugaugccgcggucucuggaggccugaacauuccugugcugcgcgcuguucucccgcgggacaugguguuuagaacaagcucccccaaagucgugcugugaggacuagucccuguucccagagcccacuuuuuuuucuuuuuuugaaauaaaauagccugucuuucagaucuaaaaaaaaaaaaaaaaaaaaaaaaaaaaaaaaaaaaaaaaaaaaaaaaaaaaaaaaaaaaaaaaaaaaaaaaaaaaaaaaaaaaaaaaaaaaaaaaaaaa

SEQ ID NO: 18703 - RNA, 2040 nt, Artificial Sequence
  mRNA product Design a-2 (A100) comprising derived and/or modified sequence from LASV(Nig08-04;Clade II)__ADU56611__SP-HsPLAT_NP(2-569) (opt5)
aggagaguccgcucagccagguugcagaagcggcuuagcguguguccuaaucuucucucugcguguagguaggccugugccgcaaacaagcuuaccauggacgccaugaagagaggccugugcugugugcuccugcuuugcggggcugucuucguuagccccagcgccuccaaggaggugaaaucuuuccuguggacccagagccucagacgggaacuguccggcuacugcucuaacaucaaacuucaagucguuaaggacgcucaggcccugcuccacgggcuggauuuuagcgagguguccaaugugcagcgccuuaugagaaagcagaaacgggacgauggagaccugaagcgccucagagaucugaaccaagcggucaauaaccugguggaacucaagucuacccagcagaaaagcguucugcgggugggcacgcuuaccuccgacgaucugcucacacuggcugccgaccuugagaagcugaaaagcaaggucauucgcaccgaaagaccccucucuuccgggguguauaugggaaaucugagcacacagcaacuggagcagcggaaagcccuccugucuaugaucggcaugguugggggagcucagggcacccagccuggccgcgaugggguggucagagugugggacgugaagaacccggaucuucugaauaaccaauucggaacaaugcccucccucacccuggccugucuuacgaagcagggccaggucgaccugaaugaugcuguucucgcccugaccgaccuggggcucauuuacacagcgaaauauccuaacagcucugaccuggaucggcuuucccaaagccaucccauccugaauaugguggacaccaagaaauccucucucaacauuagcggauacaauuuuucccugggcgccgcugugaaggccggggcuugcaugcuugauggaggcaacaugcuggagacaaucaaagucaccccucagacgauggacggcauccucaagagcauucugaaagugaagcgcucucuggggauguucguuuccgauacacccggagaaagaaauccuuaugagaacauccucuacaagauuugucugagcggcgacggguggccguauaucgccucucggaccagcauugugggacgcgcgugggaaaacacaaccgucgaucuugaguccgacggcaaaccccagaagguggggaccgccggaucuaauaaaagccugcaguccgcuggcuuuccuacaggccucacguacagccaacugaugacccugaaggauucuaugaugcagcuugaccccuccgccaaaacauggaucgauauugaggggagaccugaagaccccguugagaucgcucucuaccagccgaugagcggaugcuauauccacuucuuucgggaaccuaccgaccugaagcaguucaagcaagaugccaaauacucucauggcauugacgugacagaucuguuuuccgcccagcccgggcucaccagcgcugucaucgaggcgcugccuagaaacauggugcuuacgugucagggauccgacgauauuaagaaacugcucgacucucagggccgccgggauaucaagcugauugacaucagccugaauaaagccgauuccagacgcuucgaaaacgcugucugggaccaaugcaaggaucuuugucacaugcauacaggggugguuguggagaagaaaaagcggggcggaaaagaggaaaucacaccccacugcgcccucauggacuguauuauguuugaugccgcugucucuggcgggcugaauauccccauucugagagccgugcucccucgcgacaugguuuuccggaccagcuccccgaaggugguccugugaggacuagucccuguucccagagcccacuuuuuuuucuuuuuuugaaauaaaauagccugucuuucagaucuaaaaaaaaaaaaaaaaaaaaaaaaaaaaaaaaaaaaaaaaaaaaaaaaaaaaaaaaaaaaaaaaaaaaaaaaaaaaaaaaaaaaaaaaaaaaaaaaaaaa

SEQ ID NO: 18704 - RNA, 2043 nt, Artificial Sequence
  mRNA product Design a-2 (A100) comprising derived and/or modified sequence from LASV(GA391;Clade III)__AAA46284__SP-HsPLAT_NP(2-570) (opt5)
aggagaguccgcucagccagguugcagaagcggcuuagcguguguccuaaucuucucucugcguguagguaggccugugccgcaaacaagcuuaccauggacgccaugaagagaggccugugcugugugcuccugcuuugcggggcugucuucguuagccccagcgccuccaaggaggugagaucuugccuguggacccagagccuccggcgcgaacuguccggcuacuguucuaacaucaaacuucaagucguuaaggacgcucaggcccugcuccacgggcuggauuucagcgagguguccaaugugcagagacuuaugcggaaacagaagcgcgacgauggagaccugaaaagacuccgggaucugaaccaagcggucaauaaccugguggaacucaagucuacacagcagaaaagcguucugcgcgugggcacgcuuuccagcgacgaucugcucauucuggcugccgaccuugagaaacugaagucuaaagucaccagaacagaacggccccucuccagcgggguguauaugggaaaucugucuucccagcaacuggaucagcgcagagcccuccugaacaugaucggcaugaccgggguuagcggaggcggcaagggggcuucuaauggaauugugcgggucugggacgugaaaaacgccgagcuucugaauaaccaguuuggcacaaugccuucccucacccuggcuugccuuacaaagcaggggcaaguggaucugaaugacgccguccaggcgcucaccgaucugggacugaucuacacggccaaguauccgaacagcuccgaccucgaccgccugucucagagccaucccauucuuaauaugaucgauaccaaaaaguccagccugaacaucucuggcuacaauuucucccucggggcugccguuaaagcuggagccuguaugcuggacggcggcaacaugcuugagacaauuaaggugagcccucaaaccauggaugggauccugaaaucuauucucaaggugaaaaagagccugggaauguuugucuccgacacacccggcgaaagaaacccuuaugagaauauccuguacaagauuugccucucuggggauggauggagcuauaucgcgucccggaccagcauugugggccgcgccugggaaaacacgguuguggaccuggagcaggauaauaaaccccagaagaucgggaacggaggcucuaauaaaucccuucagagcgcuggcuucgccgcugggcugaucuacucucaacucaugacacugaaggacuuuaaauguuucaaccugauuccuaaugccaagaccuggauggauaucgagggaagaccggaagaccccgucgagauugcccuuuaccagccuuccagcggcugcuaugugcacuuuuuccgggaacccacagaucucaagcaguuuaaacaggacgcuaaguacucccaugggagagacguuaccgaucuguucgcggcccaaccuggacugaccucugcugugaucgaggcccucccccgcaacauggucauuacaugucagggcagcgaagacauccggaaacugcuugagucccaggggagacgcgauaucaagcugauugacaucacgcucucuaaagccgauagccggaaguuugagaaugcugugugggaccaguucaaggaucugugccacaugcauaccggcgucgugguugaaaagaagaaaagaggaggcaaggaggaaauuacaccgcacugugcccugauggacugcaucauguuugaugcggcuguguccgggggacuugacgccaaaguccuccgcgugguucugccucgggauaugguguucagaaccagcacacccaaggucgugcugugaggacuagucccuguucccagagcccacuuuuuuuucuuuuuuugaaauaaaauagccugucuuucagaucuaaaaaaaaaaaaaaaaaaaaaaaaaaaaaaaaaaaaaaaaaaaaaaaaaaaaaaaaaaaaaaaaaaaaaaaaaaaaaaaaaaaaaaaaaaaaaaaaaaaa

SEQ ID NO: 18705 - RNA, 2040 nt, Artificial Sequence
  mRNA product Design a-2 (A100) comprising derived and/or modified sequence from LASV(Nig08-A19;Clade III)__ADU56619__SP-HsPLAT_NP(2-569) (opt5)
aggagaguccgcucagccagguugcagaagcggcuuagcguguguccuaaucuucucucugcguguagguaggccugugccgcaaacaagcuuaccauggacgccaugaagagaggccugugcugugugcuccugcuuugcggggcugucuucguuagccccagcgccuccaaggaggugaaaucuuuccuguggacccagagccucagacgggaacuguccggcuacugcucuaacaucaaacuucaagucguuaaggacgcucaggcccugcuccacgggcuggauuuuagcgagguguccaaugugcagcgccuuaugagaaagcagaaacgggacgauggagaccugaagcgccucagagaucugaaccaagcggucaauaaccugguggaacucaagucuacacagcagaaaagcguucugcgggugggcacgcuuuccagcgacgaucugcucguccuggcugccgaccuugagaagcugaaaucuaaggugguucgcaccgaaagaccccucuccagcgggauuuauaugggaaaucugucuucccagcaacuggaucagcggaaagcccuccugaacaugaucggcaugacagggggaaauggcggccgcaacaccacaagcgacgggauugugagagucugggaugugaagaaugcugagcuucugaacaaucaguucggaaccaugccuucucucacacuggccugucuuaccaagcagggccaaguggaccugaacgaugcuguccaggcccucacggaccuggggcugaucuacaccgcgaaauaucccaauuccagcgaccucgaucggcuggcccagucccauccgauucuuaacaugaucgacacaaagaaaucuagccugaauaucuccggauacaacuuuagccucggcgcugccguuaaggcuggggccugcaugcuggauggaggcaacaugcuugagaccauuaaagugucuccucaaacaauggacggcauccugaaguccauucucaaagugaagcgcagccuggggauguucaucucugauacccccggagaaagaaauccuuaugagaacauucuguacaagaucugucucagcggcgacggguggcccuauauugcgucccggacgucuaucgucggacgcgccugggaaaauacagugguugaucuggagagcgacaacaaaccucagaagaccggcaaugggggauccaacaaaagccuucagucugcuggcuuugccgcuggccugacauacucccagcucaugacccugaaggauagcaugcugcaacuugacccgaaugccaaaaccuggauggauaucgaggggagacccgaagacccuguggagauugcccucuaccagcccucuuccggaugcuauauccacuucuuucgggaaccuacagaccugaagcaguucaagcaggaugcuaaauacagccauggcauugacgucacggaucuguuugcggcccaacccgggcucaccuccgcugugaucgaggcccugccgagaaacaugguuauuacaugucagggaucugaagacauccgcaaacuucuggagagccagggccggagagauaucaagcucauugacaucucccugucuaagguggauagccgcaaauucgagaaugccgucugggaccaguuuaaggaucugugccacaugcauaccgggauuguggucgaaaagaaaaagcggggcggaaaagaggaaaucacaccucacugugcucuuauggacugcauuauguucgaugccgcgguguccggcgggguugacgcuaaggugcucagagccguccugccccgcgauaugguguuucggaccagcacgccuaaaguugugcugugaggacuagucccuguucccagagcccacuuuuuuuucuuuuuuugaaauaaaauagccugucuuucagaucuaaaaaaaaaaaaaaaaaaaaaaaaaaaaaaaaaaaaaaaaaaaaaaaaaaaaaaaaaaaaaaaaaaaaaaaaaaaaaaaaaaaaaaaaaaaaaaaaaaaa

SEQ ID NO: 18706 - RNA, 2040 nt, Artificial Sequence
  mRNA product Design a-2 (A100) comprising derived and/or modified sequence from LASV(G1180-SLE-2010;Clade IV)__AIT17169__SP-HsPLAT_NP(2-569) (opt5)
aggagaguccgcucagccagguugcagaagcggcuuagcguguguccuaaucuucucucugcguguagguaggccugugccgcaaacaagcuuaccauggacgccaugaagagaggccugugcugugugcuccugcuuugcggggcugucuucguuagccccagcgccuccaaggagaucaaaucuuuccuguggacccagagccucagacgggaacuguccggcuacugcucuaacauuaagcugcaaguggucaaagacgcucaggcccugcuccacgggcuggauuuuagcgagguuuccaaugugcagcgccuuaugagaaaggaacggcgcgacgauaacgaccugaaaagacuccgggaucugaaucaggcggugaacaaucuggucgagcucaagucuacacaacaaaagagcauccugcgcgugggaacgcuuaccuccgacgaucugcucauucuggcugccgaccuugaaaaacuuaagagcaaaguuaucagaacagagcggccccucucugccggcguguauauggggaaccuguccagccagcagcuggaucagcgcagagcucuccugucuaugauuggaauguccagcggcaaucagcgggcccaggcugggcgcgacggagucgugagaguuugggaugugaagaacgucgagcuucugaauaaccaguucggcaccaugccuucucucacacuggccugucuuaccaaacaaggccagguggaccugaaugaugcggugcaggcccucacagaccuggggcugaucuacaccgcuaaguauccgaacacguccgaccucgaucggcugacccaaagccaucccauccuuaauaugauugacacaaagaaauccucucugaacaucagcggauacaauuuuucccucggcgccgcugucaaggccggggcgugcaugcuggauggaggcaacaugcuugaaaccauuaaaguuagcccucagacaauggacgggauccugaagucuauucucaaagugaagaaagcccugggaauguucaucuccgauacccccggcgagcgcaacccuuaugaaaauauucuguacaagaucugucucagcggcgacggguggcccuauaucgcuucuagaacgagcauuacaggacgggccugggagaacaccguggucgaucuggaguccgacggcaagccucagaaagcugggucuaauaacagcaauaagucccuucagagcgugggauuuacagccggccugaccuacucucaacucaugacccugaaagaugccaugcugcagcuugacccgaacgcuaagacauggauggauaucgaagggagacccgaggacccuguugaaauugcgcucuaccagcccuccagcggaugcuauauccacuucuuucgcgagccuacggaccugaaacaguucaagcaagaugccaaguacucucauggcauugacgugaccgaucuguuugcugcccagcccggccucacauccgccgucaucgacgcucugccgcggaauauggugaucaccugucaggggagcgaugacauuagaaaacuucuggaaucccagggacgcaaggauaucaaacucauugacaucgcccugucuaagacagauagccggaaauaugagaacgcgguuugggaccaauacaaggaucugugccacaugcauaccggcguggucguggagaagaaaaagagagggggaaaagaagagauuacgccucacugugcucuuauggacugcaucauguucgaugccgccgucuccggcgggcucaauacaucugugcugcgcgcuguucugccccgggacaugguguuuagaaccagcaccccucgcgucgugcucugaggacuagucccuguucccagagcccacuuuuuuuucuuuuuuugaaauaaaauagccugucuuucagaucuaaaaaaaaaaaaaaaaaaaaaaaaaaaaaaaaaaaaaaaaaaaaaaaaaaaaaaaaaaaaaaaaaaaaaaaaaaaaaaaaaaaaaaaaaaaaaaaaaaaa

SEQ ID NO: 18707 - RNA, 2040 nt, Artificial Sequence
  mRNA product Design a-2 (A100) comprising derived and/or modified sequence from LASV(G1442-SLE-2011;Clade IV)__AIT17181__SP-HsPLAT_NP(2-569) (opt5)
aggagaguccgcucagccagguugcagaagcggcuuagcguguguccuaaucuucucucugcguguagguaggccugugccgcaaacaagcuuaccauggacgccaugaagagaggccugugcugugugcuccugcuuugcggggcugucuucguuagccccagcgccuccaaggaggugaaaucuuuccuguggacccagagccucagacgggaacuguccggcuacugcucuaacaucaaacuucaagucguuaaggacgcucaggcccugcuccacgggcuggauuuuagcgagguguccaaugugcagcgccuuaugagaaagcagcggcgcgacgauaacgaccugaaaagacuccgggaucugaaucaagcggucaacaaucugguggaacucaagucuacacagcaaaagagcguucugcgcgugggaacgcuuaccuccgacgaucugcucguccuggcugccgaccuugagaaacuuaagagcaaagugauuagaacagaacggccccucucugccggcguuuauauggggaaccuguccagccagcagcuggaucagcgcagagcucuccugaauaugaucggaaugucuggcgggauucagggaacccggacaggccgcgacggcguggucagagugugggaugugaagaacgccgaccuucugaauaaccaguucgggaccaugccuucccucacacuggcuugucuuaccaaacaaggacaggucgaucugaaugacguugugcaggcccucacggaccugggccugaucuacaccgcgaaguauccgaacgccagcgaucucgaccggcugacacaaucucaucccauucuuaauaugaucgauaccaagaaauccagccugaacaucuccggguacaauuuuucucucggagcugccgugaaggcuggcgccugcaugcuggacgggggaaacaugcuugagacaauuaaagucagcccucagaccauggauggcauccugaaguccauucucaaagugaagaaaacgcugggcauguucaucagcgacacacccggggagcgcaacccuuaugaaaauauucuguacaagaucugucucucuggagauggcuggcccuauauugcguccagaaccagcaucacagggcgggccugggagaacaccguuguggaccuggaaucugauggaaagccucagaaagcuggcagcaauaacuccaauaagucucuucagagcgccggguuugcugccggacugaccuacucccaacucaugacacugaaagacgccaugcugcagcuugauccgaacgcuaagacguggauggacaucgagggcagacccgaggacccugucgaaauugcgcucuaccagcccagcucuggcugcuauauccacuucuuucgcgagccuaccgaucugaaacaguucaagcaagacgccaaguacucccaugggauugaugugacagaccuguuugcugcccagcccggacucaccagcgccguuaucgaagcucugccgcggaauauggugauuacaugucagggcucugaugacaucaaaaagcugcuggagucccaggggagaaaagauaucaagcucauugacaucgcccugagcaaaaccgauucccgcaaguaugaaaacgcggucugggaccaauacaaggaucugugccacaugcauacgggaguggucguggagaaaaagaaacggggcgggaaggaggaaauuacaccucacugugcucuuauggacugcaucauguucgaugccgccguuucuggcggacucaauacccuggugcugagagcuguccucccccgcgacaugguguuucggaccagcacaccuagaguugugcugugaggacuagucccuguucccagagcccacuuuuuuuucuuuuuuugaaauaaaauagccugucuuucagaucuaaaaaaaaaaaaaaaaaaaaaaaaaaaaaaaaaaaaaaaaaaaaaaaaaaaaaaaaaaaaaaaaaaaaaaaaaaaaaaaaaaaaaaaaaaaaaaaaaaaa

SEQ ID NO: 18708 - RNA, 2040 nt, Artificial Sequence
  mRNA product Design a-2 (A100) comprising derived and/or modified sequence from LASV(G3010-SLE-2013;Clade IV)__AIT17345__SP-HsPLAT_NP(2-569) (opt5)
aggagaguccgcucagccagguugcagaagcggcuuagcguguguccuaaucuucucucugcguguagguaggccugugccgcaaacaagcuuaccauggacgccaugaagagaggccugugcugugugcuccugcuuugcggggcugucuucguuagccccagcgccuccaaggagaucaaaucuuuccuguggacccagagccucagacgggaacuguccggcuacugcucuaacauuaaacuucaaguggucaaagacgcucaggcccugcuccacgggcuggauuuuagcgagguuuccaaugugcagcgccuuaugagaaaggaacggcgcgacgauaacgaccugaaaagacuccgggaucugaaucaggcggugaacaaucuggucgagcucaagucuacacaacaaaagagcauccugcgcgugggaacgcuuaccuccgacgaucugcucauucuggcugccgaccuugaaaaacuuaagagcaaaguuacaagaaccgagcggccccucucugccggcguguauauggggaaccuguccagccagcagcuggaucagcgcagagcucuccugucuaugaucggaauguccagcggcguccagggggcccgggcuggacgcgacggcgugguuagagugugggaugucaagaaugccgagcuucugaacaaucaguucggcacaaugccuucucucacccuggcgugucuuacaaaacaggggcaaguggaccugaacgaugugguccaggcccucaccgaccugggacugauuuacacggcuaaguauccgaauaccuccgaccucgaucggcugacacagagccaucccauccuuaacaugaucgacaccaagaaauccucucugaauauuagcggcuacaacuuuucccucggggccgcuguuaaggccggagcgugcaugcuggauggcgggaauaugcuugaaacaaucaaagugagcccucaaaccauggacggcauucugaagucuauccucaaagugaagaaagcccugggaauguucauuuccgagacgcccggcgaacgcaacccuuaugagaacauccuguacaagauuugucucagcggggauggauggcccuauaucgcuucuagaacaagcaucaccggccgggccugggagaauacagucguggaccuggaauccgaugggaagccucagaaagcuggaucuaacaauagcaacaagucccuucagagcgccggcuuuaccgccgggcugaccuacucucagcucaugacacugaaagacgcuaugcugcaacuugauccgaaugcgaagacguggauggacauugagggaagacccgaagauccuguugagguggcccucuaccagcccuccagcggcugcuauauccacuucuuucgcgaaccuaccgaccugaaacaguucaagcaggacgcuaaguacucucauggcauugaugucacagaccuguuugccgcccaacccgggcucaccuccgcugugaucgaugcccugccgcggaacaugguuauuacaugucagggaagcgacgauaucaaaaagcugcuggagucccagggcagaaaagacaucaagcucauugauaucgcgcugucuaaaaccgacagccgcaaguaugagaaugcugugugggaucaguacaaggaccugugccacaugcauacgggggucguggucgaaaagaagaaacggggaggcaaggaggaaauuacaccucacugugcccuuauggauugcaucauguucgacgccgcuguguccgggggccucaacaccucuguucugagagccgugcugccccgcgauauggucuuucggaccagcacaccuagagugguucucugaggacuagucccuguucccagagcccacuuuuuuuucuuuuuuugaaauaaaauagccugucuuucagaucuaaaaaaaaaaaaaaaaaaaaaaaaaaaaaaaaaaaaaaaaaaaaaaaaaaaaaaaaaaaaaaaaaaaaaaaaaaaaaaaaaaaaaaaaaaaaaaaaaaaa

SEQ ID NO: 18709 - RNA, 2040 nt, Artificial Sequence
  mRNA product Design a-2 (A100) comprising derived and/or modified sequence from LASV(G502-SLE-2009;Clade IV)__AIT17127__SP-HsPLAT_NP(2-569) (opt5)
aggagaguccgcucagccagguugcagaagcggcuuagcguguguccuaaucuucucucugcguguagguaggccugugccgcaaacaagcuuaccauggacgccaugaagagaggccugugcugugugcuccugcuuugcggggcugucuucguuagccccagcgccuccaaggagaucaaaucuuuccuguggacccagagccucagacgggaacuguccggcuacugcucuaacauuaagcugcaaguggucaaagacgcucaggcccugcuccacgggcuggauuuuagcgagguuuccaaugugcagcgccuuaugagaaaggaacggcgcgacgauaacgaccugaaaagacuccgggaucugaaucaggcggugaacaaucuggucgagcucaagucuacacaacaaaagagcauccugcgcgugggaacgcuuaccuccgacgaucugcucauucuggcugccgaccuugaaaaacuuaagagcaaaguuaucagaacagagcggccccucucugccggcguguauauggggaaccuguccagccagcagcuggaucagcgcagagcucuccugucuaugauuggaauguccggcgggaaucagggaguccgggccggcaaggacggcgugguucgcgugugggaugucaaaaacgcugagcuucugaauaaccaguucgggaccaugccuagccucacacuggccugucuuaccaagcagggacaaguggaccugaaugaugcggugcaggcccucacagaccugggccugaucuacaccgcuaaguauccgaacacgucugaccucgauagacugacccagucccaucccauccuuaauaugauugacaccaaaaagagcucccugaacaucucuggguacaauuuuagccucggagccgcugucaaagccggcgcgugcaugcuggaugggggaaacaugcuugaaacaauuaagguuuccccucaaacaauggacggcauccugaaaagcauucucaaggugaaaaaggcccugggcauguucaucucugauacccccggggagcggaacccuuaugaaaauauucuguacaagaucugucucuccggagacggcuggcccuauaucgcuagccgcacgucuauuacagggagagccugggagaacaccguggucgaucuggagagcgacggaaaaccucagaaggcuggcuccaauaacucuaauaaaagccuucaguccgccggguuuacagccggacugaccuacagccagcucaugacccugaaggaugcuaugcugcaacuugacccgaacacaaaaacguggauggauaucgaaggccggcccgaggacccuguggaaauugcgcucuaccagcccucuuccggcugcuauauccacuucuuuagagagccuaccgaccugaagcaguucaagcaggaugccaaauacagccaugggauugacguuacagaucuguuugcugcccaacccggacucaccucugccgugaucgacgcucugccgcgcaauauggucaucacaugucagggcuccgaugacauucggaaacuucuggaaagccaggggagaaaggauaucaagcucauugacaucgcccugaacaaaaccgauucccgcaaguaugagaaugcggugugggaccaguacaaggaucugugccacaugcauacgggaguuguggucgagaaaaagaaacggggcgggaaggaagagauuacaccucacugugcucuuauggacugcaucauguucgaugccgccgugucuggcggacucaacaccagcguccugagagcugugcugccccgcgacaugguuuuucggaccuccacaccuagagugguccucugaggacuagucccuguucccagagcccacuuuuuuuucuuuuuuugaaauaaaauagccugucuuucagaucuaaaaaaaaaaaaaaaaaaaaaaaaaaaaaaaaaaaaaaaaaaaaaaaaaaaaaaaaaaaaaaaaaaaaaaaaaaaaaaaaaaaaaaaaaaaaaaaaaaaa

SEQ ID NO: 18710 - RNA, 2040 nt, Artificial Sequence
  mRNA product Design a-2 (A100) comprising derived and/or modified sequence from LASV(G733-SLE-2010;Clade IV)__AIT17155__SP-HsPLAT_NP(2-569) (opt5)
aggagaguccgcucagccagguugcagaagcggcuuagcguguguccuaaucuucucucugcguguagguaggccugugccgcaaacaagcuuaccauggacgccaugaagagaggccugugcugugugcuccugcuuugcggggcugucuucguuagccccagcgccuccaaggagaucaaaucuuuccuguggacccagagccucagacgggaacuguccggcuacugcucuaacauuaagcugcaaguggucaaagacgcucaggcccugcuccacgggcuggauuuuagcgagguuuccaaugugcagcgccuuaugagaaaggaacggcgcgacgauaacgaccugaaaagacuccgggaucugaaucaggcggugaacaaucuggucgagcucaagucuacacaacaaaagagcgugcugcgcguuggaacgcuuaccuccgacgaacugcucgugcuggcugccgaucuugagaaacuuaagagcaaagucaucagaacagagcggccccucucugccggcguguauauggggaaccuguccagccagcagcuggaccagcgcagagcucuccugucuaugauuggaauguccggcgggaaucagggagcccggaccggccgcgauggcguugugagagucugggacgugaagaacgcugaacuucugaauaaccaguucgggacaaugccuagccucacccuggccugucuuacaaaacagggacaaguggaucugaaugacgcgguccaggcccucaccgaucugggccugaucuacacggcuaaguauccgaacaccucugaccucgaccggcugacacagucccaucccauucuuaauaugaucgauaccaagaaaagcucccugaacaucucuggguacaauuuuagccucggagccgcuguuaaggccggcgcgugcaugcuggacgggggaaacaugcuugagacaauuaaaguguccccucaaaccauggauggcauccucaagagcauucugaaagugaagaaagcccugggcauguucaucucugacacgcccggggaacgcaacccuuaugagaauauucuguacaagaucugucucuccggagauggcuggcccuauauugcuagcagaacaucuaucaccgggcgggccugggagaacacagucguggaccuggaaagcgauggaaagccucagaaagcuggcuccaauaacucuaauaagagccuucaguccgccggguuuaccgccggacugaccuacagccagcucaugacacugaaagacgcuaugcugcaacuugauccgaacgcgaagacguggauggacaucgagggcagacccgaagauccuguugagauugcccucuaccagcccucuuccggcugcuauauccacuucuuucgcgaaccuaccgaccugaaacaguucaagcaggacgcuaaguacagccaugggauugaugugacagaccuguuugccgcccaacccggacucaccucugcugucaucgaugcccugccgcggaauauggugauuacaugucagggcuccgacgauaucagaaaacuucuggagagccaggggcgcaaggacaucaaacucauugauaucgcgcuguccaagauugacucucggaaauaugagaacgcuguuugggaucaguacaaggaccugugccacaugcauaccggaguggucguggaaaagaaaaagagaggcgggaaagaggaaaucacgccucacugugcccuuauggauugcauuauguucgacgccgcugucagcggcggacucaauucccuggugcugcgcgccguucucccccgggauaugguguuuagaacaucuaccccucgcgucgugcugugaggacuagucccuguucccagagcccacuuuuuuuucuuuuuuugaaauaaaauagccugucuuucagaucuaaaaaaaaaaaaaaaaaaaaaaaaaaaaaaaaaaaaaaaaaaaaaaaaaaaaaaaaaaaaaaaaaaaaaaaaaaaaaaaaaaaaaaaaaaaaaaaaaaaa

SEQ ID NO: 18711 - RNA, 2040 nt, Artificial Sequence
  mRNA product Design a-2 (A100) comprising derived and/or modified sequence from MOPV/LASV reassortant(IGS-1;Clade IV)__AFY05578__SP-HsPLAT_NP(2-569) (opt5)
aggagaguccgcucagccagguugcagaagcggcuuagcguguguccuaaucuucucucugcguguagguaggccugugccgcaaacaagcuuaccauggacgccaugaagagaggccugugcugugugcuccugcuuugcggggcugucuucguuagccccagcgccuccaaggagaucaaaucuuuccuguggacccagagccucagacgggaacuguccggcuacugcucuaacauuaaacuucaaguggucaaggacgcucaggcccugcuccacgggcuggauuuuagcgagguuuccaaugugcagcgccuuaugagaaaggaacggcgcgacgauaacgaccugaaaagacuccgggaucugaaucaggcggugaacaaucuggucgagcucaagucuacacaacaaaagagcauccugcgcgugggaacgcuuaccuccgacgaucugcucauucuggcugccgaccuugaaaaacugagaagcaagguuauccggacagagcgcccccucucugccggcguguauauggggaaccuguccagccagcagcuggaucagagacgggcucuccugaauaugauuggaaugucuggcgggaaccagggagcccgcgcuggcagagacggcgucgugcggguuugggaugugaaaaaugccgagcuucuguccaaccaguucgggaccaugccuagccucacacuggcgugucuuaccaagcagggacaagucgaccugaaugaugccgugcaggcucucacagaccugggccugaucuacaccgccaaauauccgaacacgucugaccucgaucgccugacccagucccaucccauccuuaauaugauugacacaaagaaaagcucccugaacaucucuggguacaauuuuagccucggagcugccgugaaggcgggcgccugcaugcuggaugggggaaacaugcuugaaaccauuaaggucuccccucaaacaauggacggcauccugaaaagcauucucaagguuaaaaaggcucugggcauguucaucucugauacccccggggagagaaacccuuaugaaaauauucuguacaaaaucugucucuccggagacggcuggcccuauaucgccagccggacgucuauuacagggagagcuugggagaacaccgugguggaucuggagagcgacggaaagccucagaaggccgauuccaauaacucuagcaaaucccuucagagcgccggcuuuacagcugggcugaccuacucucagcucaugacccugaaggacgcgaugcugcaacuugauccgaaugccaaaacauggauggacaucgaaggacgccccgaggacccugucgaaauugcucucuaccagcccuccagcggcugcuauauccacuucuuucgggagccuacggaucugaagcaguucaaacaggacgccaaguacucucauggcauugaugugaccgaccuguuugccacacaacccgggcucaccuccgcuguuaucgaugcccugccgagaaacauggugaucacaugucagggaagcgacgauauucgcaaacuucuggaaucccagggccggaaggacaucaagcucauugauaucgaccugucuaaaaccgauagcagaaaguaugagaaugcggucugggaccaguacaaagaucugugccacaugcauacgggggugguuguggagaagaagaaacgcggaggcaaggaagagauuacaccucacugugcucuuauggacugcaucauguucgacgccgccgucuccgggggccucaacaccucugugcugcgggcuguccugcccagagauaugguguuucgcaccagcacaccucggguugugcucugaggacuagucccuguucccagagcccacuuuuuuuucuuuuuuugaaauaaaauagccugucuuucagaucuaaaaaaaaaaaaaaaaaaaaaaaaaaaaaaaaaaaaaaaaaaaaaaaaaaaaaaaaaaaaaaaaaaaaaaaaaaaaaaaaaaaaaaaaaaaaaaaaaaaa

SEQ ID NO: 18712 - RNA, 2040 nt, Artificial Sequence
  mRNA product Design a-2 (A100) comprising derived and/or modified sequence from LASV(LM765-SLE-2012;Clade IV)__AIT17815__SP-HsPLAT_NP(2-569) (opt5)
aggagaguccgcucagccagguugcagaagcggcuuagcguguguccuaaucuucucucugcguguagguaggccugugccgcaaacaagcuuaccauggacgccaugaagagaggccugugcugugugcuccugcuuugcggggcugucuucguuagccccagcgccuccaaggagaucaaaucuuuccuguggacccagagccucagacgggaacuguccggcuacugcucuaacauuaagcugcaaguggucaaagacgcucaggcccugcuccacgggcuggauuuuagcgagguuuccaaugugcagcgccuuaugagaaaggaacggcgcgacgauaacgaccugaaaagacuccgggaucugaaucaggcggugaacaaucuggucgagcucaagucuacacaacaaaagagcauccugcgcgugggaacgcuuaccuccgacgaucugcucauucuggcugccgaccuugaaaaacuuaagagcaaaguuacaagaaccgagcggccccucucugccggcguguauauggggaaccuguccagccagcagcuggaucagcgcagagcucuccuggacaugaucggaaugucuggcuccaaucagggggcccgggcuggacgcgauggcgucgugagaguuugggacgugaagaacgccgagcuucugaauaaccaguucggcacaaugccuagccucacccuggcgugucuuacaaaacaggggcaagucgaucugaaugacgccgugcaggcucucaccgaccugggacugauuuacacggccaaguauccgaacaccucugaucucgaccggcugacacagucccaucccauccuuaauaugaucgauaccaagaaaagcucccugaacauuucuggcuacaauuuuagccucggggcugccgugaaggcgggagccugcaugcuggacggcgggaacaugcuugaaacaaucaaagucuccccucaaaccauggauggcauucucaagagcauccugaaaguuaagaaagcucugggaauguucauuucugacgcccccggcgagcgcaacccuuaugaaaauauccuguacaagauuugucucuccggggauggauggcccuauaucgcuagcagaacgucuaucacaggccgggccugggagaacaccgugguggaccuggagagcgaugggaagccucagaaagccggauccaauggcucuaacaagagccuucaguccgcuggguuuacagcgggacugaccuacagccagcucaugacccugaaagacgccaugcugcaacuugauccgaaugcuaagacauggauggacauugaaggcagacccgaggacccugucgaaaucgcccucuaccagcccucuuccggcugcuauauucacuucuuucgcgagccuacggaucugaaacaguucaagcaggacgccaaguacagccaugggaucgaugugaccgaccuguuugcugcccaacccggacucacaucugcgguuauugaugcucugccgcggaacauggugaucaccugucagggcuccgacgauaucagaaaacuuuucgaaagccaggggcgcaaggacauuaaacugaucgauauugcccucuccaagacagacucucggaaauaugagaaugccgucugggaucaguacaaggaccugugccacaugcauaccggaaucgugguugagaagaaaaagagaggcgggaaagaagagauuacgccucacugugcucugauggauugcaucauguuugacgccgcugugagcggcggacuuaacacauccguccuccgcgccgugcugccccgggacauggucuucagaaccucuaccccucgcgugguucugugaggacuagucccuguucccagagcccacuuuuuuuucuuuuuuugaaauaaaauagccugucuuucagaucuaaaaaaaaaaaaaaaaaaaaaaaaaaaaaaaaaaaaaaaaaaaaaaaaaaaaaaaaaaaaaaaaaaaaaaaaaaaaaaaaaaaaaaaaaaaaaaaaaaaa

SEQ ID NO: 18713 - RNA, 2040 nt, Artificial Sequence
  mRNA product Design a-2 (A100) comprising derived and/or modified sequence from LASV(LM776-SLE-2012;Clade IV)__AIT17825__SP-HsPLAT_NP(2-569) (opt5)
aggagaguccgcucagccagguugcagaagcggcuuagcguguguccuaaucuucucucugcguguagguaggccugugccgcaaacaagcuuaccauggacgccaugaagagaggccugugcugugugcuccugcuuugcggggcugucuucguuagccccagcgccuccaaggagaucaaaucuuuccuguggacccagagccucagacgggaacuguccucuuacugcagcaacauuaaacuucaaguggucaaggacgcucaggcccugcuccacggccuggauuuuuccgagguuucuaaugugcagcgccuuaugagaaaggaacggcgcgacgauaacgaccugaaaagacuccgggaucugaaucaggcggugaacaaucuggucgagcucaagagcacacaacagaaguccauccugcgcguggggacgcuuaccagcgacgaucugcucauucuggcugccgaccuugaaaaacugaagucuaaaguuacaagaaccgagcggccccucuccgccggaguguauaugggcaaccugagcucucagcagcuggaucaacgcagagcucuccuguccaugaucgggaugagcggaucuaaucagggcgcccgggcugggcgcgacggagucgugagaguuugggaugugaagaacgccgagcuucugaauaaccaguucggcacaaugccuucccucacccuggcgugucuuacaaaacagggccaagucgaccugaaugaugccgugcaggcucucaccgaccuggggcugauuuacacggccaaguauccgaacaccagcgaccucgaucggcugacacagucccaucccauccuuaauaugaucgacaccaagaaaucuagccugaacauuuccggauacaauuuuagccucggcgcugccgugaaggcgggggccugcaugcuggauggaggcaacaugcuugaaacaaucaaagucucuccucaaaccauggacgggauucugaaguccauccucaaaguuaagaaagcucugggaauguucauuagcgauacgcccggcgagcgcaacccuuaugaaaauauccuguacaagauuugucucucuggcgacggguggcccuauaucgccagcagaacauccaucaccggacgggcuugggagaacacagugguggaucuggagucugacggcaagccucagaaagccgggagcaauaacuccaauaagagccuucagucugccggauuuaccgcuggccugaccuacucccagcucaugacacugaaagaugcgaugcugcaacuugacccgaacgccaagacguggauggauauugaagggagacccgaggacccugucgaaguggcucucuaccagcccagcucuggaugcuauauccacuucuuucgcgagccuaccgaccugaaacaguucaagcaggaugccaaguacucccauggcauugacguuacagaucuguuugccgcucaacccggccucaccagcgccgugaucgacgcgcugccgcggaauauggucauuacaugucagggguccgaugacaucagaaaacuucuggaaucucagggacgcaaggauaucaaacucauugacaucgcucugagcaagaccgauucccggaaauaugagaacgccgugugggaccaguacaaggaucugugccacaugcauacgggcguuguggucgagaagaaaaagagagggggaaaagaagagauuacaccucacugugcccuuauggacugcaucauguucgaugcugccgugucuggcgggcucaauaccagcguccugcgcgcugugcugccccgggacaugguuuuuagaaccuccacaccucgcgugguccucugaggacuagucccuguucccagagcccacuuuuuuuucuuuuuuugaaauaaaauagccugucuuucagaucuaaaaaaaaaaaaaaaaaaaaaaaaaaaaaaaaaaaaaaaaaaaaaaaaaaaaaaaaaaaaaaaaaaaaaaaaaaaaaaaaaaaaaaaaaaaaaaaaaaaa

SEQ ID NO: 18714 - RNA, 2040 nt, Artificial Sequence
  mRNA product Design a-2 (A100) comprising derived and/or modified sequence from LASV(Mad39;Clade IV)__ANH09723__SP-HsPLAT_NP(2-569) (opt5)
aggagaguccgcucagccagguugcagaagcggcuuagcguguguccuaaucuucucucugcguguagguaggccugugccgcaaacaagcuuaccauggacgccaugaagagaggccugugcugugugcuccugcuuugcggggcugucuucguuagccccagcgccuccaaggagaucaaaucuuuccuguggacccagagccucagacgggaacuguccggcuacugcucuaacauuaagcugcaaguggucaaagacgcucaggcccugcuccacgggcuggauuuuagcgagguuuccaaugugcagcgccuuaugagaaagcagcggcgcgacgauaacgaccugaaaagacuccgggaucugaaucaagcggugaacaaucuggucgaacucaagucuacacagcaaaagagcgugcugcgcguuggaacgcuuaccuccgacgaucugcucacacuggcugccgaccuugagaaacuuaagagcaaagugaccagaacagaacggccccucaccgccggcgucuauauggggaaccugucuucccagcagcuggaucagcgcagagcucuccugaauaugaucggaaugagcggcgggaaccagggagcccggacaggccgcgacggcgugguuagagugugggaugucaagaaugcugagcuucugaacaaucaguucgggaccaugccuucucucacgcuggccugucuuaccaaacaaggacagguggaccugaacgaugugguccaggcgcucacagaccugggccugauuuacaccgccaaguauccgaauacauccgaccucgaucggcugacccaaagccaucccauccuuaacaugauugacacgaauaagucuucccugaacaucagcggguacaacuuuucccucggagcugccguuaaagcuggcgccugcaugcuggaugggggaaauaugcuugagacaaucaaggugucuccucagaccauggacggcauucugaaaagcauccucaaggugaaaaagucccugggcauguucauuagcgauacacccggggaacgcaacccuuaugagaauauccuguacaaaauuugucucucuggagacggcuggcccuauaucgcguccagaaccagcauuaccgggcgggccugggaaaacacagucguggaucuggagucuggaggcaagccucagaaggcugggagcaauaacuccaauaaaucucuucagagcgccggauuugcugccggccugacguacucccaacucaugacccugaaggacgccaugcugcagcuugauccgaacgcuaaaacauggauggacaucgagggcagacccgaagauccuguugagaucgcgcucuaccagcccauuagcgggugcuauauccacuucuuucgcgaaccuaccgaccugaagcaguucaaacaagacgccaaguacucucauggaauugaugugacagaccuguuugcugcccagcccggccucaccuccgccgucaucgaggcucugccgcggaauauggugauuacgugucaggggagcgaugacaucagaaaacuuuucgaaucucagggacgcaaggauaucaagcugauugacaucgcccucuccaaaacagauagccggaaguaugagaacgcgguuugggaccaauacaaagaucugugccacaugcauaccggcguggucguggagaagaagaaaaagggcgggaaagaagagauuaccccucacugugcucugauggacugcaucauguuugaugccgccgucuccggaggccuuaauacacucgugcugagagcuguucugccccgcgacaugguguuccggaccucuacaccuaaggucgugcucugaggacuagucccuguucccagagcccacuuuuuuuucuuuuuuugaaauaaaauagccugucuuucagaucuaaaaaaaaaaaaaaaaaaaaaaaaaaaaaaaaaaaaaaaaaaaaaaaaaaaaaaaaaaaaaaaaaaaaaaaaaaaaaaaaaaaaaaaaaaaaaaaaaaaa

SEQ ID NO: 18715 - RNA, 2040 nt, Artificial Sequence
  mRNA product Design a-2 (A100) comprising derived and/or modified sequence from LASV(Z0947-SLE-2011;Clade IV)__AIT17841__SP-HsPLAT_NP(2-569) (opt5)
aggagaguccgcucagccagguugcagaagcggcuuagcguguguccuaaucuucucucugcguguagguaggccugugccgcaaacaagcuuaccauggacgccaugaagagaggccugugcugugugcuccugcuuugcggggcugucuucguuagccccagcgccuccaaggagaucaaaucuuuccuguggacccagagccucagacgggaacuguccggcuacugcucuaacauuaagcugcaaguggucaaagacgcucaggcccugcuccacgggcuggauuuuagcgagguuuccaaugugcagcgccuuaugagaaaggaacggcgcgacgauaacgaccugaaaagacuccgggaucugaaucaggcggugaacaaucuggucgagcucaagucuacacaacaaaagagcauccugcgcgugggaacgcuuaccuccgacgaucugcucauucuggcugccgaccuugaaaaacuuaagagcaaaguuacaagaaccgagcggccccucucugccggcguguauauggggaaccuguccagccagcagcuggaucagcgcagagcucuccugaauaugaucggaaugucuggcuccaaccagggggcccggacaggacgcgacggcgucgugagaguuugggaugugaagaaugcugagcuucugaacaaucaguucggcaccaugccuagccucacacuggccugucuuaccaaacaggggcaagucgaccugaacgaugcggugcaggcccucacggaccugggacugauuuacaccgcuaaguauccgaauacaucugaccucgaucggcugacccagucccaucccauccuuaacaugaucgacacaaagaaaagcucccugaauauuucuggcuacaacuuuagccucggggccgcugugaaggccggagcgugcaugcuggauggcgggaacaugcuugaaaccaucaaagucuccccucaaacgauggacggcauucucaagagcauccugaaaguuaagaaagcccugggaauguucauuucugaugcucccggcgagcgcaauccuuaugaaaacauccuguacaagauuugucucuccggggacggauggcccuauaucgccagcagaacaucuaucaccggccgggcuugggagaauacagugguggaucuggagagcgacgggaagccucagaaagccggauccaacggcucuaauaagagccuucaguccgccggguuuaccgcuggacugaccuacagccagcucaugacacugaaagaugcgaugcugcaacuugacccgaacgccaagacguggauggauauugaaggcagacccgaggacccugucgaaaucgcucucuaccagcccucuuccggcugcuauauucacuucuuucgcgagccuaccgaccugaaacaguucaagcaggaugccaaguacagccaugggaucgacgugacagaucuguuugccgcucaacccggacucaccucugccguuauugacgcgcugccgcggaauauggugaucacaugucagggcuccgaugacaucagaaaacuuuucgaaagccaggggcgcaaggauauuaaacugaucgacauugcucucuccaagaccgauucucggaaauaugagaacgccgucugggaccaguacaaggaucugugccacaugcauacgggaaucgugguugagaagaaaaagagaggcgggaaagaagagauuacaccucacugugcccugauggacugcaucauguuugaugcugccgugagcggcggacuuaauaccuccguccuccgcgcugugcugccccgggacauggucuucagaaccucuacaccucgcgugguucugugaggacuagucccuguucccagagcccacuuuuuuuucuuuuuuugaaauaaaauagccugucuuucagaucuaaaaaaaaaaaaaaaaaaaaaaaaaaaaaaaaaaaaaaaaaaaaaaaaaaaaaaaaaaaaaaaaaaaaaaaaaaaaaaaaaaaaaaaaaaaaaaaaaaaa

SEQ ID NO: 18716 - RNA, 2078 nt, Artificial Sequence
  mRNA product Design b-4 (hSL-A64-N5) comprising derived and/or modified sequence from LASV(Josiah;Clade IV)__NP_694869__SP-HsPLAT_NP(2-569) (opt1)
aggagagucccgcagucggcguccagcggcucugcuuguucgugugugugucguugcaggccuuauucaagcuuaccauggacgccaugaagcgcggccugugcugcgugcuccugcugugcggggccgucuucgugagccccagcgccuccaaggagaucaagagcuuccuguggacccagucccuccgccgggagcugagcggcuacugcuccaacaucaagcuccagguggucaaggacgcccaggcgcugcugcacgggcuggacuucagcgagguguccaacgugcagcgccucaugcggaaggagcgccgggacgacaacgaccugaagcgccugcgggaccucaaccaggccgucaacaaccugguggagcucaagagcacccagcagaaguccauccugcgcgugggcacccugaccagcgacgaccugcucauccuggccgccgaccuggagaagcucaaguccaaggucauccggaccgagcgcccccugagcgccgggguguacaugggcaaccuguccagccagcagcucgaccagcggcgcgcgcugcugaacaugaucgggauguccggcggcaaccagggggcccgggccggccgcgacggggugguccgggugugggacgugaagaacgccgagcuccugaacaaccaguucggcaccaugccgagccugacgcucgcgugccugaccaagcaggggcaggucgaccugaacgacgccgugcaggcccucaccgaccugggccugaucuacaccgccaaguaccccaacacguccgaccucgaccgccugacccagagccaccccauccugaacaugaucgacaccaagaaguccagccucaacaucagcggcuacaacuucucccugggggccgcggugaaggccggcgccugcaugcuggacgggggcaacaugcucgagaccaucaaggucagcccccagacgauggacggcauccugaaguccauccugaaggugaagaaggcccucgggauguucaucagcgacaccccgggcgagcggaaccccuacgagaacauccuguacaagaucugccuguccggggacggcuggcccuacaucgccagccgcaccuccaucaccgggcgggcgugggagaacacgguggucgaccucgagagcgacggcaagccccagaaggccgacuccaacaacagcuccaagagccugcaguccgccggcuucaccgccgggcugaccuacagccagcucaugacccugaaggacgccaugcugcagcuggacccgaacgcgaagacguggauggacaucgagggccgccccgaggaccccguggagaucgcccucuaccagcccuccagcgggugcuacauccacuucuuccgggagccgaccgaccugaagcaguucaagcaggacgccaaguacucccacggcaucgacgugaccgaccuguucgccacccagcccgggcucacgagcgccgucaucgacgcgcugccccgcaacauggugaucacgugccagggcuccgacgacauccgcaagcugcucgagagccagggccggaaggacaucaagcugaucgacaucgcccugagcaagaccgacucccgcaaguacgagaacgccgugugggaccaguacaaggaccucugccacaugcacaccggggucguggucgagaagaagaagcggggcgggaaggaggagaucaccccgcacugcgcccugauggacugcaucauguucgacgcggccgugagcggcgggcugaacaccuccgugcuccgcgccguccugccccgggacaugguguuccgcaccagcacgccccgggugguccugugaggacuaguaauaaggaaacuguaugaaugucugugggcaggaagugaagagauccuucuguaaagguuuuuggaauuaugucugcugaauaauaaacuuuuuugaaauaauaaaucugguagaaaaaugagaucucaaaggcucuuuucagagccaccaaaaaaaaaaaaaaaaaaaaaaaaaaaaaaaaaaaaaaaaaaaaaaaaaaaaaaaaaaaaaaaaagaauu

SEQ ID NO: 18717 - RNA, 2078 nt, Artificial Sequence
  mRNA product Design b-4 (hSL-A64-N5) comprising derived and/or modified sequence from LASV(LP;Clade I)__AAF86702__SP-HsPLAT_NP(2-569) (opt1)
aggagagucccgcagucggcguccagcggcucugcuuguucgugugugugucguugcaggccuuauucaagcuuaccauggacgccaugaagcgcggccugugcugcgugcuccugcugugcggggccgucuucgugagccccagcaacuccaaggagaucaagagcuuccuguggacccagucccuccgccgggagcugagcggcuacugcuccaacaucaagcuccagguggucaaggacgcccaggcccugcugcacgggcuggacuucagcgagguguccaacgugcagcgccucaugcggaagcagaagcgcgacgacgcggaccugaagcggcugcgcgaccucaaccaggccgucaacaaccugguggagcucaagagcacccagcagaagaacgugcugcgggucggcacgcuguccagcgacgaccugaucacccucgccgccgaccuggagaagcugaaguccaaggugauccgcaccgagcggccccucagcuccgggguguacaugggcaaccugagcucccagcagcuggaccagcgccgggcccuccugagcaugaucgggauguccggcggcccgcaggggaaccgcaccggcggggacggcgucgugcgggugugggacgucaagaacgcggagcugcucaacaaccaguucgggacgaugcccagccugacccuggccugccucaccaagcagggccagguggaccugaacgacgccgugcaggcccugaccgaccucggccugaucuacacggcgaaguaccccaacuccagcgaccuggacaugcucacccagagccaccccauccuggggauggucgacaccaagaaguccagccugaacaucuccggcuacaacuucagccucggggccgccgugaaggccggcgccugcaugcuggacggcgggaacaugcuggagaccaucaagguguccccgcagacgauggacggcauccucaagagcauccugaaggucaagcgcucccuggggauguucaucagcgacacccccggcgagcggaaccccuacgagaacauccucuacaagaucugccuguccggggagggcuggcccuacaucgcgagccgcaccuccaucaccggccgggccugggagaacacgcugguggaccucgagagcgacaacaagccgcccaagcugaacuccgccgggagcaacaagucccugcaggccgccggccucaacgcggggcugaccuacagccagcugaugacccugaaggacugcaugcuccagcuggaccccuccagcaagaccuggaucgacaucgagggccgccccgaggacccgguggagaucgcccuguuccagcccuccagcgggugcuacauccacuucuuccgggagcccacggaccucaagcaguucaagcaggacgccaaguacagccacggcaucgacgucaccgaccuguucuccacccagcccggccugaccagcgccgugaucgaggcccucccgcgcaacauggugcugacgugccagggguccgacgacaucaagaagcugcucgagagccagggccggcgcgacaucaagcugaucgacaucucccugagcaaggcggacucccgcaaguucgagaacgccgucugggaccaguacaaggaccucugccacaugcacaccgggguggucguggagaagaagaagcggggcgggaaggaggagaucacgccccacugcgcccugcuggacugcaucauguucgacgccgccaccaccggcagccucaacaucaccacccugcgcgcggugcugccccgggacauggucuuccgcaccuccacgcccaagguggugcucugaggacuaguaauaaggaaacuguaugaaugucugugggcaggaagugaagagauccuucuguaaagguuuuuggaauuaugucugcugaauaauaaacuuuuuugaaauaauaaaucugguagaaaaaugagaucucaaaggcucuuuucagagccaccaaaaaaaaaaaaaaaaaaaaaaaaaaaaaaaaaaaaaaaaaaaaaaaaaaaaaaaaaaaaaaaaagaauu

SEQ ID NO: 18718 - RNA, 2078 nt, Artificial Sequence
  mRNA product Design b-4 (hSL-A64-N5) comprising derived and/or modified sequence from LASV(803213;Clade II)__AAF86704__SP-HsPLAT_NP(2-569) (opt1)
aggagagucccgcagucggcguccagcggcucugcuuguucgugugugugucguugcaggccuuauucaagcuuaccauggacgccaugaagcgcggccugugcugcgugcuccugcugugcggggccgucuucgugagccccagcgccuccaaggaggugaaguccuuccuguggacccagagccuccgccgggagcugagcggcuacugcuccaacaucaagcugcaggucgugaaggacgcccaggcgcuccugcacgggcuggacuucagcgaggugaacaacguccagcgccucaugcggaagcagaagcgcgacgacggcgaccugaagcggcugcgcgaccucaaccaggccgugaacaaccugguggagcugaaguccacccagcagaaguccauccuccgggucgggacgcugaccagcgacgaccugcucacccuggccgccgaccuggagaagcucaagagcaaggugauccgcaccgagcggccccuguccagcggcguguacauggggaaccuguccacgcagcagcucgagcagcgccgggcccugcugaacaugaucggcauggucggcggggcgcagggcacccagccggggcgcgacggcguggugcgggucugggacgugaagaaccccgaccuccugaacaaccaguucgggaccaugcccagccugacccucgccugccugacgaagcagggccagguggaccugaacgacgccguccucgcccugaccgaccugggccucaucuacaccgcgaaguaccccaacuccagcgaccuggaccgccugucccagagccacccgauccucaacaugguggacaccaagaaguccagccugaacaucagcggguacaacuucucccugggcgccgccgugaaggccggggccugcaugcucgacggcggcaacaugcuggagacgaucaaggucacgccccagaccauggacgggauccucaagagcauccugaaggugaagcggucccugggcauguucgugagcgacacccccggggagcgcaaccccuacgagaacauccuguacaagaucugccucuccggcgacggguggccguacaucgcgagccggaccuccaucgucggccgcgccugggagaacaccaccguggaccuggagagcgacggcaagccccagaagguggggaccgccggcuccaacaagagccugcaguccgccggguuccccacgggccucaccuacagccagcugaugacccugaaggacuccaugaugcagcuggaccccagcgccaagaccuggaucgacaucgaggggcggccggaggaccccgucgagaucgcgcucuaccagcccauguccggcugcuacauccacuucuuccgcgagcccacggaccugaagcaguucaagcaggacgccaaguacagccacggcaucgacguggccgaccuguucccggcccagcccgggcucaccuccgccgucaucgaggcgcugccccggaacauggugcugaccugccagggcagcgacgacaucaagaagcuccuggacucccaggggcgccgcgacaucaagcugaucgacaucagccucagcaagguggacucccggaaguucgagaacgccgucugggaccagugcaaggaccugugccacaugcacaccggcgugguggucgagaagaagaagcgcgggggcaaggaggagaucacgccccacugcgcccugauggacugcaucauguucgacgccgccgugagcggcgggcucaacaucccggugcugcgggcgguccugccccgcgacaugguguuccggaccuccagccccaaggugguccucugaggacuaguaauaaggaaacuguaugaaugucugugggcaggaagugaagagauccuucuguaaagguuuuuggaauuaugucugcugaauaauaaacuuuuuugaaauaauaaaucugguagaaaaaugagaucucaaaggcucuuuucagagccaccaaaaaaaaaaaaaaaaaaaaaaaaaaaaaaaaaaaaaaaaaaaaaaaaaaaaaaaaaaaaaaaaagaauu

SEQ ID NO: 18719 - RNA, 2081 nt, Artificial Sequence
  mRNA product Design b-4 (hSL-A64-N5) comprising derived and/or modified sequence from LASV(GA391;Clade III)__CAA36646__SP-HsPLAT_NP(2-570) (opt1)
aggagagucccgcagucggcguccagcggcucugcuuguucgugugugugucguugcaggccuuauucaagcuuaccauggacgccaugaagcgcggccugugcugcgugcuccugcugugcggggccgucuucgugagccccagcgccuccaaggaggugcgcagcuuccuguggacccagucccuccggcgcgagcugagcggcuacugcuccaacaucaagcugcaggucgugaaggacgcccaggcgcuccugcacgggcuggacuucagcgagguguccaacguccagcggcucaugcgcaagcagaagcgggacgacggcgaccugaagcgccugcgggaccucaaccaggccgugaacaaccugguggagcucaagagcacccagcagaaguccguccugcgcguggggacccugagcuccgacgaccugcucauccuggccgccgaccuggagaagcucaagagcaaggugacccggaccgagcgcccccuguccagcggcgucuacauggggaaccuguccagccagcagcucgaccagcggcgcgcccugcugaacaugaucggcaugaccggcguguccgggggcgggaagggcgcgagcgacgggaucgugcgggucugggacgugaagaacgccgagcuccugaacaaccaguucggcacgaugccgucccugacccucgccugccugaccaagcagggccagguggaccugaacgacgccguccaggcgcucaccgaccuggggcugaucuacacggccaaguaccccaacagcagcgaccucgaccgccugucccagagccaccccauccugaacaugaucgacaccaagaaguccagccucaacaucuccggcuacaacuucagccugggggccgccgugaaggccggcgcgugcaugcuggacggcgggaacaugcucgagaccaucaaggugagcccccagaccauggacggcauccucaaguccauccugaaggucaagaagucccuggggauguucgugagcgacacgccgggcgagcggaaccccuacgagaacauccuguacaagaucugccuguccggggacggcuggcccuacaucgccagccgcaccuccaucgugggccgggccugggagaacaccgucguggaccucgagcaggacaacaagccccagaagaucgggaacggcgggagcaacaagucccugcagagcgccggcuucgccgcggggcugaccuacucccagcucaugacgcugaaggacuucaagugcuucaaccugaucccgaacgccaagaccuggauggacaucgagggccgccccgaggaccccguggagaucgcccuguaccagcccagcuccggcugcuacguccacuucuuccgggagccgaccgaccucaagcaguucaagcaggacgccaaguacagccacgggaucgacgugaccgaccuguucgccgcgcagcccggccugacgagcgccgucaucgaggcccucccccgcaacauggugaucacgugccagggguccgaggacauccggaagcugcuggagagccagggccgccgcgacaucaagcucaucgacaucacccuguccaaggccgacagccggaaguucgagaacgccgugugggaccaguucaaggaccugugccacaugcacaccggggucgugguggagaagaagaagcgcggcggcaaggaggagaucacgccccacugcgcgcucauggacugcaucauguucgacgccgccgucuccgggggccuggacgccaaggugcugcgggugguccucccgcgcgacaugguguuccggaccagcacccccaaggugguccugugaggacuaguaauaaggaaacuguaugaaugucugugggcaggaagugaagagauccuucuguaaagguuuuuggaauuaugucugcugaauaauaaacuuuuuugaaauaauaaaucugguagaaaaaugagaucucaaaggcucuuuucagagccaccaaaaaaaaaaaaaaaaaaaaaaaaaaaaaaaaaaaaaaaaaaaaaaaaaaaaaaaaaaaaaaaaagaauu

SEQ ID NO: 18720 - RNA, 2078 nt, Artificial Sequence
  mRNA product Design b-4 (hSL-A64-N5) comprising derived and/or modified sequence from LASV(AV;Clade V)__CCA30315__SP-HsPLAT_NP(2-569) (opt1)
aggagagucccgcagucggcguccagcggcucugcuuguucgugugugugucguugcaggccuuauucaagcuuaccauggacgccaugaagcgcggccugugcugcgugcuccugcugugcggggccgucuucgugagccccagcgccuccaaggaggugaaguccuuccuguggacccagagccuccgccgggagcugagcggcuacugcuccaacaucaagcugcaggucgugaaggacgcccaggcgcuccugcacgggcuggacuucagcgagguguccaacguccagcgccucaugcggaagcagcgccgggacgacagcgaccugaagcgccugcgggaccucaaccaggccgugaacaaccugguggagcugaaguccacccagcagaaguccguccuccgcgugggcacgcugagcagcgacgaccugcucacccuggccgccgaccuggagaagcucaaguccaaggugacccggaccgagcgcccccugagcuccggggucuacaugggcaaccugagcucccagcagcucgaccagcggcgcgcccugcugaaccucaucgggaugacgaacggcagccagggcucccaggcggggcgggacggcguggugcgcgucugggacgugaagaacgccgagcugcugaacaaccaguucgggaccaugccgagccucacccuggccugccugaccaagcagggccagguggaccucaacgacgucgugcaggcccugacggaccuggggcucaucuacaccgcgaaguaccccaacaccagcgaccuggaccggcugacccagucccaccccauccucaacaugaucgacacgaagaaguccagccugaacaucagcggcuacaacuucucccugggcgccgccgugaaggccggggccugcaugcucgacggcgggaacaugcuggagaccaucaaggucagcccccaguccauggacggcauccucaagagcauccugaaggugaagcgcgcgcugggcauguucguguccgacaccccgggggagcggaaccccuacgagaacauccuguacaagaucugccucagcggcgacggguggcccuacaucgccucccgcaccagcaucgucggccgggccugggagaacacggugguggaccuggagaccgacgggaagccccagaagaucggcuccggcaacagcaacaagucccugcagagcgccggguucuccgccggccucaccuacagccagcugaugacccugaaggacgcgaugcugcagcucgacccgaacgccaagacguggauggacaucgaggggcgccccgaggaccccgucgagguggcccuguaccagcccaucuccggcugcuacauccacuucuuccgggagccgaccgaccugaagcaguucaagcaggacgccaaguacagccacgggaucgacaucgccgaccucuucgcggcccagcccggccugaccagcgccgucaucgaggcccugccccgcaacauggugaucacgugccagggcuccgaggacaucaagaagcuccuggagagccaggggcgcaaggacaucaagcugaucgacaucgcccucuccaagaucgacagccggaaguucgagaacgcggugugggaccaguacaaggaccugugccacaugcacaccggcgucgugguggagaagaagaagcgcgggggcaaggaggagaucaccccgcacugcgcccugauggacugcaucauguucgacgccgccgucuccgggggccucaacacccuggugcugcgggcggugcucccccgcgacauggucuuccggaccagcacgccccgcguggugcugugaggacuaguaauaaggaaacuguaugaaugucugugggcaggaagugaagagauccuucuguaaagguuuuuggaauuaugucugcugaauaauaaacuuuuuugaaauaauaaaucugguagaaaaaugagaucucaaaggcucuuuucagagccaccaaaaaaaaaaaaaaaaaaaaaaaaaaaaaaaaaaaaaaaaaaaaaaaaaaaaaaaaaaaaaaaaagaauu

SEQ ID NO: 18721 - RNA, 2078 nt, Artificial Sequence
  mRNA product Design b-4 (hSL-A64-N5) comprising derived and/or modified sequence from LASV(Togo/2016/7082;Clade VI)__AMR44578__SP-HsPLAT_NP(2-569) (opt1)
aggagagucccgcagucggcguccagcggcucugcuuguucgugugugugucguugcaggccuuauucaagcuuaccauggacgccaugaagcgcggccugugcugcgugcuccugcugugcggggccgucuucgugagccccagcaacuccaaggaggugaaguccuuccuguggacccagagccuccgccgggagcugagcggcuacugcuccaacaucaagcugcaggucgugaaggacgcccaggcccuccugcacgggcuggacuucagcgagguguccaacguccagcgccucaugcggaagcagaagcgcgacgacggcgaccugaagcggcugcgcgaccucaaccaggcggugaacaaccugguggagcucaagagcguccagcagaaguccauccugcggguggggacccugaccagcgacgaccugcucacccuggccgccgaccuggagaagcucaaguccaaggugacccgcaccgagcggccccugagcuccggcgucuacauggggaaccugagcucccagcagcucgaccagcgccgggcccugcugagcaugaucggcauguccggcgggaaccagaacagccagccgaagggcgacgggguggugcgcgucugggacgugaagaacgccgaccuccugaacaaccaguucggcacgaugcccucccugacccucgcgugccugaccaagcagggccagguggaccugaacgacgccguccaggcccucaccgaccuggggcugaucuacacggccaaguaccccaacagcagcgaccucgaccggcugucccagagccaccccauccugaacaugaucgacaccaagaaguccagccucaacaucuccggcuacaacuucagccugggggcggccaucaagaccggcgccugcaugcuggacgggggcaacaugcucgagaccaucaaggugacgccgcagaccauggacggcauccugaaguccauccugaaggugaagcgcagccucgggauguucaucuccgacacccccggcgagcggaaccccuacgagaacauccuguacaagaucugccugagcggggacggcuggcccuacaucgccucccgcaccgccaucaucgggcgggcgugggagaacacggucguggaccucgagagcgacuccaagccgcagaagaucggcagcaacggcuccaacaagagccugcaguccgccggguucgcccccggccugaccuacagccagcucaugacccugaaggacuccaugcugcagcuggaccccaacgccaagaccuggaucgacaucgaggggcgccccgaggacccgguggaggucgcccucuuccagcccaucagcggcugcuacauccacuucuuccgggagcccacggaccugaagcaguucaagcaggacgcgaaguacagccacgggaucgacgugaccgaccuguucgccgcccagcccggccucaccuccgccgugaucgaggcccugccgcgcaacaugguccugaccugccagggcagcgacgacaucaagaagcuccuggacucccaggggcggcgcgacaucaagcugaucgacgugagccucaacaagaucgacucccgcaaguucgagaacgcggucugggaccaguacaaggaccugugccacaugcacacgggcgugguggucgagaagaagaagaagggcgggaaggaggagaucacgccccacugcgcccugcucgacugcaucauguucgacgccgccgugagcgggggccugaacgccaccgugcugcgggcgguccucccccgcgacaugguguuccggaccuccagccccaaggugguccugugaggacuaguaauaaggaaacuguaugaaugucugugggcaggaagugaagagauccuucuguaaagguuuuuggaauuaugucugcugaauaauaaacuuuuuugaaauaauaaaucugguagaaaaaugagaucucaaaggcucuuuucagagccaccaaaaaaaaaaaaaaaaaaaaaaaaaaaaaaaaaaaaaaaaaaaaaaaaaaaaaaaaaaaaaaaaagaauu

SEQ ID NO: 18722 - RNA, 2078 nt, Artificial Sequence
  mRNA product Design b-4 (hSL-A64-N5) comprising derived and/or modified sequence from LASV(KAK-428;Clade n.d. (VII))__ANH09741__SP-HsPLAT_NP(2-569) (opt1)
aggagagucccgcagucggcguccagcggcucugcuuguucgugugugugucguugcaggccuuauucaagcuuaccauggacgccaugaagcgcggccugugcugcgugcuccugcugugcggggccgucuucgugagccccagcaacuccaaggaggugaaguccuuccuguggacccagagccuccgccgggagcugagcggcuacugcaccaacaucaagcugcaggucgugaaggacgcccaggcccuccugcacgggcuggacuucuccgaggugagcaacguccagcgccucaugcggaagcagaagcgcgacgacaacgaccugaagcggcugcgcgaccucaaccaggcggugaacaaccugguggagcugaaguccguccagcagaaguccgugcucaaggugggcacgcugaacagcgacgaccugcucacccuggccgccgaccuggagaagcucaagagcaaggucgugcggaccgagcgcccccuguccagcgggguguacaugggcaaccuguccagccagcagcucgaccagcggcgcgcccugcugaacaugaucgggauggccggcggcucccaggggaaccagccgagccgggacggcgucgugcgcgugugggacgucaagaacgcggaccuccugaacaaccaguucgggaccaugcccucccugacgcucgccugccugaccaagcagggccagguggaccugaacgacgugguccucgcccugaccgaccuggggcucaucuacaccgccaaguaccccaacagcuccgaccuggaccggcugagccagaaccaccccgugcucaacaugaucgacgugaacaagagcucccugaacaucagcggcuacaacuucucccugggcgcggccgucaaggccggggccugcaugcucgacggcgggaacaugcuggagacgaucaagaucagcccgcagaccguggacggcauccugaaguccauccucaaggugaagcgcgcccugggcauguucgucagcgacacccccggggagcggaaccccuacgagaacauccuguacaaggugugccucuccggcaacggguggcccuacaucgcgagccgcaccuccaucgucggccgggccugggagaacacggugguggaccuggagagcaacaagaaccagccgaaggucgggaacaacggcuccaacaagaugcugcagagcuccggcuucgccaccgggcucaccuacagccagcugaugacccugcgcgacuccaugcugcagcucgaccccacggccaagaccuggaucgacaucgagggccggcccgaggaccccguggagcuggcccuguuccagccgagcuccgggugcuacauccacuucuuccgcgagcccaccgaccucaagcaguucaagcaggacgcgaaguacagccacggcaucgacgugaacgaccuguucuccgcccagcccgggcugaccagcgccguccucgaggcccugccccggaacauggugcugacgugccagggcagcgacgacauccgcaagcuccuggacucccaggaccgcaaggacaucaagcugaucgacaucagccucuccaaggccgacgcgcggaaguucgagaacgacgugugggaccaguucaaggaccugugccacaugcacaccggcaucgucguggagaagaagaagaagggcgggaagcaggagaugaccccgcacugcgcccugcucgacugcaucauguucgacgccgccgugagcgggggccugaacguccccacccugcgcgccgugcuccccacggacaugguguuccggaccaucaccaccaaggucgugcugugaggacuaguaauaaggaaacuguaugaaugucugugggcaggaagugaagagauccuucuguaaagguuuuuggaauuaugucugcugaauaauaaacuuuuuugaaauaauaaaucugguagaaaaaugagaucucaaaggcucuuuucagagccaccaaaaaaaaaaaaaaaaaaaaaaaaaaaaaaaaaaaaaaaaaaaaaaaaaaaaaaaaaaaaaaaaagaauu

SEQ ID NO: 18723 - RNA, 2078 nt, Artificial Sequence; identical to SEQ ID NO: 18717
  mRNA product Design b-4 (hSL-A64-N5) comprising derived and/or modified sequence from LASV(Pinneo-NIG-1969;Clade I)__AIT17837__SP-HsPLAT_NP(2-569) (opt1)

SEQ ID NO: 18724 - RNA, 2078 nt, Artificial Sequence
  mRNA product Design b-4 (hSL-A64-N5) comprising derived and/or modified sequence from LASV(ISTH0009-NIG-2011;Clade II)__AIT17405__SP-HsPLAT_NP(2-569) (opt1)
aggagagucccgcagucggcguccagcggcucugcuuguucgugugugugucguugcaggccuuauucaagcuuaccauggacgccaugaagcgcggccugugcugcgugcuccugcugugcggggccgucuucgugagccccagcguguccaaggaggucaagagcuuccuguggacccagucccuccgccgggagcugagcggcuacugcuccaacaucaagcuccagguggugaaggacgcccaggcccugcugcacgggcuggacuucagcgaggucuccaacgugcagcgccucaugcggaagcagaagcgcgacgacagcgaccugaagcggcugcgcgaccucaaccaggcggugaacaaccuggucgagcugaaguccacccagcagaaguccauccuccgggugggcacccugaccagcgacgaccugcucacccuggccgccgaccuggagaagcucaagagcaaggugauccgcaccgagcggccccuguccagcggggucuacaugggcaaccuguccacgcagcagcucgagcagcgccgggcccugcugaacaugaucgggauggugggcggcgcccaggggacccagccgggccgcgacggggugguccgggugugggacgugaagaaccccgaccuccugaacaaccaguucggcaccaugcccagccugacccucgcgugccugacgaagcaggggcaggucgaccugaacgacgccgugcucgcccugaccgaccugggccucaucuacaccgccaaguaccccaacuccagcgaccuggaccgccugucccagagccacccgauccucaacaugguggacaucaagaaguccagccugaacaucagcggcuacaacuucucccugggggcggccgucaaggccggcgccugcaugcucgacgggggcaacaugcuggagaccaucaaggugacgccccagaccauggacggcauccucaagagcauccugaaggugaagcggucccuggggauguucgucagcgacacccccggcgagcgcaaccccuacgagaacauccuguacaagaucugccucuccggggacggcuggccguacaucgccagccggaccuccaucguggggcgcgcgugggagaacacgaccguggaccuggagagcgacggcaagccccagaaggucggcuccgccgggagcaacaagucccugcagagcgccggcuuccccaccgggcucaccuacucccagcugaugacgcugaaggacagcaugaugcagcuggaccccuccgccaagaccuggaucgacaucgagggccggccggaggaccccguggagaucgcccucuaccagcccaugagcgggugcuacauccacuucuuccgcgagcccaccgaccugaagcaguucaagcaggacgcgaaguacucccacggcaucgacgucgccgaccuguucccggcccagcccggccucaccagcgccgugaucgaggcccugccccggaacauggugcugacgugccaggggagcgacgacaucaagcgccuccuggacucccagggccgccgggacaucaagcugaucgacaucgcgcucagcaaggccgacucccgccgguucgagaacgccgucugggaccagugcaaggaccugugccacaugcacaccggggugguggucgagaagaagaagcgcggcgggaaggaggagaucacgccccacugcgcccugauggacugcaucauguacgacgccgcggugagcggcggccucaacaucccggugcugcgggccguccugccccgcgacaugguguuccggaccuccagccccaaggugguccucugaggacuaguaauaaggaaacuguaugaaugucugugggcaggaagugaagagauccuucuguaaagguuuuuggaauuaugucugcugaauaauaaacuuuuuugaaauaauaaaucugguagaaaaaugagaucucaaaggcucuuuucagagccaccaaaaaaaaaaaaaaaaaaaaaaaaaaaaaaaaaaaaaaaaaaaaaaaaaaaaaaaaaaaaaaaaagaauu

SEQ ID NO: 18725 - RNA, 2078 nt, Artificial Sequence
  mRNA product Design b-4 (hSL-A64-N5) comprising derived and/or modified sequence from LASV(ISTH2010-NIG-2012;Clade II)__AIT17483__SP-HsPLAT_NP(2-569) (opt1)
aggagagucccgcagucggcguccagcggcucugcuuguucgugugugugucguugcaggccuuauucaagcuuaccauggacgccaugaagcgcggccugugcugcgugcuccugcugugcggggccgucuucgugagccccagcgccuccaaggaggugaaguccuuccuguggacccagagccuccgccgggagcugagcggcuacugcuccaacaucaagcugcaggucgugaaggacgcccaggcgcuccugcacgggcuggacuucagcgagguguccaacguccagcgccucaugcggaagcagaagcgcgacgacagcgaccugaagcggcugcgcgaccucaaccaggccgugaacaaccugguggagcugaaguccacccagcagaaguccauccuccgggucggcacgcugaccagcgacgaccugcucacccuggccgccgaccuggagaagcucaagagcaaggugauccgcaccgagcggccccuguccagcgggguguacaugggcaaccuguccacgcagcagcucgagcagcgccgggcccugcugaaccucaucgggauggucggcggcgcgcaggggacccagccgggccgcgacgggguggugcgggucugggacgugaagaaccccgaccugcugaacaaccaguucggcaccaugcccagccucacccuggccugccugacgaagcagggccagguggaccucaacgacgccguccuggcccugaccgaccucgggcugaucuacaccgcgaaguaccccaacuccagcgaccuggaccgccucucccagagccacccgauccugaacaugguggacaccaagaaguccagccugaacaucagcggcuucaacuucucccucggggccgccgugaaggccggcgccugcaugcuggacgggggcaacaugcuggagacgaucaaggucacgccccagaccauggacggcauccucaagagcauccugaaggugaagaagucccuggggauguucgugagcgacacccccggcgagcggaaccccuacgagaacauccucuacaagaucugccuguccggggacggcuggccguacaucgcgagccgcaccuccaucgucgggcgggccugggagaacaccaccguggaccuggagagcgacggcaagccccacaaggugggcaccgccggguccaacaagagccuccaguccgccggcuuccccacggggcugaccuacagccagcugaugacccugaaggacuccaugaugcagcucgaccccagcgccaagaccuggaucgacaucgagggccgcccggaggaccccgucgagaucgcgcuguaccagcccauguccgggugcuacauccacuucuuccgggagcccacggaccugaagcaguucaagcaggacgccaaguacagccacggcaucgacguggccgaccucuucccggcccagcccggccugaccuccgccgucaucgaggcgcugccccgcaacauggugcugaccugccaggggagcgacgacaucaagcggcuccuggacagccagggccgccgcgacaucaagcucaucgacaucgcccuguccaaggccgacagccggcgcuucgagaacgccgugugggaccagugcaaggaccugugccacaugcacaccggggucgugguggagaagaagaagcggggcgggaaggaggagaucacgccccacugcgcccucauggacugcaucauguacgacgcggccgucuccggcggccugaacaucccggugcugcgcgccgugcucccccgggacauggucuuccgcaccagcucccccaagguggugcugugaggacuaguaauaaggaaacuguaugaaugucugugggcaggaagugaagagauccuucuguaaagguuuuuggaauuaugucugcugaauaauaaacuuuuuugaaauaauaaaucugguagaaaaaugagaucucaaaggcucuuuucagagccaccaaaaaaaaaaaaaaaaaaaaaaaaaaaaaaaaaaaaaaaaaaaaaaaaaaaaaaaaaaaaaaaaagaauu

SEQ ID NO: 18726 - RNA, 2078 nt, Artificial Sequence
  mRNA product Design b-4 (hSL-A64-N5) comprising derived and/or modified sequence from LASV(Lassa virus/H.sapiens-wt/NGA/2015/ISTH_0543;Clade II)__AVO03640__SP-HsPLAT_NP(2-569) (opt1)
aggagagucccgcagucggcguccagcggcucugcuuguucgugugugugucguugcaggccuuauucaagcuuaccauggacgccaugaagcgcggccugugcugcgugcuccugcugugcggggccgucuucgugagccccagcgccuccaaggaggugaaguccuuccuguggacccagagccuccgccgggagcugagcggcuacugcuccaacaucaagcugcaggucgugaaggacgcccaggcgcuccugcacgggcuggacuucagcgagguguccaacguccagcgccucaugcggaagcagaagcgcgacgacagcgaccugaagcggcugcgcgaccucaaccaggccgugaacaaccugguggagcugaaguccacccagcagaaguccauccuccgggucggcacgcugaccagcgacgaccugcucacccuggccgccgaccuggagaagcucaagagcaaggugauccgcaccgagcggccccuguccagcgggguguacaugggcaaccuguccacgcagcagcucgagcagcgccgggcccugcugaacaugaucgggauggucggcggcgcgcaggggacccagccgggccgcgacgggguggugcgggucugggacgugaagaaccccgaccuccugaacaaccaguucggcaccaugcccagccugacccucgccugccugacgaagcagggccagguggaccugaacgacgccguccucgcccugaccgaccuggggcucaucuacaccgcgaaguaccccaacuccagcgaccuggaccgccugucccagagccacccgauccucaacaugguggacaccaagaaguccagccugaacaucagcggcuacaacuucucccugggggccgccgugaaggccggcgccugcaugcucgacgggggcaacaugcuggagacgaucaaggucacgccccagaccauggacggcauccucaagagcauccugaaggugaagaagucccuggggauguucgugagcgacacccccggcgagcggaaccccuacgagaacauccuguacaagaucugccucuccggggacggcuggccguacaucgcgagccgcaccuccaucgucgggcgggccugggagaacaccaccguggaccuggagagcgacggcaagccccagaaggugggcuccgccgggagcaacaagucccugcagagcgccggcuuccccaccgggcucacguacucccagcugaugacccugaaggacagcaugaugcagcuggaccccuccgccaagaccuggaucgacaucgagggccgcccggaggaccccgucgagaucgcgcucuaccagcccaugagcgggugcuacauccacuucuuccgggagcccaccgaccugaagcaguucaagcaggacgccaaguacucccacggcaucgacguggccgaccuguucccggcccagcccggccucacgagcgccgucaucgaggcgcugccccgcaacauggugcugaccugccaggggagcgacgacaucaagcggcuccuggacucccagggccgcaaggacaucaagcugaucgacaucgcccucagcaaggccgacucccgccgguucgagaacgccgugugggaccagugcaaggaccugugccacaugcacaccggggucgugguggagaagaagaagcgcggcgggaaggaggagaucacgccccacugcgcccugauggacugcaucauguacgacgcggccgucagcggcggccucaacaucccggugcugcgggccgugcugccccgcgacauggucuuccggaccuccagccccaagguggugcucugaggacuaguaauaaggaaacuguaugaaugucugugggcaggaagugaagagauccuucuguaaagguuuuuggaauuaugucugcugaauaauaaacuuuuuugaaauaauaaaucugguagaaaaaugagaucucaaaggcucuuuucagagccaccaaaaaaaaaaaaaaaaaaaaaaaaaaaaaaaaaaaaaaaaaaaaaaaaaaaaaaaaaaaaaaaaagaauu

SEQ ID NO: 18727 - RNA, 2078 nt, Artificial Sequence
  mRNA product Design b-4 (hSL-A64-N5) comprising derived and/or modified sequence from LASV(Lassa virus/H.sapiens-wt/NGA/2016/ISTH_0009;Clade II)__AVO03572__SP-HsPLAT_NP(2-569) (opt1)
aggagagucccgcagucggcguccagcggcucugcuuguucgugugugugucguugcaggccuuauucaagcuuaccauggacgccaugaagcgcggccugugcugcgugcuccugcugugcggggccgucuucgugagccccagcgccuccaaggaggugaaguccuuccuguggacccagagccuccgccgggagcugagcggcuacugcuccaacaucaagcugcaggucgugaaggacgcccaggcgcuccugcacgggcuggacuucagcgagguguccaacguccagcgccucaugcggaagcagaagcgcgacgacagcgaccugaagcggcugcgcgaccucaaccaggccgugaacaaccugguggagcugaaguccacccagcagaaguccauccuccgggucggcacgcugaccagcgacgaccugcucacccuggccgccgaccuggagaagcucaagagcaaggugauccgcaccgagcggccccuguccagcgggguguacaugggcaaccuguccacgcagcagcucgagcagcgccgggcccugcugaacaugaucgggauggucggcggcgcgcaggggacccagccgggccgcgacgggguggugcgggucugggacgugaagaaccccgaccuccugaacaaccaguucggcaccaugcccagccugacccucgccugccugacgaagcagggccagguggaccugaacgacgccguccucgcccugaccgaccuggggcucaucuacaccgcgaaguaccccaacuccagcgaccuggaccgccugucccagagccacccgauccucaacaugguggacaccaagaaguccagccugaacaucagcggcuacaacuucucccugggggccgccgugaaggccggcgccugcaugcucgacgggggcaacaugcuggagacgaucaaggucacgccccagaccauggacggcauccucaagagcauccugaaggugaagaagucccuggggauguucgugagcgacacccccggcgagcggaaccccuacgagaacauccuguacaagaucugccucuccggggacggcuggccguacaucgcgagccgcaccuccaucgucgggcgggccugggagaacaccaccguggaccuggagagcgacggcaagccccagaaggugggcuccgccgggagcaacaagucccugcagagcgccggcuuccccaccgggcucacguacucccagcugaugacccugaaggacagcaugaugcagcuggaccccuccgccaagaccuggaucgacaucgagggccgcccggaggaccccgucgagaucgcgcucuaccagcccaugagcgggugcuacauccacuucuuccgggagcccaccgaccugaagcaguucaagcaggacgccaaguacucccacggcaucgacguggccgaccuguucccggcccagcccggccucacgagcgccgucaucgaggcgcugccccgcaacauggugcugaccugccaggggagcgacgacaucaagcggcuccuggacucccagggccgccgcgacaucaagcugaucgacaucgcccucagcaaggccgacucccggcgcuucgagaacgccgugugggaccagugcaaggaccugugccacaugcacaccggggucgugguggagaagaagaagcggggcgggaaggaggagaucacgccccacugcgcccugauggacugcaucauguacgacgcggccgucagcggcggccucaacaucccggugcugcgcgccgugcugccccgggacauggucuuccgcaccuccagccccaagguggugcucugaggacuaguaauaaggaaacuguaugaaugucugugggcaggaagugaagagauccuucuguaaagguuuuuggaauuaugucugcugaauaauaaacuuuuuugaaauaauaaaucugguagaaaaaugagaucucaaaggcucuuuucagagccaccaaaaaaaaaaaaaaaaaaaaaaaaaaaaaaaaaaaaaaaaaaaaaaaaaaaaaaaaaaaaaaaaagaauu

SEQ ID NO: 18728 - RNA, 2078 nt, Artificial Sequence
  mRNA product Design b-4 (hSL-A64-N5) comprising derived and/or modified sequence from LASV(Lassa virus/H.sapiens-wt/NGA/2016/ISTH_0017;Clade II)__AVO03568__SP-HsPLAT_NP(2-569) (opt1)
aggagagucccgcagucggcguccagcggcucugcuuguucgugugugugucguugcaggccuuauucaagcuuaccauggacgccaugaagcgcggccugugcugcgugcuccugcugugcggggccgucuucgugagccccagcgccuccaaggaggugaaguccuuccuguggacccagagccuccgccgggagcugagcggcuacugcuccagcaucaagcugcaggucgugaaggacgcccaggcgcuccugcacgggcuggacuucuccgaggugagcaacguccagcgccucaugcggaagcagaagcgcgacgacuccgaccugaagcggcugcgcgaccucaaccaggccgugaacaaccugguggagcucaagagcacccagcagaaguccauccugcgggucggcacgcugaccagcgacgaccugcucacccuggccgccgaccuggagaagcucaaguccaaggugauccgcaccgagcggccccugagcuccgggguguacaugggcaaccugagcacgcagcagcucgagcagcgccgggcccugcugaacaugaucgggauggcgggcggcgcccaggggacccagccgggccgcgacggggucgugcgggugugggacgucaagaaccccgaccuccugaacaaccaguucggcaccaugcccucccugacccucgccugccugacgaagcagggccagguggaccugaacgacgccgugcucgcgcugaccgaccuggggcucaucuacaccgccaaguaccccaacagcuccgaccuggaccgccugagccagagccacccgauccucaacauggucgacaccaagaaguccagccugaacaucuccggcuacaacuucagccugggggccgccgugaaggccggcgcgugcaugcucgacgggggcaacaugcuggagacgaucaaggugacgccccagaccauggacggcauccugaaguccauccucaaggucaagcggagccuggggauguucguguccgacgcccccggcgagcgcaaccccuacgagaacauccuguacaagaucugccucagcggggacggcuggccguacaucgccucccggaccagcaucguggggcgcgccugggagaacaccaccgucgaccuggaguccgacggcaagccccagaaggugggcgccaccgggagcaacaagucccugcagagcgcgggcuuccccaccgggcucacguacucccagcugaugacccugaaggacagcaugaugcagcuggaccccuccgccaagaccuggaucgacaucgagggccggccggaggaccccguggaggucgcccucuaccagcccgugagcgggugcuacauccacuucuuccgcgagcccaccgaccugaagcaguucaagcaggacgccaaguacucccacggcaucgacgucgccgaccuguucccggcgcagcccggccucacgagcgccgugaucgaggcccugccccggaacauggugcugaccugccaggggagcgacgacaucaagaagcuccuggacucccagggccgcaaggacaucaagcugaucgacaucgcccucagcaaggccgacucccgccgguucgagaacgcggucugggaccagugcaaggaccugugccacaugcacaccggggugguggucgagaagaagaagcgcggcgggaaggaggagaucacgccccacugcgcccugauggacugcaucauguacgacgccgccgugagcggcggccucaacaucccggugcugcgggcgguccugccccgcgacaugguguuccggaccuccagccccaaggugguccucugaggacuaguaauaaggaaacuguaugaaugucugugggcaggaagugaagagauccuucuguaaagguuuuuggaauuaugucugcugaauaauaaacuuuuuugaaauaauaaaucugguagaaaaaugagaucucaaaggcucuuuucagagccaccaaaaaaaaaaaaaaaaaaaaaaaaaaaaaaaaaaaaaaaaaaaaaaaaaaaaaaaaaaaaaaaaagaauu

SEQ ID NO: 18729 - RNA, 2078 nt, Artificial Sequence
  mRNA product Design b-4 (hSL-A64-N5) comprising derived and/or modified sequence from LASV(Lassa virus/H.sapiens-wt/NGA/2018/ISTH_0959;Clade II)__AVV65100__SP-HsPLAT_NP(2-569) (opt1)
aggagagucccgcagucggcguccagcggcucugcuuguucgugugugugucguugcaggccuuauucaagcuuaccauggacgccaugaagcgcggccugugcugcgugcuccugcugugcggggccgucuucgugagccccagcgccuccaaggaggugaaguccuuccuguggacccagagccuccgccgggagcugagcggcuacugcuccaacaucaagcugcaggucgugaaggacgcccaggcgcuccugcacgggcuggacuucagcgagguguccaacguccagcgccucaugcggaagcagaagcgcgacgacagcgaccugaagcggcugcgcgaccucaaccaggccgugaacaaccugguggagcugaaguccacccagcagaaguccauccuccgggucggcacccugaccagcgacgaccugcucacccuggccgccgaccuggagaagcucaagagcaaggugauccgcaccgagcggccccuguccagcgggguguacaugggcaaccuguccacgcagcagcucgagcagcgccgggcccugcugaaccucaucgggauggucggcggcgcgcaggggacccagccgggccgcgacgggguggugcgggucugggacgugaagaaccccgaccugcugaacaaccaguucggcaccaugcccagccucacccuggccugccugacgaagcagggccagguggaccucaacgacgucgugcuggcccugaccgaccucgggcugaucuacaccgccaaguaccccaacuccagcgaccuggaccgccucucccagagccacccgauccugaacaugguggacaccaagaaguccagccugaacaucagcggcuucaacuucucccucggggcggccgucaaggccggcgccugcaugcuggacgggggcaacaugcuggagacgaucaaggugacgccccagaccauggacggcauccucaagagcauccugaaggugaagaagucccuggggauguucgucagcgacacccccggcgagcggaaccccuacgagaacauccucuacaagaucugccuguccggggacggcuggccguacaucgccagccgcaccuccaucguggggcgggcgugggagaacaccaccguggaccuggagagcgacggcaagccccacaaggucggcaccgccggguccaacaagagccuccaguccgccggcuuccccacggggcugaccuacagccagcugaugacccugaaggacuccaugaugcagcucgaccccagcgccaagaccuggaucgacaucgagggccgcccggaggaccccguggagaucgcccuguaccagcccauguccgggugcuacauccacuucuuccgggagcccacggaccugaagcaguucaagcaggacgcgaaguacagccacggcaucgacgucgccgaccucuucccggcccagcccggccugaccuccgccgugaucgaggcccugccccgcaacauggugcugaccugccaggggagcgacgacaucaagcggcuccuggacagccagggccgcaaggacaucaagcucaucgacaucgcgcuguccaagaccgacagccgccgguucgagaacgccgucugggaccagugcaaggaccugugccacaugcacacgggggugguggucgagaagaagaagcgcggcgggaaggaggagaucacgccccacugcgcccucauggacugcaucauguacgacgccgccguguccggcggccugaacaucccggugcugcgggcgguccucccccgcgacaugguguuccggaccagcucccccaaggugguccugugaggacuaguaauaaggaaacuguaugaaugucugugggcaggaagugaagagauccuucuguaaagguuuuuggaauuaugucugcugaauaauaaacuuuuuugaaauaauaaaucugguagaaaaaugagaucucaaaggcucuuuucagagccaccaaaaaaaaaaaaaaaaaaaaaaaaaaaaaaaaaaaaaaaaaaaaaaaaaaaaaaaaaaaaaaaaagaauu

SEQ ID NO: 18730 - RNA, 2078 nt, Artificial Sequence
  mRNA product Design b-4 (hSL-A64-N5) comprising derived and/or modified sequence from LASV(LASV003-NIG-2008;Clade II)__AIT17581__SP-HsPLAT_NP(2-569) (opt1)
aggagagucccgcagucggcguccagcggcucugcuuguucgugugugugucguugcaggccuuauucaagcuuaccauggacgccaugaagcgcggccugugcugcgugcuccugcugugcggggccgucuucgugagccccagcgccuccaaggaggugaaguccuuccuguggacccagagccuccgccgggagcugagcggcuacugcuccagcaucaagcugcaggucgugaaggacgcccaggcgcuccugcacgggcuggacuucuccgaggugagcaacguccagcgccucaugcggaagcagaagcgcgacgacuccgaccugaagcggcugcgcgaccucaaccaggccgugaacaaccugguggagcucaagagcacccagcagaaguccguccugcgggugggcacccugaccagcgacgaccugcucacccuggccgccgaccuggagaagcucaaguccaaggugauccgcaccgagcggccccugagcuccggggucuacaugggcaaccugagcgcccagcagcucgagcagcgccggacgcugcugaacaugaucgggauggugggcggcgcgcaggggacccagccgggccgcgacggggugguccgggugugggacgugaagaaccccgaccuccugaacaaccaguucggcaccaugcccucccugacccucgccugccugacgaagcaggggcaggucgaccugaacgacguggugcucgcccugaccgaccugggccucaucuacaccgccaaguaccccaacagcuccgaccuggaccgccugagccagagccacccgauccucuccauggucgacaccaagaaguccagccugaacaucagcggcuacaacuucucccugggggcggccgugaaggccggcgccugcaugcucgacgggggcaacaugcuggagacgaucaaggugacgccccagaccauggacggcauccucaagagcauccugaaggucaagaagucccuggggauguucgugagcgacacccccggcgagcggaaccccuacgagaacauccuguacaagaucugccucuccggggacggcuggccguacaucgccagccgcaccuccaucguggggcgggcgugggagaacaccaccgucgaccuggagagcgacggcaagccccagaaggugggcaccgccggguccaacaagagccugcaguccgccggcuuccccacggggcucaccuacagccagcugaugacccugaaggacuccaugaugcagcuggaccccagcgccaagaccuggaucgacaucgagggccgcccggaggaccccgucgagaucgcccucuaccagcccauguccgggugcuacauccacuucuuccgggagcccacggaccugaagcaguucaagcaggacgcgaaguacagccacggcaucgacgugaccgaccuguucccggcccagcccggccucaccagcgccgugaucgaggcccugccccgcaacaugguccugaccugccagggguccgacgacaucaagcggcuccuggacagccagggccgccgcgacaucaagcugaucgacaucgcccucuccaaggcggacagccggcgcuucgagaacgccgugugggaccagugcaaggaccugugccacaugcacacggggguggucguggagaagaagaagcggggcgggaaggaggagaucacgccccacugcgcccugauggacugcaucauguacgacgccgccguguccggcggccucaacaucccgguccugcgcgcggugcugccccgggacaugguguuccgcaccagcucccccaaggucgugcucugaggacuaguaauaaggaaacuguaugaaugucugugggcaggaagugaagagauccuucuguaaagguuuuuggaauuaugucugcugaauaauaaacuuuuuugaaauaauaaaucugguagaaaaaugagaucucaaaggcucuuuucagagccaccaaaaaaaaaaaaaaaaaaaaaaaaaaaaaaaaaaaaaaaaaaaaaaaaaaaaaaaaaaaaaaaaagaauu

SEQ ID NO: 18731 - RNA, 2078 nt, Artificial Sequence
  mRNA product Design b-4 (hSL-A64-N5) comprising derived and/or modified sequence from LASV(LASV035-NIG-2009;Clade II)__AIT17589__SP-HsPLAT_NP(2-569) (opt1)
aggagagucccgcagucggcguccagcggcucugcuuguucgugugugugucguugcaggccuuauucaagcuuaccauggacgccaugaagcgcggccugugcugcgugcuccugcugugcggggccgucuucgugagccccagcgccuccaaggaggugaaguccuuccuguggacccagagccuccgccgggagcugagcggcuacugcuccagcaucaagcugcaggucgugaaggacgcccaggcgcuccugcacgggcuggacuucuccgaggugagcaacguccagcgccucaugcggaagcagaagcgcgacgacuccgaccugaagcggcugcgcgaccucaaccaggccgugaacaaccugguggagcucaagagcacccagcagaaguccauccugcgggucggcacgcugaccagcgacgaccugcucacccuggccgccgaccuggagaagcucaaguccaaggugauccgcaccgagcggccccugagcuccgggguguacaugggcaaccugagcgcccagcagcucgagcagcgccgggcgcugcugaacaugaucgggauggucggcggcgcccaggggacgcagccgggccgcgacgggguggugcgggucugggacgugaagaaccccgaccuccugaacaaccaguucggcaccaugcccucccugacccucgccugccugaccaagcagggccagguggaccugaacgacgccguccucgcgcugacggaccuggggcucaucuacaccgccaaguaccccaacagcuccgaccuggaccgccugagccagagccacccgauccucaacaugguggacaccaagaaguccagccugaacaucuccggcuacaacuucagccugggggccgccgugaaggccggcgcgugcaugcucgacgggggcaacaugcuggagaccaucaaggucacgccccagaccauggacggcauccugaaguccauccucaaggugaagcggagccuggggauguucguguccgacacccccggcgagcgcaaccccuacgagaacauccuguacaagaucugccucagcggggacggcuggccguacaucgccucccggaccagcaucgucgggcgcgccugggagaacacgaccguggaccuggaguccgacggcaagccccagaaggugggcaccaccgggagcaacaagucccugcagagcgccggcuuccccacggggcucaccuacucccagcugaugacccugaaggacagcaugaugcagcuggaccccuccgccaagaccuggaucgacaucgagggccggccggaggaccccgucgagaucgcgcucuaccagcccaugagcgggugcuacauccacuucuuccgcgagcccacggaccugaagcaguucaagcaggacgccaaguacucccacggcaucgacguggccgaccuguucccggcccagcccggccucaccagcgccgucaucgaggcgcugccccggaacauggugcugaccugccaggggagcgacgacaucaagaagcuccuggacucccagggccgccgcgacaucaagcugaucgacaucgcccucagcaaggccgacucccggaaguucgagaacgccgugugggaccagugcaaggaccugugccacaugcacaccggggucgugguggagaagaagaagcgcggcgggaaggaggagaucacgccccacugcgcccugauggacugcaucauguacgacgcggccgucagcggcggccucaacaucccggugcugcgggccgugcugccccgcgacauggucuuccggaccuccagccccaagguggugcucugaggacuaguaauaaggaaacuguaugaaugucugugggcaggaagugaagagauccuucuguaaagguuuuuggaauuaugucugcugaauaauaaacuuuuuugaaauaauaaaucugguagaaaaaugagaucucaaaggcucuuuucagagccaccaaaaaaaaaaaaaaaaaaaaaaaaaaaaaaaaaaaaaaaaaaaaaaaaaaaaaaaaaaaaaaaaagaauu

SEQ ID NO: 18732 - RNA, 2078 nt, Artificial Sequence
  mRNA product Design b-4 (hSL-A64-N5) comprising derived and/or modified sequence from LASV(LASV1000-NIG-2009;Clade II)__AIT17783__SP-HsPLAT_NP(2-569) (opt1)
aggagagucccgcagucggcguccagcggcucugcuuguucgugugugugucguugcaggccuuauucaagcuuaccauggacgccaugaagcgcggccugugcugcgugcuccugcugugcggggccgucuucgugagccccagcgccuccaaggaggugaaguccuuccuguggacccagagccuccgccgggagcugagcggcuacugcuccaacaucaagcugcaggucgugaaggacgcccaggcgcuccugcacgggcuggacuucagcgagguguccaacguccagcgccucaugcggaagcagaagcgcgacgacagcgaccugaagcggcugcgcgaccucaaccaggccgugaacaaccugguggagcugaaguccacccagcagaaguccauccuccgggucggcacgcugaccagcgacgaccugcucacccuggccgccgaccuggagaagcucaagagcaaggugauccgcaccgagcggccccuguccagcgggguguacaugggcaaccuguccacgcagcagcucgagcagcgccgggcccugcugaacaugaucgggauggucggcggcgcgcaggggacccagccgggccgcgacgggguggugcgggucugggacgugaagaaccccgaccuccugaacaaccaguucggcaccaugcccagccugacccucgccugccugacgaagcagggccagguggaccugaacgacgucgugcucgcccugaccgaccuggggcucaucuacaccgccaaguaccccaacuccagcgaccuggaccgccugucccagagccacccgauccucaacaugguggacaccaagaaguccagccugaacaucagcggcuacaacuucucccugggggcggccgucaaggccggcgccugcaugcucgacgggggcaacaugcuggagacgaucaaggugacgccccagaccauggacggcauccucaagagcauccugaaggugaagaagucccuggggauguucgucagcgacacccccggcgagcggaaccccuacgagaacauccuguacaagaucugccucuccggggacggcuggccguacaucgccagccgcaccuccaucguggggcgggcgugggagaacaccaccguggaccuggagagcgacggcaagccccagaaggucggcaccgccggguccaacaagagccugcaguccgccggcuuccccacggggcucaccuacagccagcugaugacccugaaggacuccaugaugcagcuggaccccagcgccaagaccuggaucgacaucgagggccgcccggaggaccccguggagaucgcccucuaccagcccgucuccgggugcuacauccacuucuuccgggagcccacggaccugaagcaguucaagcaggacgcgaaguacagccacggcaucgacguggccgaccuguucccggcccagcccggccucaccuccgccgugaucgaggcccugccccgcaacaugguccugaccugccaggggagcgacgacaucaagcggcuccuggacagccagggccgccgcgacaucaagcugaucgacaucgcgcucuccaaggccgacagccggcgcuucgagaacgccgugugggaccagugcaaggaccugugccacaugcacaccgggguggucguggagaagaagaagcggggcgggaaggaggagaucacgccccacugcgcccugauggacugcaucauguacgacgccgcgguguccggcggccucaacaucccgguccugcgcgccgugcugccccgggacaugguguuccgcaccagcucccccaaggucgugcucugaggacuaguaauaaggaaacuguaugaaugucugugggcaggaagugaagagauccuucuguaaagguuuuuggaauuaugucugcugaauaauaaacuuuuuugaaauaauaaaucugguagaaaaaugagaucucaaaggcucuuuucagagccaccaaaaaaaaaaaaaaaaaaaaaaaaaaaaaaaaaaaaaaaaaaaaaaaaaaaaaaaaaaaaaaaaagaauu

SEQ ID NO: 18733 - RNA, 2078 nt, Artificial Sequence
  mRNA product Design b-4 (hSL-A64-N5) comprising derived and/or modified sequence from LASV(LASV221-NIG-2010;Clade II)__AIT17625__SP-HsPLAT_NP(2-569) (opt1)
aggagagucccgcagucggcguccagcggcucugcuuguucgugugugugucguugcaggccuuauucaagcuuaccauggacgccaugaagcgcggccugugcugcgugcuccugcugugcggggccgucuucgugagccccagcgccuccaaggaggugaaguccuuccuguggacccagagccuccgccgggagcugagcggcuacugcuccagcaucaagcugcaggucgugaaggacgcccaggcgcuccugcacgggcuggacuucuccgaggugagcaacguccagcgccucaugcggaagcagcgccgggacgacuccgaccugaagcgccugcgggaccucaaccaggccgugaacaaccugguggagcucaagagcacccagcagaaguccauccugcgcgucggcacgcugaccagcgacgaccugcucacccuggccgccgaccuggagaagcucaaguccaaggugauccggaccgagcgcccccugagcuccgggguguacaugggcaaccugagcacgcagcagcucgagcagcggcgcgcccugcugaacaugaucgggauggucggcggcgcgcaggggacccagccgggccgggacgggguggugcgcgucugggacgugaagaaccccgaccuccugaacaaccaguucggcaccaugcccucccugacccucgccugccugacgaagcagggccagguggaccugaacgacgccguccucgcccugaccgaccuggggcucaucuacaccgcgaaguaccccaacagcuccgaccuggaccggcugagccagagccacccgauccucaacaugguggacaccaagaaguccagccugaacaucuccggcuacaacuucagccugggggccgccgugaaggccggcgccugcaugcucgacgggggcaacaugcuggagacgaucaaggucacgccccagaccguggacggcauccugaaguccauccucaaggugaagcgcagccuggggauguucgucuccgacacccccggcgagcggaaccccuacgagaacauccuguacaagaucugccucagcggggacggcuggccguacaucgcgucccgcaccagcaucguggggcgggccugggagaacaccaccguggaccuggaguccgacggcaagccccagaaggucggcaccgccgggagcaacaagucccugcagagcgccggcuuccccacggggcucaccuacucccagcugaugacccugaaggacagcaugaugcagcuggaccccuccgccaagaccuggaucgacaucgagggccgcccggaggaccccguggagaucgcgcucuaccagcccaugagcgggugcuacauccacuucuuccgggagcccacggaccugaagcaguucaagcaggacgccaaguacucccacggcaucgacgucgccgaccuguucccggcccagcccggccucaccagcgccgugaucgaggcgcugccccgcaacauggugcugaccugccaggggagcgacgacaucaagcgccuccuggacucccagggccggcgcgacaucaagcugaucgacaucgcccucagcaaggccgacucccggaaguucgagaacgccgucugggaccagugcaaggaccugugccacaugcacaccggggugguggucgagaagaagaagcgcggcgggaaggaggagaucacgccccacugcgcccugauggacugcaucauguacgacgcggccgugagcggcggccucaacaucccggugcugcgggccguccugccccgcgacaugguguuccggaccuccagccccaaggugguccucugaggacuaguaauaaggaaacuguaugaaugucugugggcaggaagugaagagauccuucuguaaagguuuuuggaauuaugucugcugaauaauaaacuuuuuugaaauaauaaaucugguagaaaaaugagaucucaaaggcucuuuucagagccaccaaaaaaaaaaaaaaaaaaaaaaaaaaaaaaaaaaaaaaaaaaaaaaaaaaaaaaaaaaaaaaaaagaauu

SEQ ID NO: 18734 - RNA, 2078 nt, Artificial Sequence
  mRNA product Design b-4 (hSL-A64-N5) comprising derived and/or modified sequence from LASV(LASV237-NIG-2010;Clade II)__AIT17639__SP-HsPLAT_NP(2-569) (opt1)
aggagagucccgcagucggcguccagcggcucugcuuguucgugugugugucguugcaggccuuauucaagcuuaccauggacgccaugaagcgcggccugugcugcgugcuccugcugugcggggccgucuucgugagccccagcgccuccaaggaggugaaguccuuccuguggacccagagccuccgccgggagcugagcggcuacugcuccaacaucaagcugcaggucgugaaggacgcccaggcgcuccugcacgggcuggacuucagcgagguguccaacguccagcgccucaugcggaagcagaagcgcgacgacagcgaccugaagcggcugcgcgaccucaaccaggccgugaacaaccugguggagcugaaguccacccagcagaaguccauccuccgggucggcacccugaccagcgacgaccugcucacccuggccgccgaccuggagaagcucaagagcaaggugauccgcaccgagcggccccuguccagcgggguguacaugggcaaccuguccacgcagcagcucgagcagcgccgggcccugcugaacaugaucgggauggucggcggcgcgcaggggacccagccgggccgcgacgggguggugcgggucugggacgugaagaaccccgaccuccugaacaaccaguucggcaccaugcccagccugacccucgccugccugacgaagcagggccagguggaccugaacgacgccguccucgcccugaccgaccuggggcucaucuacaccgcgaaguaccccaacuccagcgaccuggaccgccugucccagagccacccgauccucaacaugguggacaucaagaaguccagccugaacaucagcggcuacaacuucucccugggggccgccgugaaggccggcgccugcaugcucgacgggggcaacaugcuggagaccaucaaggucacgccccagaccauggacggcauccucaagagcauccugaaggugaagcggucccuggggauguucgugagcgacacccccggcgagcgcaaccccuacgagaacauccuguacaagaucugccucuccggggacggcuggccguacaucgcgagccggaccuccaucgucgggcgcgccugggagaacacgaccguggaccuggagagcgacggcaagccccagaaggugggcuccgccgggagcaacaagucccugcagagcgccggcuuccccaccgggcucaccuacucccagcugaugacgcugaaggacagcaugaugcagcuggaccccuccgccaagaccuggaucgacaucgagggccggccggaggaccccgucgagaucgcgcucuaccagcccaugagcgggugcuacauccacuucuuccgcgagcccaccgaccugaagcaguucaagcaggacgccaaguacucccacggcaucgacguggccgaccuguucccggcccagcccggccucaccagcgccgucaucgaggcgcugccccggaacauggugcugacgugccaggggagcgacgacaucaagcgccuccuggacucccagggccgccgggacaucaagcugaucgacaucgcccucagcaaggccgacucccgccgguucgagaacgccgugugggaccagugcaaggaccugugccacaugcacaccggggucgugguggagaagaagaagcgcggcgggaaggaggagaucacgccccacugcgcccugauggacugcaucauguacgacgcggccgucagcggcggccucaacaucccggugcugcgggccgugcugccccgcgacauggucuuccggaccuccagccccaagguggugcucugaggacuaguaauaaggaaacuguaugaaugucugugggcaggaagugaagagauccuucuguaaagguuuuuggaauuaugucugcugaauaauaaacuuuuuugaaauaauaaaucugguagaaaaaugagaucucaaaggcucuuuucagagccaccaaaaaaaaaaaaaaaaaaaaaaaaaaaaaaaaaaaaaaaaaaaaaaaaaaaaaaaaaaaaaaaaagaauu

SEQ ID NO: 18735 - RNA, 2078 nt, Artificial Sequence
  mRNA product Design b-4 (hSL-A64-N5) comprising derived and/or modified sequence from LASV(LASV253-NIG-2011;Clade II)__AIT17671__SP-HsPLAT_NP(2-569) (opt1)
aggagagucccgcagucggcguccagcggcucugcuuguucgugugugugucguugcaggccuuauucaagcuuaccauggacgccaugaagcgcggccugugcugcgugcuccugcugugcggggccgucuucgugagccccagcgccuccaaggaggugaaguccuuccuguggacccagagccuccgccgggagcugagcggcuacugcuccagcaucaagcugcaggucgugaaggacgcccaggcgcuccugcacgggcuggacuucuccgaggugagcaacguccagcgccucaugcggaagcagaagcgcgacgacuccgaccugaagcggcugcgcgaccucaaccaggccgugaacaaccugguggagcucaagagcacccagcagaaguccguccugcgggugggcacccugaccagcgacgaccugcucacccuggccgccgaccuggagaagcucaaguccaaggugauccgcaccgagcggccccugagcuccggggucuacaugggcaaccugagcacgcagcagcucgagcagcgccgggcccugcugaacaugaucgggauggugggcggcgcgcaggggacccagccgggccgcgacggggugguccgggugugggacgugaagaaccccgaccuccugaacaaccaguucggcaccaugcccucccugacccucgccugccugacgaagcaggggcaggucgaccugaacgacguggugcucgcccugaccgaccugggccucaucuacaccgccaaguaccccaacagcuccgaccuggaccgccugagccagagccacccgauccucaacauggucgacaccaagaaguccagccugaacaucuccggcuacaacuucagccugggggcggccgugaaggccggcgccugcaugcucgacgggggcaacaugcuggagacgaucaaggugacgccccagaccauggacggcauccugaaguccauccucaaggucaagaagucccuggggauguucgugagcgacacccccggcgagcggaaccccuacgagaacauccuguacaagaucugccucagcggggacggcuggccguacaucgccucccgcaccagcaucguggggcgggcgugggagaacaccaccgucgaccuggaguccgacggcaagccccagaaggugggcaccgccgggagcaacaagucccugcagagcgccggcuuccccacggggcucaccuacucccagcugaugacccugaaggacagcaugaugcagcuggaccccuccgccaagaccuggaucgacaucgagggccgcccggaggaccccgucgagaucgcccucuaccagcccaugagcgggugcuacauccacuucuuccgggagcccacggaccugaagcaguucaagcaggacgcgaaguacucccacggcaucgacgugaccgaccuguucccggcccagcccggccucaccagcgccgugaucgaggcccugccccgcaacaugguccugaccugccaggggagcgacgacaucaagcggcuccuggacucccagggccgccgcgacaucaagcugaucgacaucgcccucagcaaggcggacucccggcgcuucgagaacgccgugugggaccagugcaaggaccugugccacaugcacacggggguggucguggagaagaagaagcggggcgggaaggaggagaucacgccccacugcgcccugauggacugcaucauguacgacgccgccgugagcggcggccucaacaucccgguccugcgcgcggugcugccccgggacaugguguuccgcaccuccagccccaaggucgugcucugaggacuaguaauaaggaaacuguaugaaugucugugggcaggaagugaagagauccuucuguaaagguuuuuggaauuaugucugcugaauaauaaacuuuuuugaaauaauaaaucugguagaaaaaugagaucucaaaggcucuuuucagagccaccaaaaaaaaaaaaaaaaaaaaaaaaaaaaaaaaaaaaaaaaaaaaaaaaaaaaaaaaaaaaaaaaagaauu

SEQ ID NO: 18736 - RNA, 2078 nt, Artificial Sequence
  mRNA product Design b-4 (hSL-A64-N5) comprising derived and/or modified sequence from LASV(LASV254-NIG-2011;Clade II)__AIT17675__SP-HsPLAT_NP(2-569) (opt1)
aggagagucccgcagucggcguccagcggcucugcuuguucgugugugugucguugcaggccuuauucaagcuuaccauggacgccaugaagcgcggccugugcugcgugcuccugcugugcggggccgucuucgugagccccagcgccuccaaggaggugaaguccuuccuguggacccagagccuccgccgggagcugagcggcuacugcuccagcaucaagcugcaggucgugaaggacgcccaggcgcuccugcacgggcuggacuucuccgaggugagcaacguccagcgccucaugcggaagcagaagcgcgacgacuccgaccugaagcggcugcgcgaccucaaccaggccgugaacaaccugguggagcucaagagcacccagcagaaguccguccugcgggugggcacgcugaccagcgacgaccugcucacccuggccgccgaccuggagaagcucaaguccaaggugauccgcaccgagcggccccugagcuccggggucuacaugggcaaccugagcacgcagcagcucgagcagcgccgggcccugcugaacaugaucgggauggugggcggcgcgcaggggacccagccgggccgcgacggggugguccgggugugggacgugaagaaccccgaccuccugaacaaccaguucggcaccaugcccucccugacccucgccugccugacgaagcaggggcaggucgaccugaacgacgccgugcucgcccugaccgaccugggccucaucuacaccgcgaaguaccccaacagcuccgaccuggaccgccugagccagagccacccgauccucaacaugguggacaccaagaaguccagccugaacaucuccggcuacaacuucagccugggggccgccgucaaggccggcgccugcaugcucgacgggggcaacaugcuggagacgaucaaggugacgccccagaccauggacggcauccugaaguccauccucaaggugaagaagucccuggggauguucgucagcgacacccccggcgagcggaaccccuacgagaacauccuguacaagaucugccucagcggggacggcuggccguacaucgcgucccgcaccagcaucguggggcgggccugggagaacaccaucguggaccuggaguccgacggcaagccccagaaggucggcaccgccgggagcaacaagucccugcagagcgccggcuuccccaccgggcucacguacucccagcugaugacccugaaggacagcaugaugcagcuggaccccuccgccaagaccuggaucgacaucgagggccgcccggaggaccccguggagaucgcgcucuaccagcccaugagcgggugcuacauccacuucuuccgggagcccaccgaccugaagcaguucaagcaggacgccaaguacucccacggcaucgacgucgccgaccuguucccggcccagcccggccucacgagcgccgugaucgaggcgcugccccgcaacauggugcugaccugccaggggagcgacgacaucaagcggcuccuggacucccagggccgccgcgacaucaagcugaucgacaucgcccucagcaaggccgacucccggcgcuucgagaacgccgucugggaccagugcaaggaccugugccacaugcacaccggggugguggucgagaagaagaagcggggcgggaaggaggagaucacgccccacugcgcccugauggacugcaucauguacgacgcggccgugagcggcggccucaacaucccggugcugcgcgccguccugccccgggacaugguguuccgcaccuccagccccaaggugguccucugaggacuaguaauaaggaaacuguaugaaugucugugggcaggaagugaagagauccuucuguaaagguuuuuggaauuaugucugcugaauaauaaacuuuuuugaaauaauaaaucugguagaaaaaugagaucucaaaggcucuuuucagagccaccaaaaaaaaaaaaaaaaaaaaaaaaaaaaaaaaaaaaaaaaaaaaaaaaaaaaaaaaaaaaaaaaagaauu

SEQ ID NO: 18737 - RNA, 2078 nt, Artificial Sequence
  mRNA product Design b-4 (hSL-A64-N5) comprising derived and/or modified sequence from LASV(Nig08-04;Clade II)__ADU56611__SP-HsPLAT_NP(2-569) (opt1)
aggagagucccgcagucggcguccagcggcucugcuuguucgugugugugucguugcaggccuuauucaagcuuaccauggacgccaugaagcgcggccugugcugcgugcuccugcugugcggggccgucuucgugagccccagcgccuccaaggaggugaaguccuuccuguggacccagagccuccgccgggagcugagcggcuacugcuccaacaucaagcugcaggucgugaaggacgcccaggcgcuccugcacgggcuggacuucagcgagguguccaacguccagcgccucaugcggaagcagaagcgcgacgacggcgaccugaagcggcugcgcgaccucaaccaggccgugaacaaccugguggagcucaagagcacccagcagaaguccguccugcggguggggacccugaccagcgacgaccugcucacccuggccgccgaccuggagaagcucaaguccaaggugauccgcaccgagcggccccugagcuccggcgucuacauggggaaccugagcacgcagcagcucgagcagcgcaaggcccugcuguccaugaucggcauggugggcggggcgcagggcacccagccggggcgggacggcgugguccgcgugugggacgugaagaaccccgaccuccugaacaaccaguucgggaccaugcccagccugacccucgccugccugacgaagcagggccaggucgaccugaacgacgccgugcucgcccugaccgaccugggccucaucuacaccgcgaaguaccccaacuccagcgaccuggaccggcugucccagagccacccgauccucaacaugguggacaccaagaaguccagccugaacaucagcggguacaacuucucccugggcgccgccgucaaggccggggccugcaugcucgacggcggcaacaugcuggagacgaucaaggugacgccccagaccauggacgggauccucaagagcauccugaaggugaagcgcucccugggcauguucgucagcgacacccccggggagcggaaccccuacgagaacauccuguacaagaucugccucuccggcgacggguggccguacaucgcgagccgcaccuccaucgugggccgggccugggagaacaccaccguggaccuggagagcgacggcaagccccagaaggucgggaccgccggcuccaacaagagccugcaguccgccggguuccccacgggccucaccuacagccagcugaugacccugaaggacuccaugaugcagcuggaccccagcgccaagaccuggaucgacaucgaggggcgcccggaggaccccguggagaucgcgcucuaccagcccauguccggcugcuacauccacuucuuccgggagcccacggaccugaagcaguucaagcaggacgccaaguacagccacggcaucgacgucaccgaccuguucuccgcccagccggggcucaccagcgccgugaucgaggcccugccccgcaacauggugcugaccugccagggcagcgacgacaucaagaagcuccuggacucccaggggcggcgcgacaucaagcugaucgacaucagccucaacaaggcggacucccgccgguucgagaacgccgucugggaccagugcaaggaccugugccacaugcacacgggcgugguggucgagaagaagaagcgcgggggcaaggaggagaucacgccccacugcgcccugauggacugcaucauguucgacgccgccgugagcggcgggcucaacauccccauccugcgggcggugcugccgcgcgacauggucuuccggaccuccagccccaagguggugcucugaggacuaguaauaaggaaacuguaugaaugucugugggcaggaagugaagagauccuucuguaaagguuuuuggaauuaugucugcugaauaauaaacuuuuuugaaauaauaaaucugguagaaaaaugagaucucaaaggcucuuuucagagccaccaaaaaaaaaaaaaaaaaaaaaaaaaaaaaaaaaaaaaaaaaaaaaaaaaaaaaaaaaaaaaaaaagaauu

SEQ ID NO: 18738 - RNA, 2081 nt, Artificial Sequence
  mRNA product Design b-4 (hSL-A64-N5) comprising derived and/or modified sequence from LASV(GA391;Clade III)__AAA46284__SP-HsPLAT_NP(2-570) (opt1)
aggagagucccgcagucggcguccagcggcucugcuuguucgugugugugucguugcaggccuuauucaagcuuaccauggacgccaugaagcgcggccugugcugcgugcuccugcugugcggggccgucuucgugagccccagcgccuccaaggaggugcgcagcugccuguggacccagucccuccggcgcgagcugagcggcuacugcuccaacaucaagcugcaggucgugaaggacgcccaggcgcuccugcacgggcuggacuucagcgagguguccaacguccagcggcucaugcgcaagcagaagcgggacgacggcgaccugaagcgccugcgggaccucaaccaggccgugaacaaccugguggagcugaaguccacccagcagaaguccguccuccgcguggggacgcugagcuccgacgaccugcucauccuggccgccgaccuggagaagcucaagagcaaggugacccggaccgagcgcccccuguccagcggcgucuacauggggaaccuguccagccagcagcucgaccagcggcgcgcccugcugaacaugaucggcaugaccggcguguccgggggcgggaagggcgcgagcaacgggaucgugcgggucugggacgugaagaacgccgagcuccugaacaaccaguucggcacgaugccgucccugacccucgccugccugaccaagcagggccagguggaccugaacgacgccguccaggcgcucaccgaccuggggcugaucuacacggccaaguaccccaacagcagcgaccucgaccgccugucccagagccaccccauccugaacaugaucgacaccaagaaguccagccucaacaucuccggcuacaacuucagccugggggccgccgugaaggccggcgcgugcaugcuggacggcgggaacaugcucgagaccaucaaggugagcccccagaccauggacggcauccucaagagcauccugaaggucaagaagucccuggggauguucgugagcgacacgccgggcgagcggaaccccuacgagaacauccuguacaagaucugccuguccggggacggcuggagcuacaucgccucccgcaccagcaucgugggccgggccugggagaacaccgucguggaccucgagcaggacaacaagccccagaagaucgggaacggcggguccaacaagagccugcaguccgccggcuucgccgcggggcugaucuacagccagcucaugacccugaaggacuucaagugcuucaaccugauccccaacgccaagacguggauggacaucgagggccgcccggaggaccccguggagaucgcccuguaccagcccuccagcggcugcuacguccacuucuuccgggagcccaccgaccucaagcaguucaagcaggacgccaaguacagccacgggcgcgacgugaccgaccuguucgccgcgcagccgggccugaccuccgccgucaucgaggcccucccccggaacauggugaucacgugccaggggagcgaggacauccgcaagcugcuggagucccagggccgccgggacaucaagcucaucgacaucacccugagcaaggccgacucccgcaaguucgagaacgccgugugggaccaguucaaggaccugugccacaugcacaccggggucgugguggagaagaagaagcggggcggcaaggaggagaucacgccccacugcgcgcucauggacugcaucauguucgacgccgccgucagcgggggccuggacgccaaggugcugcgcgugguccucccccgggacaugguguuccgcaccuccaccccgaaggugguccugugaggacuaguaauaaggaaacuguaugaaugucugugggcaggaagugaagagauccuucuguaaagguuuuuggaauuaugucugcugaauaauaaacuuuuuugaaauaauaaaucugguagaaaaaugagaucucaaaggcucuuuucagagccaccaaaaaaaaaaaaaaaaaaaaaaaaaaaaaaaaaaaaaaaaaaaaaaaaaaaaaaaaaaaaaaaaagaauu

SEQ ID NO: 18739 - RNA, 2078 nt, Artificial Sequence
  mRNA product Design b-4 (hSL-A64-N5) comprising derived and/or modified sequence from LASV(Nig08-A19;Clade III)__ADU56619__SP-HsPLAT_NP(2-569) (opt1)
aggagagucccgcagucggcguccagcggcucugcuuguucgugugugugucguugcaggccuuauucaagcuuaccauggacgccaugaagcgcggccugugcugcgugcuccugcugugcggggccgucuucgugagccccagcgccuccaaggaggugaaguccuuccuguggacccagucccuccgccgggagcugagcggcuacugcuccaacaucaagcugcaggucgugaaggacgcccaggcgcuccugcacgggcuggacuucagcgagguguccaacguccagcgccucaugcggaagcagaagcgcgacgacggcgaccugaagcggcugcgcgaccucaaccaggccgugaacaaccugguggagcucaagagcacccagcagaaguccguccugcggguggggacccugagcuccgacgaccugcucgugcuggccgccgaccuggagaagcucaagagcaaggucgugcgcaccgagcggccccuguccagcggcaucuacauggggaaccuguccagccagcagcucgaccagcgcaaggcccugcugaacaugaucggcaugaccggcgggaacggcgggcggaacaccacguccgacggcaucgugcgcgucugggacgugaagaacgcggagcuccugaacaaccaguucgggaccaugccgagccugacccucgccugccugaccaagcagggccagguggaccugaacgacgccguccaggcccucacggaccugggccugaucuacaccgcgaaguaccccaacuccagcgaccucgaccggcuggcccagagccaccccauccugaacaugaucgacaccaagaaguccagccucaacaucuccggguacaacuucagccugggcgccgccgugaaggccggggcgugcaugcuggacggcggcaacaugcucgagaccaucaaggugagcccccagacgauggacgggauccucaagagcauccugaaggucaagcgcucccugggcauguucaucagcgacaccccgggggagcggaaccccuacgagaacauccuguacaagaucugccuguccggcgacggguggcccuacaucgccagccgcaccuccaucgugggccgggccugggagaacaccguggucgaccucgagagcgacaacaagccccagaagacgggcaacgggggcuccaacaagagccugcaguccgccggguucgccgcgggccugaccuacagccagcucaugacccugaaggacuccaugcugcagcuggacccgaacgccaagaccuggauggacaucgaggggcgccccgaggaccccguggagaucgcccucuaccagcccagcuccggcugcuacauccacuucuuccgggagccgacggaccugaagcaguucaagcaggacgccaaguacagccacggcaucgacgugaccgaccuguucgccgcgcagcccgggcucaccagcgccgucaucgaggcccugccccgcaacauggugaucacgugccagggcuccgaggacauccggaagcugcucgagagccaggggcgccgcgacaucaagcugaucgacaucucccugagcaaggucgacucccggaaguucgagaacgccgugugggaccaguucaaggaccucugccacaugcacaccggcaucguggucgagaagaagaagcgcgggggcaaggaggagaucacgccccacugcgcccugauggacugcaucauguucgacgcggccgugagcggcgggguggacgccaagguccugcgggccgugcucccgcgcgacaugguguuccggaccuccacccccaaggucgugcugugaggacuaguaauaaggaaacuguaugaaugucugugggcaggaagugaagagauccuucuguaaagguuuuuggaauuaugucugcugaauaauaaacuuuuuugaaauaauaaaucugguagaaaaaugagaucucaaaggcucuuuucagagccaccaaaaaaaaaaaaaaaaaaaaaaaaaaaaaaaaaaaaaaaaaaaaaaaaaaaaaaaaaaaaaaaaagaauu

SEQ ID NO: 18740 - RNA, 2078 nt, Artificial Sequence
  mRNA product Design b-4 (hSL-A64-N5) comprising derived and/or modified sequence from LASV(G1180-SLE-2010;Clade IV)__AIT17169__SP-HsPLAT_NP(2-569) (opt1)
aggagagucccgcagucggcguccagcggcucugcuuguucgugugugugucguugcaggccuuauucaagcuuaccauggacgccaugaagcgcggccugugcugcgugcuccugcugugcggggccgucuucgugagccccagcgccuccaaggagaucaagagcuuccuguggacccagucccuccgccgggagcugagcggcuacugcuccaacaucaagcuccagguggucaaggacgcccaggcgcugcugcacgggcuggacuucagcgagguguccaacgugcagcgccucaugcggaaggagcgccgggacgacaacgaccugaagcgccugcgggaccucaaccaggccgucaacaaccugguggagcucaagagcacccagcagaaguccauccugcgcgugggcacccugaccagcgacgaccugcucauccuggccgccgaccuggagaagcucaaguccaaggucauccggaccgagcgcccccugagcgccgggguguacaugggcaaccuguccagccagcagcucgaccagcggcgcgcgcugcuguccaugaucgggaugagcuccggcaaccagcgggcccaggccggccgcgacggggugguccgggugugggacgugaagaacgucgagcuccugaacaaccaguucggcaccaugccgagccugacgcucgccugccugaccaagcagggccagguggaccugaacgacgcggugcaggcccucaccgaccuggggcugaucuacaccgccaaguaccccaacacguccgaccucgaccgccugacccagagccaccccauccugaacaugaucgacaccaagaaguccagccucaacaucagcggguacaacuucucccugggcgccgccgucaaggcgggcgccugcaugcuggacgggggcaacaugcucgagaccaucaaggugagcccccagacgauggacgggauccugaaguccauccugaaggugaagaaggcccucggcauguucaucagcgacaccccgggcgagcggaaccccuacgagaacauccuguacaagaucugccuguccggggacggcuggcccuacaucgccagccgcaccuccaucaccgggcgggccugggagaacacggucguggaccucgagagcgacggcaagccccagaaggcgggguccaacaacagcaacaagucccugcagagcgugggcuucaccgccggccugaccuacucccagcucaugacccugaaggacgccaugcugcagcuggacccgaacgccaagacguggauggacaucgaggggcgccccgaggaccccgucgagaucgcccucuaccagcccagcuccggcugcuacauccacuucuuccgggagccgaccgaccugaagcaguucaagcaggacgcgaaguacagccacgggaucgacgugaccgaccuguucgccgcccagcccggccucaccuccgccgugaucgacgcccugccccgcaacauggucaucacgugccaggggagcgacgacauccgcaagcugcucgagagccagggccggaaggacaucaagcugaucgacaucgcgcuguccaagaccgacagccgcaaguacgagaacgccgugugggaccaguacaaggaccucugccacaugcacaccggcgucgugguggagaagaagaagcgcgggggcaaggaggagaucacgccccacugcgcccugauggacugcaucauguucgacgccgcggucuccgggggccugaacaccagcgugcuccgggccgugcugccgcgggacauggucuuccgcaccuccacgccccggguggugcugugaggacuaguaauaaggaaacuguaugaaugucugugggcaggaagugaagagauccuucuguaaagguuuuuggaauuaugucugcugaauaauaaacuuuuuugaaauaauaaaucugguagaaaaaugagaucucaaaggcucuuuucagagccaccaaaaaaaaaaaaaaaaaaaaaaaaaaaaaaaaaaaaaaaaaaaaaaaaaaaaaaaaaaaaaaaaagaauu

SEQ ID NO: 18741 - RNA, 2078 nt, Artificial Sequence
  mRNA product Design b-4 (hSL-A64-N5) comprising derived and/or modified sequence from LASV(G1442-SLE-2011;Clade IV)__AIT17181__SP-HsPLAT_NP(2-569) (opt1)
aggagagucccgcagucggcguccagcggcucugcuuguucgugugugugucguugcaggccuuauucaagcuuaccauggacgccaugaagcgcggccugugcugcgugcuccugcugugcggggccgucuucgugagccccagcgccuccaaggaggugaaguccuuccuguggacccagagccuccgccgggagcugagcggcuacugcuccaacaucaagcugcaggucgugaaggacgcccaggcgcuccugcacgggcuggacuucagcgagguguccaacguccagcgccucaugcggaagcagcgccgggacgacaacgaccugaagcgccugcgggaccucaaccaggccgugaacaaccugguggagcucaagagcacccagcagaaguccguccugcgcgugggcacccugaccagcgacgaccugcucgugcuggccgccgaccuggagaagcucaaguccaaggucauccggaccgagcgcccccugagcgccgggguguacaugggcaaccuguccagccagcagcucgaccagcggcgcgcgcugcugaacaugaucgggauguccggcggcauccaggggacccggacgggccgcgacggggugguccgggugugggacgugaagaacgccgaccuccugaacaaccaguucggcaccaugccgagccugacccucgccugccugaccaagcaggggcaggucgaccugaacgacguggugcaggcccucacggaccugggccugaucuacaccgcgaaguaccccaacgccuccgaccucgaccgccugacccagagccaccccauccugaacaugaucgacaccaagaaguccagccucaacaucagcggcuacaacuucucccugggggccgccgucaaggccggcgcgugcaugcuggacgggggcaacaugcucgagacgaucaaggugagcccccagaccauggacggcauccugaaguccauccugaaggugaagaagacccucgggauguucaucagcgacaccccgggcgagcggaaccccuacgagaacauccuguacaagaucugccuguccggggacggcuggcccuacaucgccagccgcacguccaucaccgggcgggccugggagaacaccgucguggaccucgagagcgacggcaagccccagaaggccggcuccaacaacagcaacaagucccugcagagcgccggguucgcggccggccugaccuacucccagcucaugacgcugaaggacgccaugcugcagcuggacccgaacgccaagaccuggauggacaucgaggggcgccccgaggaccccguggagaucgcccucuaccagcccagcuccggcugcuacauccacuucuuccgggagccgaccgaccugaagcaguucaagcaggacgcgaaguacagccacgggaucgacgucaccgaccuguucgccgcccagcccggccucacguccgccgugaucgaggcccugccccgcaacauggucaucacgugccagggcagcgacgacaucaagaagcugcucgagucccaggggcgcaaggacaucaagcugaucgacaucgcgcugagcaagaccgacagccggaaguacgagaacgccgugugggaccaguacaaggaccucugccacaugcacaccggcguggucguggagaagaagaagcgcgggggcaaggaggagaucaccccgcacugcgcccugauggacugcaucauguucgacgccgcgguguccgggggccugaacacccucguccugcgggccgugcugccccgcgacaugguguuccggaccagcacgccccgcgucgugcucugaggacuaguaauaaggaaacuguaugaaugucugugggcaggaagugaagagauccuucuguaaagguuuuuggaauuaugucugcugaauaauaaacuuuuuugaaauaauaaaucugguagaaaaaugagaucucaaaggcucuuuucagagccaccaaaaaaaaaaaaaaaaaaaaaaaaaaaaaaaaaaaaaaaaaaaaaaaaaaaaaaaaaaaaaaaaagaauu

SEQ ID NO: 18742 - RNA, 2078 nt, Artificial Sequence
  mRNA product Design b-4 (hSL-A64-N5) comprising derived and/or modified sequence from LASV(G3010-SLE-2013;Clade IV)__AIT17345__SP-HsPLAT_NP(2-569) (opt1)
aggagagucccgcagucggcguccagcggcucugcuuguucgugugugugucguugcaggccuuauucaagcuuaccauggacgccaugaagcgcggccugugcugcgugcuccugcugugcggggccgucuucgugagccccagcgccuccaaggagaucaagagcuuccuguggacccagucccuccgccgggagcugagcggcuacugcuccaacaucaagcuccagguggucaaggacgcccaggcgcugcugcacgggcuggacuucagcgagguguccaacgugcagcgccucaugcggaaggagcgccgggacgacaacgaccugaagcgccugcgggaccucaaccaggccgucaacaaccugguggagcucaagagcacccagcagaaguccauccugcgcgugggcacccugaccagcgacgaccugcucauccuggccgccgaccuggagaagcucaaguccaaggucacccggaccgagcgcccccugagcgccgggguguacaugggcaaccuguccagccagcagcucgaccagcggcgcgcgcugcuguccaugaucgggaugagcuccggcgugcagggcgcccgggccgggcgcgacggcgucgugcgggugugggacgucaagaacgccgagcuccugaacaaccaguucgggacgaugccgagccugacccucgcgugccugaccaagcagggccagguggaccugaacgacgugguccaggcccucaccgaccuggggcugaucuacacggccaaguaccccaacaccuccgaccucgaccgccugacccagagccaccccauccugaacaugaucgacaccaagaaguccagccucaacaucagcggcuacaacuucucccugggcgccgccgugaaggcgggggccugcaugcuggacggcgggaacaugcucgagacgaucaaggugagcccccagaccauggacggcauccugaaguccauccugaaggucaagaaggcccucggcauguucaucagcgagaccccgggggagcggaaccccuacgagaacauccuguacaagaucugccuguccggcgacggguggcccuacaucgccagccgcaccuccaucacgggccgggccugggagaacaccgugguggaccucgagagcgacgggaagccccagaaggcgggcuccaacaacagcaacaagucccugcagagcgccggcuucaccgccgggcugaccuacucccagcucaugacgcugaaggacgccaugcugcagcuggacccgaacgccaagaccuggauggacaucgagggccgccccgaggaccccgucgagguggcgcucuaccagcccagcuccgggugcuacauccacuucuuccgggagccgaccgaccugaagcaguucaagcaggacgccaaguacagccacggcaucgacgugaccgaccuguucgccgcccagcccgggcucacguccgccgucaucgacgcgcugccccgcaacauggugaucacgugccagggcagcgacgacaucaagaagcugcucgagagccagggccgcaaggacaucaagcugaucgacaucgcccuguccaagaccgacagccggaaguacgagaacgccgucugggaccaguacaaggaccucugccacaugcacaccggggugguggucgagaagaagaagcgcggcgggaaggaggagaucaccccgcacugcgcccugauggacugcaucauguucgacgcggccguguccggcgggcugaacaccagcgugcuccgggccguccugccccgcgacaugguguuccggaccuccacgccccgcgugguccugugaggacuaguaauaaggaaacuguaugaaugucugugggcaggaagugaagagauccuucuguaaagguuuuuggaauuaugucugcugaauaauaaacuuuuuugaaauaauaaaucugguagaaaaaugagaucucaaaggcucuuuucagagccaccaaaaaaaaaaaaaaaaaaaaaaaaaaaaaaaaaaaaaaaaaaaaaaaaaaaaaaaaaaaaaaaaagaauu

SEQ ID NO: 18743 - RNA, 2078 nt, Artificial Sequence
  mRNA product Design b-4 (hSL-A64-N5) comprising derived and/or modified sequence from LASV(G502-SLE-2009;Clade IV)__AIT17127__SP-HsPLAT_NP(2-569) (opt1)
aggagagucccgcagucggcguccagcggcucugcuuguucgugugugugucguugcaggccuuauucaagcuuaccauggacgccaugaagcgcggccugugcugcgugcuccugcugugcggggccgucuucgugagccccagcgccuccaaggagaucaagagcuuccuguggacccagucccuccgccgggagcugagcggcuacugcuccaacaucaagcuccagguggucaaggacgcccaggcgcugcugcacgggcuggacuucagcgagguguccaacgugcagcgccucaugcggaaggagcgccgggacgacaacgaccugaagcgccugcgggaccucaaccaggccgucaacaaccugguggagcucaagagcacccagcagaaguccauccugcgcgugggcacccugaccagcgacgaccugcucauccuggccgccgaccuggagaagcucaaguccaaggucauccggaccgagcgcccccugagcgccgggguguacaugggcaaccuguccagccagcagcucgaccagcggcgcgcgcugcuguccaugaucgggaugagcggcggcaaccagggggugcgggccggcaaggacggggucgugcgcgugugggacgucaagaacgccgagcuccugaacaaccaguucggcaccaugccgucccugacgcucgccugccugaccaagcagggccagguggaccugaacgacgcggugcaggcccucaccgaccuggggcugaucuacaccgccaaguaccccaacacgagcgaccucgaccggcugacccagucccaccccauccugaacaugaucgacaccaagaaguccagccucaacaucuccggcuacaacuucagccugggggccgccgucaaggcgggcgccugcaugcuggacgggggcaacaugcucgagaccaucaaggugagcccccagacgauggacggcauccucaagagcauccugaaggugaagaaggcccuggggauguucaucuccgacaccccgggcgagcgcaaccccuacgagaacauccuguacaagaucugccugagcggggacggcuggcccuacaucgccucccggaccagcaucaccgggcgcgccugggagaacacggucguggaccucgaguccgacggcaagccccagaaggcgggcagcaacaacuccaacaagagccugcaguccgccggguucaccgccggccugaccuacagccagcucaugacccugaaggacgccaugcugcagcuggacccgaacacgaagaccuggauggacaucgaggggcggcccgaggaccccguggagaucgcccucuaccagcccuccagcggcugcuacauccacuucuuccgcgagccgaccgaccugaagcaguucaagcaggacgcgaaguacucccacgggaucgacgucaccgaccuguucgccgcccagcccggccucacgagcgccgugaucgacgcccugccccggaacauggugaucacgugccagggcuccgacgacauccgcaagcugcucgagagccaggggcgcaaggacaucaagcugaucgacaucgcgcugaacaagaccgacagccggaaguacgagaacgccgucugggaccaguacaaggaccucugccacaugcacaccggcguggucguggagaagaagaagcgcgggggcaaggaggagaucaccccgcacugcgcccugauggacugcaucauguucgacgccgcgguguccgggggccugaacaccagcguccuccgggccgugcugccccgcgacaugguguuccggaccuccacgccccgcgucgugcugugaggacuaguaauaaggaaacuguaugaaugucugugggcaggaagugaagagauccuucuguaaagguuuuuggaauuaugucugcugaauaauaaacuuuuuugaaauaauaaaucugguagaaaaaugagaucucaaaggcucuuuucagagccaccaaaaaaaaaaaaaaaaaaaaaaaaaaaaaaaaaaaaaaaaaaaaaaaaaaaaaaaaaaaaaaaaagaauu

SEQ ID NO: 18744 - RNA, 2078 nt, Artificial Sequence
  mRNA product Design b-4 (hSL-A64-N5) comprising derived and/or modified sequence from LASV(G733-SLE-2010;Clade IV)__AIT17155__SP-HsPLAT_NP(2-569) (opt1)
aggagagucccgcagucggcguccagcggcucugcuuguucgugugugugucguugcaggccuuauucaagcuuaccauggacgccaugaagcgcggccugugcugcgugcuccugcugugcggggccgucuucgugagccccagcgccuccaaggagaucaagagcuuccuguggacccagucccuccgccgggagcugagcggcuacugcuccaacaucaagcuccagguggucaaggacgcccaggcgcugcugcacgggcuggacuucagcgagguguccaacgugcagcgccucaugcggaaggagcgccgggacgacaacgaccugaagcgccugcgggaccucaaccaggccgucaacaaccugguggagcucaagagcacccagcagaaguccgugcugcgcgucggcacccugaccagcgacgagcugcucgugcuggccgccgaccuggagaagcucaaguccaaggugauccggaccgagcgcccccugagcgccggggucuacaugggcaaccuguccagccagcagcucgaccagcggcgcgcgcugcuguccaugaucgggaugagcggcggcaaccagggggcccggaccggccgcgacgggguggugcgggucugggacgugaagaacgccgagcuccugaacaaccaguucggcaccaugccgucccugacccucgccugccugaccaagcagggccagguggaccugaacgacgcgguccaggcccucaccgaccuggggcugaucuacacggccaaguaccccaacaccagcgaccucgaccgccugacccagucccaccccauccugaacaugaucgacaccaagaaguccagccucaacaucuccggcuacaacuucagccugggggccgccgugaaggcgggcgccugcaugcuggacgggggcaacaugcucgagacgaucaaggugagcccccagaccauggacggcauccucaagagcauccugaaggucaagaaggcccuggggauguucaucuccgacaccccgggcgagcggaaccccuacgagaacauccuguacaagaucugccugagcggggacggcuggcccuacaucgccucccgcaccagcaucacggggcgggccugggagaacaccgugguggaccucgaguccgacggcaagccccagaaggcgggcagcaacaacuccaacaagagccugcaguccgccggguucaccgccggccugaccuacagccagcucaugacgcugaaggacgccaugcugcagcuggacccgaacgccaagaccuggauggacaucgaggggcgccccgaggaccccgucgagaucgcgcucuaccagcccuccagcggcugcuacauccacuucuuccgggagccgaccgaccugaagcaguucaagcaggacgccaaguacucccacgggaucgacgugaccgaccuguucgccgcccagcccggccucacgagcgccgugaucgacgcgcugccccgcaacauggucaucacgugccagggcuccgacgacauccgcaagcugcucgagagccaggggcggaaggacaucaagcugaucgacaucgcccugagcaagaucgacucccgcaaguacgagaacgccgugugggaccaguacaaggaccucugccacaugcacaccggcgucgugguggagaagaagaagcgcgggggcaaggaggagaucacgccccacugcgcccugauggacugcaucauguucgacgcggccgucagcgggggccugaacucccucgugcugcgggccgugcugccgcgggacauggucuuccgcaccagcacgccccggguggugcucugaggacuaguaauaaggaaacuguaugaaugucugugggcaggaagugaagagauccuucuguaaagguuuuuggaauuaugucugcugaauaauaaacuuuuuugaaauaauaaaucugguagaaaaaugagaucucaaaggcucuuuucagagccaccaaaaaaaaaaaaaaaaaaaaaaaaaaaaaaaaaaaaaaaaaaaaaaaaaaaaaaaaaaaaaaaaagaauu

SEQ ID NO: 18745 - RNA, 2078 nt, Artificial Sequence
  mRNA product Design b-4 (hSL-A64-N5) comprising derived and/or modified sequence from MOPV/LASV reassortant(IGS-1;Clade IV)__AFY05578__SP-HsPLAT_NP(2-569) (opt1)
aggagagucccgcagucggcguccagcggcucugcuuguucgugugugugucguugcaggccuuauucaagcuuaccauggacgccaugaagcgcggccugugcugcgugcuccugcugugcggggccgucuucgugagccccagcgccuccaaggagaucaagagcuuccuguggacccagucccuccgccgggagcugagcggcuacugcuccaacaucaagcuccagguggucaaggacgcccaggcgcugcugcacgggcuggacuucagcgagguguccaacgugcagcgccucaugcggaaggagcgccgggacgacaacgaccugaagcgccugcgggaccucaaccaggccgucaacaaccugguggagcucaagagcacccagcagaaguccauccugcgcgugggcacccugaccagcgacgaccugcucauccuggccgccgaccuggagaagcuccgguccaaggucauccgcaccgagcggccccugagcgccgggguguacaugggcaaccuguccagccagcagcucgaccagcgccgggcgcugcugaacaugaucgggauguccggcggcaaccagggggcccgcgccggccgggacggggugguccgcgugugggacgugaagaacgccgagcuccugagcaaccaguucggcaccaugccgucccugacgcucgcgugccugaccaagcaggggcaggucgaccugaacgacgccgugcaggcccucaccgaccugggccugaucuacaccgccaaguaccccaacacgagcgaccucgaccggcugacccagucccaccccauccugaacaugaucgacaccaagaaguccagccucaacaucuccggcuacaacuucagccugggggccgcggugaaggccggcgccugcaugcuggacgggggcaacaugcucgagaccaucaaggucagcccccagacgauggacggcauccucaagagcauccugaaggugaagaaggcccuggggauguucaucuccgacaccccgggcgagcgcaaccccuacgagaacauccuguacaagaucugccugagcggggacggcuggcccuacaucgccucccggaccagcaucaccgggcgcgcgugggagaacacgguggucgaccucgaguccgacggcaagccccagaaggccgacagcaacaacuccagcaagucccugcagagcgccggcuucaccgccgggcugaccuacucccagcucaugacccugaaggacgccaugcugcagcuggacccgaacgcgaagacguggauggacaucgagggccggcccgaggaccccguggagaucgcccucuaccagcccagcuccgggugcuacauccacuucuuccgcgagccgaccgaccugaagcaguucaagcaggacgccaaguacagccacggcaucgacgugaccgaccuguucgccacccagcccgggcucacguccgccgucaucgacgcgcugccccgcaacauggugaucacgugccagggcagcgacgacauccggaagcugcucgagagccagggccgcaaggacaucaagcugaucgacaucgaccuguccaagaccgacagccggaaguacgagaacgccgugugggaccaguacaaggaccucugccacaugcacaccggggucguggucgagaagaagaagcgcggcgggaaggaggagaucaccccgcacugcgcccugauggacugcaucauguucgacgccgcgguguccggcgggcugaacaccagcgugcuccgggccguccugccccgcgacaugguguuccggaccuccacgccccgcgugguccugugaggacuaguaauaaggaaacuguaugaaugucugugggcaggaagugaagagauccuucuguaaagguuuuuggaauuaugucugcugaauaauaaacuuuuuugaaauaauaaaucugguagaaaaaugagaucucaaaggcucuuuucagagccaccaaaaaaaaaaaaaaaaaaaaaaaaaaaaaaaaaaaaaaaaaaaaaaaaaaaaaaaaaaaaaaaaagaauu

SEQ ID NO: 18746 - RNA, 2078 nt, Artificial Sequence
  mRNA product Design b-4 (hSL-A64-N5) comprising derived and/or modified sequence from LASV(LM765-SLE-2012;Clade IV)__AIT17815__SP-HsPLAT_NP(2-569) (opt1)
aggagagucccgcagucggcguccagcggcucugcuuguucgugugugugucguugcaggccuuauucaagcuuaccauggacgccaugaagcgcggccugugcugcgugcuccugcugugcggggccgucuucgugagccccagcgccuccaaggagaucaagagcuuccuguggacccagucccuccgccgggagcugagcggcuacugcuccaacaucaagcuccagguggucaaggacgcccaggcgcugcugcacgggcuggacuucagcgagguguccaacgugcagcgccucaugcggaaggagcgccgggacgacaacgaccugaagcgccugcgggaccucaaccaggccgucaacaaccugguggagcucaagagcacccagcagaaguccauccugcgcgugggcacccugaccagcgacgaccugcucauccuggccgccgaccuggagaagcucaaguccaaggucacccggaccgagcgcccccugagcgccgggguguacaugggcaaccuguccagccagcagcucgaccagcggcgcgcgcugcuggacaugaucgggauguccggcagcaaccagggcgcccgggccgggcgcgacggcgugguccgggugugggacgugaagaacgccgagcuccugaacaaccaguucgggacgaugccgucccugacccucgcgugccugaccaagcagggccaggucgaccugaacgacgccgugcaggcccucaccgaccuggggcugaucuacacggccaaguaccccaacaccagcgaccucgaccgccugacccagucccaccccauccugaacaugaucgacaccaagaaguccagccucaacaucuccggcuacaacuucagccugggcgccgcggugaaggccggggccugcaugcuggacggcgggaacaugcucgagacgaucaaggucagcccccagaccauggacggcauccucaagagcauccugaaggugaagaaggcccugggcauguucaucuccgacgccccgggggagcggaaccccuacgagaacauccuguacaagaucugccugagcggcgacggguggcccuacaucgcgucccgcaccagcaucaccggccgggccugggagaacacgguggucgaccucgaguccgacgggaagccccagaaggccggcagcaacggcuccaacaagagccugcaguccgccggguucaccgccggccugaccuacagccagcucaugacccugaaggacgcgaugcugcagcuggacccgaacgccaagacguggauggacaucgaggggcgccccgaggaccccguggagaucgcccucuaccagcccuccagcggcugcuacauccacuucuuccgggagccgaccgaccugaagcaguucaagcaggacgccaaguacucccacgggaucgacgugaccgaccuguucgccgcgcagcccggccucaccagcgccgucaucgacgcccugccccgcaacauggugaucacgugccagggcuccgacgacauccgcaagcuguucgagagccaggggcggaaggacaucaagcucaucgacaucgcccugagcaagaccgacucccgcaaguacgagaacgcggugugggaccaguacaaggaccugugccacaugcacaccggcaucgucguggagaagaagaagcgcgggggcaaggaggagaucacgccccacugcgcccucauggacugcaucauguucgacgccgccgucagcgggggccugaacaccuccgugcugcgggccgugcucccgcgggacauggucuuccgcaccagcacgccccggguggugcugugaggacuaguaauaaggaaacuguaugaaugucugugggcaggaagugaagagauccuucuguaaagguuuuuggaauuaugucugcugaauaauaaacuuuuuugaaauaauaaaucugguagaaaaaugagaucucaaaggcucuuuucagagccaccaaaaaaaaaaaaaaaaaaaaaaaaaaaaaaaaaaaaaaaaaaaaaaaaaaaaaaaaaaaaaaaaagaauu

SEQ ID NO: 18747 - RNA, 2078 nt, Artificial Sequence
  mRNA product Design b-4 (hSL-A64-N5) comprising derived and/or modified sequence from LASV(LM776-SLE-2012;Clade IV)__AIT17825__SP-HsPLAT_NP(2-569) (opt1)
aggagagucccgcagucggcguccagcggcucugcuuguucgugugugugucguugcaggccuuauucaagcuuaccauggacgccaugaagcgcggccugugcugcgugcuccugcugugcggggccgucuucgugagccccagcgccuccaaggagaucaagagcuuccuguggacccagucccuccgccgggagcugagcuccuacugcagcaacaucaagcuccagguggucaaggacgcccaggcgcugcugcacggccuggacuucuccgaggugagcaacgugcagcgccucaugcggaaggagcgccgggacgacaacgaccugaagcgccugcgggaccucaaccaggccgucaacaaccugguggagcugaaguccacccagcagaaguccauccuccgcguggggacccugaccuccgacgaccugcucauccuggccgccgaccuggagaagcucaagagcaaggucacccggaccgagcgcccccuguccgccggcguguacauggggaaccugagcucccagcagcucgaccagcggcgcgcgcugcugagcaugaucggcauguccgggagcaaccagggcgcccgggccggccgcgacggggugguccgggugugggacgugaagaacgccgagcuccugaacaaccaguucggcacgaugccgucccugacccucgcgugccugaccaagcaggggcaggucgaccugaacgacgccgugcaggcccucaccgaccugggccugaucuacacggccaaguaccccaacaccagcgaccucgaccgccugacccagagccaccccauccugaacaugaucgacaccaagaaguccagccucaacaucuccggguacaacuucagccugggcgccgcggugaaggccggcgccugcaugcuggacgggggcaacaugcucgagacgaucaaggucagcccccagaccauggacgggauccucaagagcauccugaaggugaagaaggcccugggcauguucaucuccgacaccccgggcgagcggaaccccuacgagaacauccuguacaagaucugccugagcggggacggcuggcccuacaucgccucccgcaccagcaucacggggcgggcgugggagaacaccguggucgaccucgaguccgacggcaagccccagaaggccgggagcaacaacuccaacaagagccugcaguccgccggcuucaccgccggccugaccuacagccagcucaugacgcugaaggacgccaugcugcagcuggacccgaacgcgaagaccuggauggacaucgaggggcgccccgaggaccccguggagguggcccucuaccagcccuccagcggcugcuacauccacuucuuccgggagccgaccgaccugaagcaguucaagcaggacgccaaguacucccacgggaucgacgucaccgaccuguucgccgcccagcccggccucacgagcgcggugaucgacgcccugccccgcaacauggugaucacgugccaggggagcgacgacauccgcaagcugcucgagucccagggccggaaggacaucaagcugaucgacaucgcccugagcaagaccgacucccgcaaguacgagaacgccgucugggaccaguacaaggaccucugccacaugcacaccggcguggucguggagaagaagaagcgcgggggcaaggaggagaucaccccgcacugcgcgcugauggacugcaucauguucgacgccgccgugagcgggggccugaacaccuccguccuccgggccgugcugccccgggacaugguguuccgcaccagcacgccccgggucgugcugugaggacuaguaauaaggaaacuguaugaaugucugugggcaggaagugaagagauccuucuguaaagguuuuuggaauuaugucugcugaauaauaaacuuuuuugaaauaauaaaucugguagaaaaaugagaucucaaaggcucuuuucagagccaccaaaaaaaaaaaaaaaaaaaaaaaaaaaaaaaaaaaaaaaaaaaaaaaaaaaaaaaaaaaaaaaaagaauu

SEQ ID NO: 18748 - RNA, 2078 nt, Artificial Sequence
  mRNA product Design b-4 (hSL-A64-N5) comprising derived and/or modified sequence from LASV(Mad39;Clade IV)__ANH09723__SP-HsPLAT_NP(2-569) (opt1)
aggagagucccgcagucggcguccagcggcucugcuuguucgugugugugucguugcaggccuuauucaagcuuaccauggacgccaugaagcgcggccugugcugcgugcuccugcugugcggggccgucuucgugagccccagcgccuccaaggagaucaagagcuuccuguggacccagucccuccgccgggagcugagcggcuacugcuccaacaucaagcuccagguggucaaggacgcccaggcgcugcugcacgggcuggacuucagcgagguguccaacgugcagcgccucaugcggaagcagcgccgggacgacaacgaccugaagcgccugcgggaccucaaccaggccgucaacaaccugguggagcugaaguccacccagcagaaguccgugcuccgcgucggcacgcugaccagcgacgaccugcucacccuggccgccgaccuggagaagcucaaguccaaggugacccggacggagcgcccccugaccgccgggguguacaugggcaaccugagcucccagcagcucgaccagcggcgcgcgcugcugaacaugaucgggaugagcggcggcaaccagggggcccggaccggccgcgacggggucgugcgggugugggacgucaagaacgccgagcuccugaacaaccaguucggcaccaugccgucccugacgcucgccugccugaccaagcagggccagguggaccugaacgacgugguccaggcgcucaccgaccuggggcugaucuacaccgccaaguaccccaacacgagcgaccucgaccgccugacccagucccaccccauccugaacaugaucgacaccaacaagagcucccucaacaucagcggcuacaacuucagccugggggccgccgugaaggccggcgcgugcaugcuggacgggggcaacaugcucgagaccaucaaggugagcccccagacgauggacggcauccucaagagcauccugaaggucaagaagucccuggggauguucaucagcgacaccccgggcgagcggaaccccuacgagaacauccuguacaagaucugccuguccggggacggcuggcccuacaucgccagccgcaccuccaucaccgggcgggccugggagaacacggugguggaccucgagagcggcggcaagccccagaaggccggguccaacaacagcaacaagucccugcagagcgccggcuucgcggccgggcugaccuacucccagcucaugacccugaaggacgccaugcugcagcuggacccgaacgccaagaccuggauggacaucgagggccgccccgaggaccccgucgagaucgcccucuaccagcccaucagcgggugcuacauccacuucuuccgggagccgacggaccugaagcaguucaagcaggacgcgaaguacucccacggcaucgacgugaccgaccuguucgccgcccagcccggccucaccagcgccgugaucgaggcccugccccgcaacauggucaucacgugccagggguccgacgacauccgcaagcuguucgagagccagggccggaaggacaucaagcucaucgacaucgcgcuguccaagaccgacagccgcaaguacgagaacgccgugugggaccaguacaaggaccugugccacaugcacaccggggucgugguggagaagaagaagaagggcgggaaggaggagaucacgccccacugcgcccucauggacugcaucauguucgacgccgcggucagcggcggccugaacacccuggugcuccgggccgugcugccgcgcgacauggucuuccggaccuccacccccaagguggugcugugaggacuaguaauaaggaaacuguaugaaugucugugggcaggaagugaagagauccuucuguaaagguuuuuggaauuaugucugcugaauaauaaacuuuuuugaaauaauaaaucugguagaaaaaugagaucucaaaggcucuuuucagagccaccaaaaaaaaaaaaaaaaaaaaaaaaaaaaaaaaaaaaaaaaaaaaaaaaaaaaaaaaaaaaaaaaagaauu

SEQ ID NO: 18749 - RNA, 2078 nt, Artificial Sequence
  mRNA product Design b-4 (hSL-A64-N5) comprising derived and/or modified sequence from LASV(Z0947-SLE-2011;Clade IV)__AIT17841__SP-HsPLAT_NP(2-569) (opt1)
aggagagucccgcagucggcguccagcggcucugcuuguucgugugugugucguugcaggccuuauucaagcuuaccauggacgccaugaagcgcggccugugcugcgugcuccugcugugcggggccgucuucgugagccccagcgccuccaaggagaucaagagcuuccuguggacccagucccuccgccgggagcugagcggcuacugcuccaacaucaagcuccagguggucaaggacgcccaggcgcugcugcacgggcuggacuucagcgagguguccaacgugcagcgccucaugcggaaggagcgccgggacgacaacgaccugaagcgccugcgggaccucaaccaggccgucaacaaccugguggagcucaagagcacccagcagaaguccauccugcgcgugggcacccugaccagcgacgaccugcucauccuggccgccgaccuggagaagcucaaguccaaggucacccggaccgagcgcccccugagcgccgggguguacaugggcaaccuguccagccagcagcucgaccagcggcgcgcgcugcugaacaugaucgggauguccggcagcaaccagggcgcccggacggggcgcgacggcgugguccgggugugggacgugaagaacgccgagcuccugaacaaccaguucgggaccaugccgucccugacccucgccugccugaccaagcagggccaggucgaccugaacgacgcggugcaggcccucacggaccuggggcugaucuacaccgccaaguaccccaacaccagcgaccucgaccgccugacccagucccaccccauccugaacaugaucgacacgaagaaguccagccucaacaucuccggcuacaacuucagccugggcgccgccgugaaggcgggggccugcaugcuggacggcgggaacaugcucgagaccaucaaggucagcccccagaccauggacggcauccucaagagcauccugaaggugaagaaggcccugggcauguucaucuccgacgccccgggggagcggaaccccuacgagaacauccuguacaagaucugccugagcggcgacggguggcccuacaucgccucccgcaccagcaucacgggccgggcgugggagaacaccguggucgaccucgaguccgacgggaagccccagaaggccggcagcaacggcuccaacaagagccugcaguccgccggguucaccgccggccugaccuacagccagcucaugacgcugaaggacgccaugcugcagcuggacccgaacgcgaagaccuggauggacaucgaggggcgccccgaggaccccguggagaucgcccucuaccagcccuccagcggcugcuacauccacuucuuccgggagccgaccgaccugaagcaguucaagcaggacgccaaguacucccacgggaucgacgugaccgaccuguucgccgcccagcccggccucacgagcgcggucaucgacgcccugccccgcaacauggugaucacgugccagggcuccgacgacauccgcaagcuguucgagagccaggggcggaaggacaucaagcucaucgacaucgcccugagcaagaccgacucccgcaaguacgagaacgccgugugggaccaguacaaggaccugugccacaugcacaccggcaucgucguggagaagaagaagcgcgggggcaaggaggagaucaccccgcacugcgcgcucauggacugcaucauguucgacgccgccgucagcgggggccugaacaccuccgugcugcgggccgugcucccccgggacauggucuuccgcaccagcacgccccggguggugcugugaggacuaguaauaaggaaacuguaugaaugucugugggcaggaagugaagagauccuucuguaaagguuuuuggaauuaugucugcugaauaauaaacuuuuuugaaauaauaaaucugguagaaaaaugagaucucaaaggcucuuuucagagccaccaaaaaaaaaaaaaaaaaaaaaaaaaaaaaaaaaaaaaaaaaaaaaaaaaaaaaaaaaaaaaaaaagaauu

SEQ ID NO: 18750 - RNA, 2078 nt, Artificial Sequence
  mRNA product Design b-4 (hSL-A64-N5) comprising derived and/or modified sequence from LASV(Josiah;Clade IV)__NP_694869__SP-HsPLAT_NP(2-569) (opt4)
aggagagucccgcagucggcguccagcggcucugcuuguucgugugugugucguugcaggccuuauucaagcuuaccauggacgccaugaagagaggccugugcugcgugcugcugcugugcggcgccguguucgugagccccagcgccagcaaggagaucaagagcuuccuguggacccagagccugagaagagagcugagcggcuacugcagcaacaucaagcugcagguggugaaggacgcccaggcccugcugcacggccuggacuucagcgaggugagcaacgugcagagacugaugagaaaggagagaagagacgacaacgaccugaagagacugagagaccugaaccaggccgugaacaaccugguggagcugaagagcacccagcagaagagcauccugagagugggcacccugaccagcgacgaccugcugauccuggccgccgaccuggagaagcugaagagcaaggugaucagaaccgagagaccccugagcgccggcguguacaugggcaaccugagcagccagcagcuggaccagagaagagcccugcugaacaugaucggcaugagcggcggcaaccagggcgccagagccggcagagacggcguggugagagugugggacgugaagaacgccgagcugcugaacaaccaguucggcaccaugcccagccugacccuggccugccugaccaagcagggccagguggaccugaacgacgccgugcaggcccugaccgaccugggccugaucuacaccgccaaguaccccaacaccagcgaccuggacagacugacccagagccaccccauccugaacaugaucgacaccaagaagagcagccugaacaucagcggcuacaacuucagccugggcgccgccgugaaggccggcgccugcaugcuggacggcggcaacaugcuggagaccaucaaggugagcccccagaccauggacggcauccugaagagcauccugaaggugaagaaggcccugggcauguucaucagcgacacccccggcgagagaaaccccuacgagaacauccuguacaagaucugccugagcggcgacggcuggcccuacaucgccagcagaaccagcaucaccggcagagccugggagaacaccgugguggaccuggagagcgacggcaagccccagaaggccgacagcaacaacagcagcaagagccugcagagcgccggcuucaccgccggccugaccuacagccagcugaugacccugaaggacgccaugcugcagcuggaccccaacgccaagaccuggauggacaucgagggcagacccgaggaccccguggagaucgcccuguaccagcccagcagcggcugcuacauccacuucuucagagagcccaccgaccugaagcaguucaagcaggacgccaaguacagccacggcaucgacgugaccgaccuguucgccacccagcccggccugaccagcgccgugaucgacgcccugcccagaaacauggugaucaccugccagggcagcgacgacaucagaaagcugcuggagagccagggcagaaaggacaucaagcugaucgacaucgcccugagcaagaccgacagcagaaaguacgagaacgccgugugggaccaguacaaggaccugugccacaugcacaccggcguggugguggagaagaagaagagaggcggcaaggaggagaucaccccccacugcgcccugauggacugcaucauguucgacgccgccgugagcggcggccugaacaccagcgugcugagagccgugcugcccagagacaugguguucagaaccagcacccccagaguggugcugugaggacuaguaauaaggaaacuguaugaaugucugugggcaggaagugaagagauccuucuguaaagguuuuuggaauuaugucugcugaauaauaaacuuuuuugaaauaauaaaucugguagaaaaaugagaucucaaaggcucuuuucagagccaccaaaaaaaaaaaaaaaaaaaaaaaaaaaaaaaaaaaaaaaaaaaaaaaaaaaaaaaaaaaaaaaaagaauu

SEQ ID NO: 18751 - RNA, 2078 nt, Artificial Sequence
  mRNA product Design b-4 (hSL-A64-N5) comprising derived and/or modified sequence from LASV(LP;Clade I)__AAF86702__SP-HsPLAT_NP(2-569) (opt4)
aggagagucccgcagucggcguccagcggcucugcuuguucgugugugugucguugcaggccuuauucaagcuuaccauggacgccaugaagagaggccugugcugcgugcugcugcugugcggcgccguguucgugagccccagcaacagcaaggagaucaagagcuuccuguggacccagagccugagaagagagcugagcggcuacugcagcaacaucaagcugcagguggugaaggacgcccaggcccugcugcacggccuggacuucagcgaggugagcaacgugcagagacugaugagaaagcagaagagagacgacgccgaccugaagagacugagagaccugaaccaggccgugaacaaccugguggagcugaagagcacccagcagaagaacgugcugagagugggcacccugagcagcgacgaccugaucacccuggccgccgaccuggagaagcugaagagcaaggugaucagaaccgagagaccccugagcagcggcguguacaugggcaaccugagcagccagcagcuggaccagagaagagcccugcugagcaugaucggcaugagcggcggcccccagggcaacagaaccggcggcgacggcguggugagagugugggacgugaagaacgccgagcugcugaacaaccaguucggcaccaugcccagccugacccuggccugccugaccaagcagggccagguggaccugaacgacgccgugcaggcccugaccgaccugggccugaucuacaccgccaaguaccccaacagcagcgaccuggacaugcugacccagagccaccccauccugggcaugguggacaccaagaagagcagccugaacaucagcggcuacaacuucagccugggcgccgccgugaaggccggcgccugcaugcuggacggcggcaacaugcuggagaccaucaaggugagcccccagaccauggacggcauccugaagagcauccugaaggugaagagaagccugggcauguucaucagcgacacccccggcgagagaaaccccuacgagaacauccuguacaagaucugccugagcggcgagggcuggcccuacaucgccagcagaaccagcaucaccggcagagccugggagaacacccugguggaccuggagagcgacaacaagccccccaagcugaacagcgccggcagcaacaagagccugcaggccgccggccugaacgccggccugaccuacagccagcugaugacccugaaggacugcaugcugcagcuggaccccagcagcaagaccuggaucgacaucgagggcagacccgaggaccccguggagaucgcccuguuccagcccagcagcggcugcuacauccacuucuucagagagcccaccgaccugaagcaguucaagcaggacgccaaguacagccacggcaucgacgugaccgaccuguucagcacccagcccggccugaccagcgccgugaucgaggcccugcccagaaacauggugcugaccugccagggcagcgacgacaucaagaagcugcuggagagccagggcagaagagacaucaagcugaucgacaucagccugagcaaggccgacagcagaaaguucgagaacgccgugugggaccaguacaaggaccugugccacaugcacaccggcguggugguggagaagaagaagagaggcggcaaggaggagaucaccccccacugcgcccugcuggacugcaucauguucgacgccgccaccaccggcagccugaacaucaccacccugagagccgugcugcccagagacaugguguucagaaccagcacccccaagguggugcugugaggacuaguaauaaggaaacuguaugaaugucugugggcaggaagugaagagauccuucuguaaagguuuuuggaauuaugucugcugaauaauaaacuuuuuugaaauaauaaaucugguagaaaaaugagaucucaaaggcucuuuucagagccaccaaaaaaaaaaaaaaaaaaaaaaaaaaaaaaaaaaaaaaaaaaaaaaaaaaaaaaaaaaaaaaaaagaauu

SEQ ID NO: 18752 - RNA, 2078 nt, Artificial Sequence
  mRNA product Design b-4 (hSL-A64-N5) comprising derived and/or modified sequence from LASV(803213;Clade II)__AAF86704__SP-HsPLAT_NP(2-569) (opt4)
aggagagucccgcagucggcguccagcggcucugcuuguucgugugugugucguugcaggccuuauucaagcuuaccauggacgccaugaagagaggccugugcugcgugcugcugcugugcggcgccguguucgugagccccagcgccagcaaggaggugaagagcuuccuguggacccagagccugagaagagagcugagcggcuacugcagcaacaucaagcugcagguggugaaggacgcccaggcccugcugcacggccuggacuucagcgaggugaacaacgugcagagacugaugagaaagcagaagagagacgacggcgaccugaagagacugagagaccugaaccaggccgugaacaaccugguggagcugaagagcacccagcagaagagcauccugagagugggcacccugaccagcgacgaccugcugacccuggccgccgaccuggagaagcugaagagcaaggugaucagaaccgagagaccccugagcagcggcguguacaugggcaaccugagcacccagcagcuggagcagagaagagcccugcugaacaugaucggcauggugggcggcgcccagggcacccagcccggcagagacggcguggugagagugugggacgugaagaaccccgaccugcugaacaaccaguucggcaccaugcccagccugacccuggccugccugaccaagcagggccagguggaccugaacgacgccgugcuggcccugaccgaccugggccugaucuacaccgccaaguaccccaacagcagcgaccuggacagacugagccagagccaccccauccugaacaugguggacaccaagaagagcagccugaacaucagcggcuacaacuucagccugggcgccgccgugaaggccggcgccugcaugcuggacggcggcaacaugcuggagaccaucaaggugaccccccagaccauggacggcauccugaagagcauccugaaggugaagagaagccugggcauguucgugagcgacacccccggcgagagaaaccccuacgagaacauccuguacaagaucugccugagcggcgacggcuggcccuacaucgccagcagaaccagcaucgugggcagagccugggagaacaccaccguggaccuggagagcgacggcaagccccagaaggugggcaccgccggcagcaacaagagccugcagagcgccggcuuccccaccggccugaccuacagccagcugaugacccugaaggacagcaugaugcagcuggaccccagcgccaagaccuggaucgacaucgagggcagacccgaggaccccguggagaucgcccuguaccagcccaugagcggcugcuacauccacuucuucagagagcccaccgaccugaagcaguucaagcaggacgccaaguacagccacggcaucgacguggccgaccuguuccccgcccagcccggccugaccagcgccgugaucgaggcccugcccagaaacauggugcugaccugccagggcagcgacgacaucaagaagcugcuggacagccagggcagaagagacaucaagcugaucgacaucagccugagcaagguggacagcagaaaguucgagaacgccgugugggaccagugcaaggaccugugccacaugcacaccggcguggugguggagaagaagaagagaggcggcaaggaggagaucaccccccacugcgcccugauggacugcaucauguucgacgccgccgugagcggcggccugaacauccccgugcugagagccgugcugcccagagacaugguguucagaaccagcagccccaagguggugcugugaggacuaguaauaaggaaacuguaugaaugucugugggcaggaagugaagagauccuucuguaaagguuuuuggaauuaugucugcugaauaauaaacuuuuuugaaauaauaaaucugguagaaaaaugagaucucaaaggcucuuuucagagccaccaaaaaaaaaaaaaaaaaaaaaaaaaaaaaaaaaaaaaaaaaaaaaaaaaaaaaaaaaaaaaaaaagaauu

SEQ ID NO: 18753 - RNA, 2081 nt, Artificial Sequence
  mRNA product Design b-4 (hSL-A64-N5) comprising derived and/or modified sequence from LASV(GA391;Clade III)__CAA36646__SP-HsPLAT_NP(2-570) (opt4)
aggagagucccgcagucggcguccagcggcucugcuuguucgugugugugucguugcaggccuuauucaagcuuaccauggacgccaugaagagaggccugugcugcgugcugcugcugugcggcgccguguucgugagccccagcgccagcaaggaggugagaagcuuccuguggacccagagccugagaagagagcugagcggcuacugcagcaacaucaagcugcagguggugaaggacgcccaggcccugcugcacggccuggacuucagcgaggugagcaacgugcagagacugaugagaaagcagaagagagacgacggcgaccugaagagacugagagaccugaaccaggccgugaacaaccugguggagcugaagagcacccagcagaagagcgugcugagagugggcacccugagcagcgacgaccugcugauccuggccgccgaccuggagaagcugaagagcaaggugaccagaaccgagagaccccugagcagcggcguguacaugggcaaccugagcagccagcagcuggaccagagaagagcccugcugaacaugaucggcaugaccggcgugagcggcggcggcaagggcgccagcgacggcaucgugagagugugggacgugaagaacgccgagcugcugaacaaccaguucggcaccaugcccagccugacccuggccugccugaccaagcagggccagguggaccugaacgacgccgugcaggcccugaccgaccugggccugaucuacaccgccaaguaccccaacagcagcgaccuggacagacugagccagagccaccccauccugaacaugaucgacaccaagaagagcagccugaacaucagcggcuacaacuucagccugggcgccgccgugaaggccggcgccugcaugcuggacggcggcaacaugcuggagaccaucaaggugagcccccagaccauggacggcauccugaagagcauccugaaggugaagaagagccugggcauguucgugagcgacacccccggcgagagaaaccccuacgagaacauccuguacaagaucugccugagcggcgacggcuggcccuacaucgccagcagaaccagcaucgugggcagagccugggagaacaccgugguggaccuggagcaggacaacaagccccagaagaucggcaacggcggcagcaacaagagccugcagagcgccggcuucgccgccggccugaccuacagccagcugaugacccugaaggacuucaagugcuucaaccugauccccaacgccaagaccuggauggacaucgagggcagacccgaggaccccguggagaucgcccuguaccagcccagcagcggcugcuacgugcacuucuucagagagcccaccgaccugaagcaguucaagcaggacgccaaguacagccacggcaucgacgugaccgaccuguucgccgcccagcccggccugaccagcgccgugaucgaggcccugcccagaaacauggugaucaccugccagggcagcgaggacaucagaaagcugcuggagagccagggcagaagagacaucaagcugaucgacaucacccugagcaaggccgacagcagaaaguucgagaacgccgugugggaccaguucaaggaccugugccacaugcacaccggcguggugguggagaagaagaagagaggcggcaaggaggagaucaccccccacugcgcccugauggacugcaucauguucgacgccgccgugagcggcggccuggacgccaaggugcugagaguggugcugcccagagacaugguguucagaaccagcacccccaagguggugcugugaggacuaguaauaaggaaacuguaugaaugucugugggcaggaagugaagagauccuucuguaaagguuuuuggaauuaugucugcugaauaauaaacuuuuuugaaauaauaaaucugguagaaaaaugagaucucaaaggcucuuuucagagccaccaaaaaaaaaaaaaaaaaaaaaaaaaaaaaaaaaaaaaaaaaaaaaaaaaaaaaaaaaaaaaaaaagaauu

SEQ ID NO: 18754 - RNA, 2078 nt, Artificial Sequence
  mRNA product Design b-4 (hSL-A64-N5) comprising derived and/or modified sequence from LASV(AV;Clade V)__CCA30315__SP-HsPLAT_NP(2-569) (opt4)
aggagagucccgcagucggcguccagcggcucugcuuguucgugugugugucguugcaggccuuauucaagcuuaccauggacgccaugaagagaggccugugcugcgugcugcugcugugcggcgccguguucgugagccccagcgccagcaaggaggugaagagcuuccuguggacccagagccugagaagagagcugagcggcuacugcagcaacaucaagcugcagguggugaaggacgcccaggcccugcugcacggccuggacuucagcgaggugagcaacgugcagagacugaugagaaagcagagaagagacgacagcgaccugaagagacugagagaccugaaccaggccgugaacaaccugguggagcugaagagcacccagcagaagagcgugcugagagugggcacccugagcagcgacgaccugcugacccuggccgccgaccuggagaagcugaagagcaaggugaccagaaccgagagaccccugagcagcggcguguacaugggcaaccugagcagccagcagcuggaccagagaagagcccugcugaaccugaucggcaugaccaacggcagccagggcagccaggccggcagagacggcguggugagagugugggacgugaagaacgccgagcugcugaacaaccaguucggcaccaugcccagccugacccuggccugccugaccaagcagggccagguggaccugaacgacguggugcaggcccugaccgaccugggccugaucuacaccgccaaguaccccaacaccagcgaccuggacagacugacccagagccaccccauccugaacaugaucgacaccaagaagagcagccugaacaucagcggcuacaacuucagccugggcgccgccgugaaggccggcgccugcaugcuggacggcggcaacaugcuggagaccaucaaggugagcccccagagcauggacggcauccugaagagcauccugaaggugaagagagcccugggcauguucgugagcgacacccccggcgagagaaaccccuacgagaacauccuguacaagaucugccugagcggcgacggcuggcccuacaucgccagcagaaccagcaucgugggcagagccugggagaacaccgugguggaccuggagaccgacggcaagccccagaagaucggcagcggcaacagcaacaagagccugcagagcgccggcuucagcgccggccugaccuacagccagcugaugacccugaaggacgccaugcugcagcuggaccccaacgccaagaccuggauggacaucgagggcagacccgaggaccccguggagguggcccuguaccagcccaucagcggcugcuacauccacuucuucagagagcccaccgaccugaagcaguucaagcaggacgccaaguacagccacggcaucgacaucgccgaccuguucgccgcccagcccggccugaccagcgccgugaucgaggcccugcccagaaacauggugaucaccugccagggcagcgaggacaucaagaagcugcuggagagccagggcagaaaggacaucaagcugaucgacaucgcccugagcaagaucgacagcagaaaguucgagaacgccgugugggaccaguacaaggaccugugccacaugcacaccggcguggugguggagaagaagaagagaggcggcaaggaggagaucaccccccacugcgcccugauggacugcaucauguucgacgccgccgugagcggcggccugaacacccuggugcugagagccgugcugcccagagacaugguguucagaaccagcacccccagaguggugcugugaggacuaguaauaaggaaacuguaugaaugucugugggcaggaagugaagagauccuucuguaaagguuuuuggaauuaugucugcugaauaauaaacuuuuuugaaauaauaaaucugguagaaaaaugagaucucaaaggcucuuuucagagccaccaaaaaaaaaaaaaaaaaaaaaaaaaaaaaaaaaaaaaaaaaaaaaaaaaaaaaaaaaaaaaaaaagaauu

SEQ ID NO: 18755 - RNA, 2078 nt, Artificial Sequence
  mRNA product Design b-4 (hSL-A64-N5) comprising derived and/or modified sequence from LASV(Togo/2016/7082;Clade VI)__AMR44578__SP-HsPLAT_NP(2-569) (opt4)
aggagagucccgcagucggcguccagcggcucugcuuguucgugugugugucguugcaggccuuauucaagcuuaccauggacgccaugaagagaggccugugcugcgugcugcugcugugcggcgccguguucgugagccccagcaacagcaaggaggugaagagcuuccuguggacccagagccugagaagagagcugagcggcuacugcagcaacaucaagcugcagguggugaaggacgcccaggcccugcugcacggccuggacuucagcgaggugagcaacgugcagagacugaugagaaagcagaagagagacgacggcgaccugaagagacugagagaccugaaccaggccgugaacaaccugguggagcugaagagcgugcagcagaagagcauccugagagugggcacccugaccagcgacgaccugcugacccuggccgccgaccuggagaagcugaagagcaaggugaccagaaccgagagaccccugagcagcggcguguacaugggcaaccugagcagccagcagcuggaccagagaagagcccugcugagcaugaucggcaugagcggcggcaaccagaacagccagcccaagggcgacggcguggugagagugugggacgugaagaacgccgaccugcugaacaaccaguucggcaccaugcccagccugacccuggccugccugaccaagcagggccagguggaccugaacgacgccgugcaggcccugaccgaccugggccugaucuacaccgccaaguaccccaacagcagcgaccuggacagacugagccagagccaccccauccugaacaugaucgacaccaagaagagcagccugaacaucagcggcuacaacuucagccugggcgccgccaucaagaccggcgccugcaugcuggacggcggcaacaugcuggagaccaucaaggugaccccccagaccauggacggcauccugaagagcauccugaaggugaagagaagccugggcauguucaucagcgacacccccggcgagagaaaccccuacgagaacauccuguacaagaucugccugagcggcgacggcuggcccuacaucgccagcagaaccgccaucaucggcagagccugggagaacaccgugguggaccuggagagcgacagcaagccccagaagaucggcagcaacggcagcaacaagagccugcagagcgccggcuucgcccccggccugaccuacagccagcugaugacccugaaggacagcaugcugcagcuggaccccaacgccaagaccuggaucgacaucgagggcagacccgaggaccccguggagguggcccuguuccagcccaucagcggcugcuacauccacuucuucagagagcccaccgaccugaagcaguucaagcaggacgccaaguacagccacggcaucgacgugaccgaccuguucgccgcccagcccggccugaccagcgccgugaucgaggcccugcccagaaacauggugcugaccugccagggcagcgacgacaucaagaagcugcuggacagccagggcagaagagacaucaagcugaucgacgugagccugaacaagaucgacagcagaaaguucgagaacgccgugugggaccaguacaaggaccugugccacaugcacaccggcguggugguggagaagaagaagaagggcggcaaggaggagaucaccccccacugcgcccugcuggacugcaucauguucgacgccgccgugagcggcggccugaacgccaccgugcugagagccgugcugcccagagacaugguguucagaaccagcagccccaagguggugcugugaggacuaguaauaaggaaacuguaugaaugucugugggcaggaagugaagagauccuucuguaaagguuuuuggaauuaugucugcugaauaauaaacuuuuuugaaauaauaaaucugguagaaaaaugagaucucaaaggcucuuuucagagccaccaaaaaaaaaaaaaaaaaaaaaaaaaaaaaaaaaaaaaaaaaaaaaaaaaaaaaaaaaaaaaaaaagaauu

SEQ ID NO: 18756 - RNA, 2078 nt, Artificial Sequence
  mRNA product Design b-4 (hSL-A64-N5) comprising derived and/or modified sequence from LASV(KAK-428;Clade n.d. (VII))__ANH09741__SP-HsPLAT_NP(2-569) (opt4)
aggagagucccgcagucggcguccagcggcucugcuuguucgugugugugucguugcaggccuuauucaagcuuaccauggacgccaugaagagaggccugugcugcgugcugcugcugugcggcgccguguucgugagccccagcaacagcaaggaggugaagagcuuccuguggacccagagccugagaagagagcugagcggcuacugcaccaacaucaagcugcagguggugaaggacgcccaggcccugcugcacggccuggacuucagcgaggugagcaacgugcagagacugaugagaaagcagaagagagacgacaacgaccugaagagacugagagaccugaaccaggccgugaacaaccugguggagcugaagagcgugcagcagaagagcgugcugaaggugggcacccugaacagcgacgaccugcugacccuggccgccgaccuggagaagcugaagagcaagguggugagaaccgagagaccccugagcagcggcguguacaugggcaaccugagcagccagcagcuggaccagagaagagcccugcugaacaugaucggcauggccggcggcagccagggcaaccagcccagcagagacggcguggugagagugugggacgugaagaacgccgaccugcugaacaaccaguucggcaccaugcccagccugacccuggccugccugaccaagcagggccagguggaccugaacgacguggugcuggcccugaccgaccugggccugaucuacaccgccaaguaccccaacagcagcgaccuggacagacugagccagaaccaccccgugcugaacaugaucgacgugaacaagagcagccugaacaucagcggcuacaacuucagccugggcgccgccgugaaggccggcgccugcaugcuggacggcggcaacaugcuggagaccaucaagaucagcccccagaccguggacggcauccugaagagcauccugaaggugaagagagcccugggcauguucgugagcgacacccccggcgagagaaaccccuacgagaacauccuguacaaggugugccugagcggcaacggcuggcccuacaucgccagcagaaccagcaucgugggcagagccugggagaacaccgugguggaccuggagagcaacaagaaccagcccaaggugggcaacaacggcagcaacaagaugcugcagagcagcggcuucgccaccggccugaccuacagccagcugaugacccugagagacagcaugcugcagcuggaccccaccgccaagaccuggaucgacaucgagggcagacccgaggaccccguggagcuggcccuguuccagcccagcagcggcugcuacauccacuucuucagagagcccaccgaccugaagcaguucaagcaggacgccaaguacagccacggcaucgacgugaacgaccuguucagcgcccagcccggccugaccagcgccgugcuggaggcccugcccagaaacauggugcugaccugccagggcagcgacgacaucagaaagcugcuggacagccaggacagaaaggacaucaagcugaucgacaucagccugagcaaggccgacgccagaaaguucgagaacgacgugugggaccaguucaaggaccugugccacaugcacaccggcaucgugguggagaagaagaagaagggcggcaagcaggagaugaccccccacugcgcccugcuggacugcaucauguucgacgccgccgugagcggcggccugaacgugcccacccugagagccgugcugcccaccgacaugguguucagaaccaucaccaccaagguggugcugugaggacuaguaauaaggaaacuguaugaaugucugugggcaggaagugaagagauccuucuguaaagguuuuuggaauuaugucugcugaauaauaaacuuuuuugaaauaauaaaucugguagaaaaaugagaucucaaaggcucuuuucagagccaccaaaaaaaaaaaaaaaaaaaaaaaaaaaaaaaaaaaaaaaaaaaaaaaaaaaaaaaaaaaaaaaaagaauu

SEQ ID NO: 18757 - RNA, 2078 nt, Artificial Sequence; identical to SEQ ID NO: 18751
  mRNA product Design b-4 (hSL-A64-N5) comprising derived and/or modified sequence from LASV(Pinneo-NIG-1969;Clade I)__AIT17837__SP-HsPLAT_NP(2-569) (opt4)

SEQ ID NO: 18758 - RNA, 2078 nt, Artificial Sequence
  mRNA product Design b-4 (hSL-A64-N5) comprising derived and/or modified sequence from LASV(ISTH0009-NIG-2011;Clade II)__AIT17405__SP-HsPLAT_NP(2-569) (opt4)
aggagagucccgcagucggcguccagcggcucugcuuguucgugugugugucguugcaggccuuauucaagcuuaccauggacgccaugaagagaggccugugcugcgugcugcugcugugcggcgccguguucgugagccccagcgugagcaaggaggugaagagcuuccuguggacccagagccugagaagagagcugagcggcuacugcagcaacaucaagcugcagguggugaaggacgcccaggcccugcugcacggccuggacuucagcgaggugagcaacgugcagagacugaugagaaagcagaagagagacgacagcgaccugaagagacugagagaccugaaccaggccgugaacaaccugguggagcugaagagcacccagcagaagagcauccugagagugggcacccugaccagcgacgaccugcugacccuggccgccgaccuggagaagcugaagagcaaggugaucagaaccgagagaccccugagcagcggcguguacaugggcaaccugagcacccagcagcuggagcagagaagagcccugcugaacaugaucggcauggugggcggcgcccagggcacccagcccggcagagacggcguggugagagugugggacgugaagaaccccgaccugcugaacaaccaguucggcaccaugcccagccugacccuggccugccugaccaagcagggccagguggaccugaacgacgccgugcuggcccugaccgaccugggccugaucuacaccgccaaguaccccaacagcagcgaccuggacagacugagccagagccaccccauccugaacaugguggacaucaagaagagcagccugaacaucagcggcuacaacuucagccugggcgccgccgugaaggccggcgccugcaugcuggacggcggcaacaugcuggagaccaucaaggugaccccccagaccauggacggcauccugaagagcauccugaaggugaagagaagccugggcauguucgugagcgacacccccggcgagagaaaccccuacgagaacauccuguacaagaucugccugagcggcgacggcuggcccuacaucgccagcagaaccagcaucgugggcagagccugggagaacaccaccguggaccuggagagcgacggcaagccccagaaggugggcagcgccggcagcaacaagagccugcagagcgccggcuuccccaccggccugaccuacagccagcugaugacccugaaggacagcaugaugcagcuggaccccagcgccaagaccuggaucgacaucgagggcagacccgaggaccccguggagaucgcccuguaccagcccaugagcggcugcuacauccacuucuucagagagcccaccgaccugaagcaguucaagcaggacgccaaguacagccacggcaucgacguggccgaccuguuccccgcccagcccggccugaccagcgccgugaucgaggcccugcccagaaacauggugcugaccugccagggcagcgacgacaucaagagacugcuggacagccagggcagaagagacaucaagcugaucgacaucgcccugagcaaggccgacagcagaagauucgagaacgccgugugggaccagugcaaggaccugugccacaugcacaccggcguggugguggagaagaagaagagaggcggcaaggaggagaucaccccccacugcgcccugauggacugcaucauguacgacgccgccgugagcggcggccugaacauccccgugcugagagccgugcugcccagagacaugguguucagaaccagcagccccaagguggugcugugaggacuaguaauaaggaaacuguaugaaugucugugggcaggaagugaagagauccuucuguaaagguuuuuggaauuaugucugcugaauaauaaacuuuuuugaaauaauaaaucugguagaaaaaugagaucucaaaggcucuuuucagagccaccaaaaaaaaaaaaaaaaaaaaaaaaaaaaaaaaaaaaaaaaaaaaaaaaaaaaaaaaaaaaaaaaagaauu

SEQ ID NO: 18759 - RNA, 2078 nt, Artificial Sequence
  mRNA product Design b-4 (hSL-A64-N5) comprising derived and/or modified sequence from LASV(ISTH2010-NIG-2012;Clade II)__AIT17483__SP-HsPLAT_NP(2-569) (opt4)
aggagagucccgcagucggcguccagcggcucugcuuguucgugugugugucguugcaggccuuauucaagcuuaccauggacgccaugaagagaggccugugcugcgugcugcugcugugcggcgccguguucgugagccccagcgccagcaaggaggugaagagcuuccuguggacccagagccugagaagagagcugagcggcuacugcagcaacaucaagcugcagguggugaaggacgcccaggcccugcugcacggccuggacuucagcgaggugagcaacgugcagagacugaugagaaagcagaagagagacgacagcgaccugaagagacugagagaccugaaccaggccgugaacaaccugguggagcugaagagcacccagcagaagagcauccugagagugggcacccugaccagcgacgaccugcugacccuggccgccgaccuggagaagcugaagagcaaggugaucagaaccgagagaccccugagcagcggcguguacaugggcaaccugagcacccagcagcuggagcagagaagagcccugcugaaccugaucggcauggugggcggcgcccagggcacccagcccggcagagacggcguggugagagugugggacgugaagaaccccgaccugcugaacaaccaguucggcaccaugcccagccugacccuggccugccugaccaagcagggccagguggaccugaacgacgccgugcuggcccugaccgaccugggccugaucuacaccgccaaguaccccaacagcagcgaccuggacagacugagccagagccaccccauccugaacaugguggacaccaagaagagcagccugaacaucagcggcuucaacuucagccugggcgccgccgugaaggccggcgccugcaugcuggacggcggcaacaugcuggagaccaucaaggugaccccccagaccauggacggcauccugaagagcauccugaaggugaagaagagccugggcauguucgugagcgacacccccggcgagagaaaccccuacgagaacauccuguacaagaucugccugagcggcgacggcuggcccuacaucgccagcagaaccagcaucgugggcagagccugggagaacaccaccguggaccuggagagcgacggcaagccccacaaggugggcaccgccggcagcaacaagagccugcagagcgccggcuuccccaccggccugaccuacagccagcugaugacccugaaggacagcaugaugcagcuggaccccagcgccaagaccuggaucgacaucgagggcagacccgaggaccccguggagaucgcccuguaccagcccaugagcggcugcuacauccacuucuucagagagcccaccgaccugaagcaguucaagcaggacgccaaguacagccacggcaucgacguggccgaccuguuccccgcccagcccggccugaccagcgccgugaucgaggcccugcccagaaacauggugcugaccugccagggcagcgacgacaucaagagacugcuggacagccagggcagaagagacaucaagcugaucgacaucgcccugagcaaggccgacagcagaagauucgagaacgccgugugggaccagugcaaggaccugugccacaugcacaccggcguggugguggagaagaagaagagaggcggcaaggaggagaucaccccccacugcgcccugauggacugcaucauguacgacgccgccgugagcggcggccugaacauccccgugcugagagccgugcugcccagagacaugguguucagaaccagcagccccaagguggugcugugaggacuaguaauaaggaaacuguaugaaugucugugggcaggaagugaagagauccuucuguaaagguuuuuggaauuaugucugcugaauaauaaacuuuuuugaaauaauaaaucugguagaaaaaugagaucucaaaggcucuuuucagagccaccaaaaaaaaaaaaaaaaaaaaaaaaaaaaaaaaaaaaaaaaaaaaaaaaaaaaaaaaaaaaaaaaagaauu

SEQ ID NO: 18760 - RNA, 2078 nt, Artificial Sequence
  mRNA product Design b-4 (hSL-A64-N5) comprising derived and/or modified sequence from LASV(Lassa virus/H.sapiens-wt/NGA/2015/ISTH_0543;Clade II)__AVO03640__SP-HsPLAT_NP(2-569) (opt4)
aggagagucccgcagucggcguccagcggcucugcuuguucgugugugugucguugcaggccuuauucaagcuuaccauggacgccaugaagagaggccugugcugcgugcugcugcugugcggcgccguguucgugagccccagcgccagcaaggaggugaagagcuuccuguggacccagagccugagaagagagcugagcggcuacugcagcaacaucaagcugcagguggugaaggacgcccaggcccugcugcacggccuggacuucagcgaggugagcaacgugcagagacugaugagaaagcagaagagagacgacagcgaccugaagagacugagagaccugaaccaggccgugaacaaccugguggagcugaagagcacccagcagaagagcauccugagagugggcacccugaccagcgacgaccugcugacccuggccgccgaccuggagaagcugaagagcaaggugaucagaaccgagagaccccugagcagcggcguguacaugggcaaccugagcacccagcagcuggagcagagaagagcccugcugaacaugaucggcauggugggcggcgcccagggcacccagcccggcagagacggcguggugagagugugggacgugaagaaccccgaccugcugaacaaccaguucggcaccaugcccagccugacccuggccugccugaccaagcagggccagguggaccugaacgacgccgugcuggcccugaccgaccugggccugaucuacaccgccaaguaccccaacagcagcgaccuggacagacugagccagagccaccccauccugaacaugguggacaccaagaagagcagccugaacaucagcggcuacaacuucagccugggcgccgccgugaaggccggcgccugcaugcuggacggcggcaacaugcuggagaccaucaaggugaccccccagaccauggacggcauccugaagagcauccugaaggugaagaagagccugggcauguucgugagcgacacccccggcgagagaaaccccuacgagaacauccuguacaagaucugccugagcggcgacggcuggcccuacaucgccagcagaaccagcaucgugggcagagccugggagaacaccaccguggaccuggagagcgacggcaagccccagaaggugggcagcgccggcagcaacaagagccugcagagcgccggcuuccccaccggccugaccuacagccagcugaugacccugaaggacagcaugaugcagcuggaccccagcgccaagaccuggaucgacaucgagggcagacccgaggaccccguggagaucgcccuguaccagcccaugagcggcugcuacauccacuucuucagagagcccaccgaccugaagcaguucaagcaggacgccaaguacagccacggcaucgacguggccgaccuguuccccgcccagcccggccugaccagcgccgugaucgaggcccugcccagaaacauggugcugaccugccagggcagcgacgacaucaagagacugcuggacagccagggcagaaaggacaucaagcugaucgacaucgcccugagcaaggccgacagcagaagauucgagaacgccgugugggaccagugcaaggaccugugccacaugcacaccggcguggugguggagaagaagaagagaggcggcaaggaggagaucaccccccacugcgcccugauggacugcaucauguacgacgccgccgugagcggcggccugaacauccccgugcugagagccgugcugcccagagacaugguguucagaaccagcagccccaagguggugcugugaggacuaguaauaaggaaacuguaugaaugucugugggcaggaagugaagagauccuucuguaaagguuuuuggaauuaugucugcugaauaauaaacuuuuuugaaauaauaaaucugguagaaaaaugagaucucaaaggcucuuuucagagccaccaaaaaaaaaaaaaaaaaaaaaaaaaaaaaaaaaaaaaaaaaaaaaaaaaaaaaaaaaaaaaaaaagaauu

SEQ ID NO: 18761 - RNA, 2078 nt, Artificial Sequence
  mRNA product Design b-4 (hSL-A64-N5) comprising derived and/or modified sequence from LASV(Lassa virus/H.sapiens-wt/NGA/2016/ISTH_0009;Clade II)__AVO03572__SP-HsPLAT_NP(2-569) (opt4)
aggagagucccgcagucggcguccagcggcucugcuuguucgugugugugucguugcaggccuuauucaagcuuaccauggacgccaugaagagaggccugugcugcgugcugcugcugugcggcgccguguucgugagccccagcgccagcaaggaggugaagagcuuccuguggacccagagccugagaagagagcugagcggcuacugcagcaacaucaagcugcagguggugaaggacgcccaggcccugcugcacggccuggacuucagcgaggugagcaacgugcagagacugaugagaaagcagaagagagacgacagcgaccugaagagacugagagaccugaaccaggccgugaacaaccugguggagcugaagagcacccagcagaagagcauccugagagugggcacccugaccagcgacgaccugcugacccuggccgccgaccuggagaagcugaagagcaaggugaucagaaccgagagaccccugagcagcggcguguacaugggcaaccugagcacccagcagcuggagcagagaagagcccugcugaacaugaucggcauggugggcggcgcccagggcacccagcccggcagagacggcguggugagagugugggacgugaagaaccccgaccugcugaacaaccaguucggcaccaugcccagccugacccuggccugccugaccaagcagggccagguggaccugaacgacgccgugcuggcccugaccgaccugggccugaucuacaccgccaaguaccccaacagcagcgaccuggacagacugagccagagccaccccauccugaacaugguggacaccaagaagagcagccugaacaucagcggcuacaacuucagccugggcgccgccgugaaggccggcgccugcaugcuggacggcggcaacaugcuggagaccaucaaggugaccccccagaccauggacggcauccugaagagcauccugaaggugaagaagagccugggcauguucgugagcgacacccccggcgagagaaaccccuacgagaacauccuguacaagaucugccugagcggcgacggcuggcccuacaucgccagcagaaccagcaucgugggcagagccugggagaacaccaccguggaccuggagagcgacggcaagccccagaaggugggcagcgccggcagcaacaagagccugcagagcgccggcuuccccaccggccugaccuacagccagcugaugacccugaaggacagcaugaugcagcuggaccccagcgccaagaccuggaucgacaucgagggcagacccgaggaccccguggagaucgcccuguaccagcccaugagcggcugcuacauccacuucuucagagagcccaccgaccugaagcaguucaagcaggacgccaaguacagccacggcaucgacguggccgaccuguuccccgcccagcccggccugaccagcgccgugaucgaggcccugcccagaaacauggugcugaccugccagggcagcgacgacaucaagagacugcuggacagccagggcagaagagacaucaagcugaucgacaucgcccugagcaaggccgacagcagaagauucgagaacgccgugugggaccagugcaaggaccugugccacaugcacaccggcguggugguggagaagaagaagagaggcggcaaggaggagaucaccccccacugcgcccugauggacugcaucauguacgacgccgccgugagcggcggccugaacauccccgugcugagagccgugcugcccagagacaugguguucagaaccagcagccccaagguggugcugugaggacuaguaauaaggaaacuguaugaaugucugugggcaggaagugaagagauccuucuguaaagguuuuuggaauuaugucugcugaauaauaaacuuuuuugaaauaauaaaucugguagaaaaaugagaucucaaaggcucuuuucagagccaccaaaaaaaaaaaaaaaaaaaaaaaaaaaaaaaaaaaaaaaaaaaaaaaaaaaaaaaaaaaaaaaaagaauu

SEQ ID NO: 18762 - RNA, 2078 nt, Artificial Sequence
  mRNA product Design b-4 (hSL-A64-N5) comprising derived and/or modified sequence from LASV(Lassa virus/H.sapiens-wt/NGA/2016/ISTH_0017;Clade II)__AVO03568__SP-HsPLAT_NP(2-569) (opt4)
aggagagucccgcagucggcguccagcggcucugcuuguucgugugugugucguugcaggccuuauucaagcuuaccauggacgccaugaagagaggccugugcugcgugcugcugcugugcggcgccguguucgugagccccagcgccagcaaggaggugaagagcuuccuguggacccagagccugagaagagagcugagcggcuacugcagcagcaucaagcugcagguggugaaggacgcccaggcccugcugcacggccuggacuucagcgaggugagcaacgugcagagacugaugagaaagcagaagagagacgacagcgaccugaagagacugagagaccugaaccaggccgugaacaaccugguggagcugaagagcacccagcagaagagcauccugagagugggcacccugaccagcgacgaccugcugacccuggccgccgaccuggagaagcugaagagcaaggugaucagaaccgagagaccccugagcagcggcguguacaugggcaaccugagcacccagcagcuggagcagagaagagcccugcugaacaugaucggcauggccggcggcgcccagggcacccagcccggcagagacggcguggugagagugugggacgugaagaaccccgaccugcugaacaaccaguucggcaccaugcccagccugacccuggccugccugaccaagcagggccagguggaccugaacgacgccgugcuggcccugaccgaccugggccugaucuacaccgccaaguaccccaacagcagcgaccuggacagacugagccagagccaccccauccugaacaugguggacaccaagaagagcagccugaacaucagcggcuacaacuucagccugggcgccgccgugaaggccggcgccugcaugcuggacggcggcaacaugcuggagaccaucaaggugaccccccagaccauggacggcauccugaagagcauccugaaggugaagagaagccugggcauguucgugagcgacgcccccggcgagagaaaccccuacgagaacauccuguacaagaucugccugagcggcgacggcuggcccuacaucgccagcagaaccagcaucgugggcagagccugggagaacaccaccguggaccuggagagcgacggcaagccccagaaggugggcgccaccggcagcaacaagagccugcagagcgccggcuuccccaccggccugaccuacagccagcugaugacccugaaggacagcaugaugcagcuggaccccagcgccaagaccuggaucgacaucgagggcagacccgaggaccccguggagguggcccuguaccagcccgugagcggcugcuacauccacuucuucagagagcccaccgaccugaagcaguucaagcaggacgccaaguacagccacggcaucgacguggccgaccuguuccccgcccagcccggccugaccagcgccgugaucgaggcccugcccagaaacauggugcugaccugccagggcagcgacgacaucaagaagcugcuggacagccagggcagaaaggacaucaagcugaucgacaucgcccugagcaaggccgacagcagaagauucgagaacgccgugugggaccagugcaaggaccugugccacaugcacaccggcguggugguggagaagaagaagagaggcggcaaggaggagaucaccccccacugcgcccugauggacugcaucauguacgacgccgccgugagcggcggccugaacauccccgugcugagagccgugcugcccagagacaugguguucagaaccagcagccccaagguggugcugugaggacuaguaauaaggaaacuguaugaaugucugugggcaggaagugaagagauccuucuguaaagguuuuuggaauuaugucugcugaauaauaaacuuuuuugaaauaauaaaucugguagaaaaaugagaucucaaaggcucuuuucagagccaccaaaaaaaaaaaaaaaaaaaaaaaaaaaaaaaaaaaaaaaaaaaaaaaaaaaaaaaaaaaaaaaaagaauu

SEQ ID NO: 18763 - RNA, 2078 nt, Artificial Sequence
  mRNA product Design b-4 (hSL-A64-N5) comprising derived and/or modified sequence from LASV(Lassa virus/H.sapiens-wt/NGA/2018/ISTH_0959;Clade II)__AVV65100__SP-HsPLAT_NP(2-569) (opt4)
aggagagucccgcagucggcguccagcggcucugcuuguucgugugugugucguugcaggccuuauucaagcuuaccauggacgccaugaagagaggccugugcugcgugcugcugcugugcggcgccguguucgugagccccagcgccagcaaggaggugaagagcuuccuguggacccagagccugagaagagagcugagcggcuacugcagcaacaucaagcugcagguggugaaggacgcccaggcccugcugcacggccuggacuucagcgaggugagcaacgugcagagacugaugagaaagcagaagagagacgacagcgaccugaagagacugagagaccugaaccaggccgugaacaaccugguggagcugaagagcacccagcagaagagcauccugagagugggcacccugaccagcgacgaccugcugacccuggccgccgaccuggagaagcugaagagcaaggugaucagaaccgagagaccccugagcagcggcguguacaugggcaaccugagcacccagcagcuggagcagagaagagcccugcugaaccugaucggcauggugggcggcgcccagggcacccagcccggcagagacggcguggugagagugugggacgugaagaaccccgaccugcugaacaaccaguucggcaccaugcccagccugacccuggccugccugaccaagcagggccagguggaccugaacgacguggugcuggcccugaccgaccugggccugaucuacaccgccaaguaccccaacagcagcgaccuggacagacugagccagagccaccccauccugaacaugguggacaccaagaagagcagccugaacaucagcggcuucaacuucagccugggcgccgccgugaaggccggcgccugcaugcuggacggcggcaacaugcuggagaccaucaaggugaccccccagaccauggacggcauccugaagagcauccugaaggugaagaagagccugggcauguucgugagcgacacccccggcgagagaaaccccuacgagaacauccuguacaagaucugccugagcggcgacggcuggcccuacaucgccagcagaaccagcaucgugggcagagccugggagaacaccaccguggaccuggagagcgacggcaagccccacaaggugggcaccgccggcagcaacaagagccugcagagcgccggcuuccccaccggccugaccuacagccagcugaugacccugaaggacagcaugaugcagcuggaccccagcgccaagaccuggaucgacaucgagggcagacccgaggaccccguggagaucgcccuguaccagcccaugagcggcugcuacauccacuucuucagagagcccaccgaccugaagcaguucaagcaggacgccaaguacagccacggcaucgacguggccgaccuguuccccgcccagcccggccugaccagcgccgugaucgaggcccugcccagaaacauggugcugaccugccagggcagcgacgacaucaagagacugcuggacagccagggcagaaaggacaucaagcugaucgacaucgcccugagcaagaccgacagcagaagauucgagaacgccgugugggaccagugcaaggaccugugccacaugcacaccggcguggugguggagaagaagaagagaggcggcaaggaggagaucaccccccacugcgcccugauggacugcaucauguacgacgccgccgugagcggcggccugaacauccccgugcugagagccgugcugcccagagacaugguguucagaaccagcagccccaagguggugcugugaggacuaguaauaaggaaacuguaugaaugucugugggcaggaagugaagagauccuucuguaaagguuuuuggaauuaugucugcugaauaauaaacuuuuuugaaauaauaaaucugguagaaaaaugagaucucaaaggcucuuuucagagccaccaaaaaaaaaaaaaaaaaaaaaaaaaaaaaaaaaaaaaaaaaaaaaaaaaaaaaaaaaaaaaaaaagaauu

SEQ ID NO: 18764 - RNA, 2078 nt, Artificial Sequence
  mRNA product Design b-4 (hSL-A64-N5) comprising derived and/or modified sequence from LASV(LASV003-NIG-2008;Clade II)__AIT17581__SP-HsPLAT_NP(2-569) (opt4)
aggagagucccgcagucggcguccagcggcucugcuuguucgugugugugucguugcaggccuuauucaagcuuaccauggacgccaugaagagaggccugugcugcgugcugcugcugugcggcgccguguucgugagccccagcgccagcaaggaggugaagagcuuccuguggacccagagccugagaagagagcugagcggcuacugcagcagcaucaagcugcagguggugaaggacgcccaggcccugcugcacggccuggacuucagcgaggugagcaacgugcagagacugaugagaaagcagaagagagacgacagcgaccugaagagacugagagaccugaaccaggccgugaacaaccugguggagcugaagagcacccagcagaagagcgugcugagagugggcacccugaccagcgacgaccugcugacccuggccgccgaccuggagaagcugaagagcaaggugaucagaaccgagagaccccugagcagcggcguguacaugggcaaccugagcgcccagcagcuggagcagagaagaacccugcugaacaugaucggcauggugggcggcgcccagggcacccagcccggcagagacggcguggugagagugugggacgugaagaaccccgaccugcugaacaaccaguucggcaccaugcccagccugacccuggccugccugaccaagcagggccagguggaccugaacgacguggugcuggcccugaccgaccugggccugaucuacaccgccaaguaccccaacagcagcgaccuggacagacugagccagagccaccccauccugagcaugguggacaccaagaagagcagccugaacaucagcggcuacaacuucagccugggcgccgccgugaaggccggcgccugcaugcuggacggcggcaacaugcuggagaccaucaaggugaccccccagaccauggacggcauccugaagagcauccugaaggugaagaagagccugggcauguucgugagcgacacccccggcgagagaaaccccuacgagaacauccuguacaagaucugccugagcggcgacggcuggcccuacaucgccagcagaaccagcaucgugggcagagccugggagaacaccaccguggaccuggagagcgacggcaagccccagaaggugggcaccgccggcagcaacaagagccugcagagcgccggcuuccccaccggccugaccuacagccagcugaugacccugaaggacagcaugaugcagcuggaccccagcgccaagaccuggaucgacaucgagggcagacccgaggaccccguggagaucgcccuguaccagcccaugagcggcugcuacauccacuucuucagagagcccaccgaccugaagcaguucaagcaggacgccaaguacagccacggcaucgacgugaccgaccuguuccccgcccagcccggccugaccagcgccgugaucgaggcccugcccagaaacauggugcugaccugccagggcagcgacgacaucaagagacugcuggacagccagggcagaagagacaucaagcugaucgacaucgcccugagcaaggccgacagcagaagauucgagaacgccgugugggaccagugcaaggaccugugccacaugcacaccggcguggugguggagaagaagaagagaggcggcaaggaggagaucaccccccacugcgcccugauggacugcaucauguacgacgccgccgugagcggcggccugaacauccccgugcugagagccgugcugcccagagacaugguguucagaaccagcagccccaagguggugcugugaggacuaguaauaaggaaacuguaugaaugucugugggcaggaagugaagagauccuucuguaaagguuuuuggaauuaugucugcugaauaauaaacuuuuuugaaauaauaaaucugguagaaaaaugagaucucaaaggcucuuuucagagccaccaaaaaaaaaaaaaaaaaaaaaaaaaaaaaaaaaaaaaaaaaaaaaaaaaaaaaaaaaaaaaaaaagaauu

SEQ ID NO: 18765 - RNA, 2078 nt, Artificial Sequence
  mRNA product Design b-4 (hSL-A64-N5) comprising derived and/or modified sequence from LASV(LASV035-NIG-2009;Clade II)__AIT17589__SP-HsPLAT_NP(2-569) (opt4)
aggagagucccgcagucggcguccagcggcucugcuuguucgugugugugucguugcaggccuuauucaagcuuaccauggacgccaugaagagaggccugugcugcgugcugcugcugugcggcgccguguucgugagccccagcgccagcaaggaggugaagagcuuccuguggacccagagccugagaagagagcugagcggcuacugcagcagcaucaagcugcagguggugaaggacgcccaggcccugcugcacggccuggacuucagcgaggugagcaacgugcagagacugaugagaaagcagaagagagacgacagcgaccugaagagacugagagaccugaaccaggccgugaacaaccugguggagcugaagagcacccagcagaagagcauccugagagugggcacccugaccagcgacgaccugcugacccuggccgccgaccuggagaagcugaagagcaaggugaucagaaccgagagaccccugagcagcggcguguacaugggcaaccugagcgcccagcagcuggagcagagaagagcccugcugaacaugaucggcauggugggcggcgcccagggcacccagcccggcagagacggcguggugagagugugggacgugaagaaccccgaccugcugaacaaccaguucggcaccaugcccagccugacccuggccugccugaccaagcagggccagguggaccugaacgacgccgugcuggcccugaccgaccugggccugaucuacaccgccaaguaccccaacagcagcgaccuggacagacugagccagagccaccccauccugaacaugguggacaccaagaagagcagccugaacaucagcggcuacaacuucagccugggcgccgccgugaaggccggcgccugcaugcuggacggcggcaacaugcuggagaccaucaaggugaccccccagaccauggacggcauccugaagagcauccugaaggugaagagaagccugggcauguucgugagcgacacccccggcgagagaaaccccuacgagaacauccuguacaagaucugccugagcggcgacggcuggcccuacaucgccagcagaaccagcaucgugggcagagccugggagaacaccaccguggaccuggagagcgacggcaagccccagaaggugggcaccaccggcagcaacaagagccugcagagcgccggcuuccccaccggccugaccuacagccagcugaugacccugaaggacagcaugaugcagcuggaccccagcgccaagaccuggaucgacaucgagggcagacccgaggaccccguggagaucgcccuguaccagcccaugagcggcugcuacauccacuucuucagagagcccaccgaccugaagcaguucaagcaggacgccaaguacagccacggcaucgacguggccgaccuguuccccgcccagcccggccugaccagcgccgugaucgaggcccugcccagaaacauggugcugaccugccagggcagcgacgacaucaagaagcugcuggacagccagggcagaagagacaucaagcugaucgacaucgcccugagcaaggccgacagcagaaaguucgagaacgccgugugggaccagugcaaggaccugugccacaugcacaccggcguggugguggagaagaagaagagaggcggcaaggaggagaucaccccccacugcgcccugauggacugcaucauguacgacgccgccgugagcggcggccugaacauccccgugcugagagccgugcugcccagagacaugguguucagaaccagcagccccaagguggugcugugaggacuaguaauaaggaaacuguaugaaugucugugggcaggaagugaagagauccuucuguaaagguuuuuggaauuaugucugcugaauaauaaacuuuuuugaaauaauaaaucugguagaaaaaugagaucucaaaggcucuuuucagagccaccaaaaaaaaaaaaaaaaaaaaaaaaaaaaaaaaaaaaaaaaaaaaaaaaaaaaaaaaaaaaaaaaagaauu

SEQ ID NO: 18766 - RNA, 2078 nt, Artificial Sequence
  mRNA product Design b-4 (hSL-A64-N5) comprising derived and/or modified sequence from LASV(LASV1000-NIG-2009;Clade II)__AIT17783__SP-HsPLAT_NP(2-569) (opt4)
aggagagucccgcagucggcguccagcggcucugcuuguucgugugugugucguugcaggccuuauucaagcuuaccauggacgccaugaagagaggccugugcugcgugcugcugcugugcggcgccguguucgugagccccagcgccagcaaggaggugaagagcuuccuguggacccagagccugagaagagagcugagcggcuacugcagcaacaucaagcugcagguggugaaggacgcccaggcccugcugcacggccuggacuucagcgaggugagcaacgugcagagacugaugagaaagcagaagagagacgacagcgaccugaagagacugagagaccugaaccaggccgugaacaaccugguggagcugaagagcacccagcagaagagcauccugagagugggcacccugaccagcgacgaccugcugacccuggccgccgaccuggagaagcugaagagcaaggugaucagaaccgagagaccccugagcagcggcguguacaugggcaaccugagcacccagcagcuggagcagagaagagcccugcugaacaugaucggcauggugggcggcgcccagggcacccagcccggcagagacggcguggugagagugugggacgugaagaaccccgaccugcugaacaaccaguucggcaccaugcccagccugacccuggccugccugaccaagcagggccagguggaccugaacgacguggugcuggcccugaccgaccugggccugaucuacaccgccaaguaccccaacagcagcgaccuggacagacugagccagagccaccccauccugaacaugguggacaccaagaagagcagccugaacaucagcggcuacaacuucagccugggcgccgccgugaaggccggcgccugcaugcuggacggcggcaacaugcuggagaccaucaaggugaccccccagaccauggacggcauccugaagagcauccugaaggugaagaagagccugggcauguucgugagcgacacccccggcgagagaaaccccuacgagaacauccuguacaagaucugccugagcggcgacggcuggcccuacaucgccagcagaaccagcaucgugggcagagccugggagaacaccaccguggaccuggagagcgacggcaagccccagaaggugggcaccgccggcagcaacaagagccugcagagcgccggcuuccccaccggccugaccuacagccagcugaugacccugaaggacagcaugaugcagcuggaccccagcgccaagaccuggaucgacaucgagggcagacccgaggaccccguggagaucgcccuguaccagcccgugagcggcugcuacauccacuucuucagagagcccaccgaccugaagcaguucaagcaggacgccaaguacagccacggcaucgacguggccgaccuguuccccgcccagcccggccugaccagcgccgugaucgaggcccugcccagaaacauggugcugaccugccagggcagcgacgacaucaagagacugcuggacagccagggcagaagagacaucaagcugaucgacaucgcccugagcaaggccgacagcagaagauucgagaacgccgugugggaccagugcaaggaccugugccacaugcacaccggcguggugguggagaagaagaagagaggcggcaaggaggagaucaccccccacugcgcccugauggacugcaucauguacgacgccgccgugagcggcggccugaacauccccgugcugagagccgugcugcccagagacaugguguucagaaccagcagccccaagguggugcugugaggacuaguaauaaggaaacuguaugaaugucugugggcaggaagugaagagauccuucuguaaagguuuuuggaauuaugucugcugaauaauaaacuuuuuugaaauaauaaaucugguagaaaaaugagaucucaaaggcucuuuucagagccaccaaaaaaaaaaaaaaaaaaaaaaaaaaaaaaaaaaaaaaaaaaaaaaaaaaaaaaaaaaaaaaaaagaauu

SEQ ID NO: 18767 - RNA, 2078 nt, Artificial Sequence
  mRNA product Design b-4 (hSL-A64-N5) comprising derived and/or modified sequence from LASV(LASV221-NIG-2010;Clade II)__AIT17625__SP-HsPLAT_NP(2-569) (opt4)
aggagagucccgcagucggcguccagcggcucugcuuguucgugugugugucguugcaggccuuauucaagcuuaccauggacgccaugaagagaggccugugcugcgugcugcugcugugcggcgccguguucgugagccccagcgccagcaaggaggugaagagcuuccuguggacccagagccugagaagagagcugagcggcuacugcagcagcaucaagcugcagguggugaaggacgcccaggcccugcugcacggccuggacuucagcgaggugagcaacgugcagagacugaugagaaagcagagaagagacgacagcgaccugaagagacugagagaccugaaccaggccgugaacaaccugguggagcugaagagcacccagcagaagagcauccugagagugggcacccugaccagcgacgaccugcugacccuggccgccgaccuggagaagcugaagagcaaggugaucagaaccgagagaccccugagcagcggcguguacaugggcaaccugagcacccagcagcuggagcagagaagagcccugcugaacaugaucggcauggugggcggcgcccagggcacccagcccggcagagacggcguggugagagugugggacgugaagaaccccgaccugcugaacaaccaguucggcaccaugcccagccugacccuggccugccugaccaagcagggccagguggaccugaacgacgccgugcuggcccugaccgaccugggccugaucuacaccgccaaguaccccaacagcagcgaccuggacagacugagccagagccaccccauccugaacaugguggacaccaagaagagcagccugaacaucagcggcuacaacuucagccugggcgccgccgugaaggccggcgccugcaugcuggacggcggcaacaugcuggagaccaucaaggugaccccccagaccguggacggcauccugaagagcauccugaaggugaagagaagccugggcauguucgugagcgacacccccggcgagagaaaccccuacgagaacauccuguacaagaucugccugagcggcgacggcuggcccuacaucgccagcagaaccagcaucgugggcagagccugggagaacaccaccguggaccuggagagcgacggcaagccccagaaggugggcaccgccggcagcaacaagagccugcagagcgccggcuuccccaccggccugaccuacagccagcugaugacccugaaggacagcaugaugcagcuggaccccagcgccaagaccuggaucgacaucgagggcagacccgaggaccccguggagaucgcccuguaccagcccaugagcggcugcuacauccacuucuucagagagcccaccgaccugaagcaguucaagcaggacgccaaguacagccacggcaucgacguggccgaccuguuccccgcccagcccggccugaccagcgccgugaucgaggcccugcccagaaacauggugcugaccugccagggcagcgacgacaucaagagacugcuggacagccagggcagaagagacaucaagcugaucgacaucgcccugagcaaggccgacagcagaaaguucgagaacgccgugugggaccagugcaaggaccugugccacaugcacaccggcguggugguggagaagaagaagagaggcggcaaggaggagaucaccccccacugcgcccugauggacugcaucauguacgacgccgccgugagcggcggccugaacauccccgugcugagagccgugcugcccagagacaugguguucagaaccagcagccccaagguggugcugugaggacuaguaauaaggaaacuguaugaaugucugugggcaggaagugaagagauccuucuguaaagguuuuuggaauuaugucugcugaauaauaaacuuuuuugaaauaauaaaucugguagaaaaaugagaucucaaaggcucuuuucagagccaccaaaaaaaaaaaaaaaaaaaaaaaaaaaaaaaaaaaaaaaaaaaaaaaaaaaaaaaaaaaaaaaaagaauu

SEQ ID NO: 18768 - RNA, 2078 nt, Artificial Sequence
  mRNA product Design b-4 (hSL-A64-N5) comprising derived and/or modified sequence from LASV(LASV237-NIG-2010;Clade II)__AIT17639__SP-HsPLAT_NP(2-569) (opt4)
aggagagucccgcagucggcguccagcggcucugcuuguucgugugugugucguugcaggccuuauucaagcuuaccauggacgccaugaagagaggccugugcugcgugcugcugcugugcggcgccguguucgugagccccagcgccagcaaggaggugaagagcuuccuguggacccagagccugagaagagagcugagcggcuacugcagcaacaucaagcugcagguggugaaggacgcccaggcccugcugcacggccuggacuucagcgaggugagcaacgugcagagacugaugagaaagcagaagagagacgacagcgaccugaagagacugagagaccugaaccaggccgugaacaaccugguggagcugaagagcacccagcagaagagcauccugagagugggcacccugaccagcgacgaccugcugacccuggccgccgaccuggagaagcugaagagcaaggugaucagaaccgagagaccccugagcagcggcguguacaugggcaaccugagcacccagcagcuggagcagagaagagcccugcugaacaugaucggcauggugggcggcgcccagggcacccagcccggcagagacggcguggugagagugugggacgugaagaaccccgaccugcugaacaaccaguucggcaccaugcccagccugacccuggccugccugaccaagcagggccagguggaccugaacgacgccgugcuggcccugaccgaccugggccugaucuacaccgccaaguaccccaacagcagcgaccuggacagacugagccagagccaccccauccugaacaugguggacaucaagaagagcagccugaacaucagcggcuacaacuucagccugggcgccgccgugaaggccggcgccugcaugcuggacggcggcaacaugcuggagaccaucaaggugaccccccagaccauggacggcauccugaagagcauccugaaggugaagagaagccugggcauguucgugagcgacacccccggcgagagaaaccccuacgagaacauccuguacaagaucugccugagcggcgacggcuggcccuacaucgccagcagaaccagcaucgugggcagagccugggagaacaccaccguggaccuggagagcgacggcaagccccagaaggugggcagcgccggcagcaacaagagccugcagagcgccggcuuccccaccggccugaccuacagccagcugaugacccugaaggacagcaugaugcagcuggaccccagcgccaagaccuggaucgacaucgagggcagacccgaggaccccguggagaucgcccuguaccagcccaugagcggcugcuacauccacuucuucagagagcccaccgaccugaagcaguucaagcaggacgccaaguacagccacggcaucgacguggccgaccuguuccccgcccagcccggccugaccagcgccgugaucgaggcccugcccagaaacauggugcugaccugccagggcagcgacgacaucaagagacugcuggacagccagggcagaagagacaucaagcugaucgacaucgcccugagcaaggccgacagcagaagauucgagaacgccgugugggaccagugcaaggaccugugccacaugcacaccggcguggugguggagaagaagaagagaggcggcaaggaggagaucaccccccacugcgcccugauggacugcaucauguacgacgccgccgugagcggcggccugaacauccccgugcugagagccgugcugcccagagacaugguguucagaaccagcagccccaagguggugcugugaggacuaguaauaaggaaacuguaugaaugucugugggcaggaagugaagagauccuucuguaaagguuuuuggaauuaugucugcugaauaauaaacuuuuuugaaauaauaaaucugguagaaaaaugagaucucaaaggcucuuuucagagccaccaaaaaaaaaaaaaaaaaaaaaaaaaaaaaaaaaaaaaaaaaaaaaaaaaaaaaaaaaaaaaaaaagaauu

SEQ ID NO: 18769 - RNA, 2078 nt, Artificial Sequence
  mRNA product Design b-4 (hSL-A64-N5) comprising derived and/or modified sequence from LASV(LASV253-NIG-2011;Clade II)__AIT17671__SP-HsPLAT_NP(2-569) (opt4)
aggagagucccgcagucggcguccagcggcucugcuuguucgugugugugucguugcaggccuuauucaagcuuaccauggacgccaugaagagaggccugugcugcgugcugcugcugugcggcgccguguucgugagccccagcgccagcaaggaggugaagagcuuccuguggacccagagccugagaagagagcugagcggcuacugcagcagcaucaagcugcagguggugaaggacgcccaggcccugcugcacggccuggacuucagcgaggugagcaacgugcagagacugaugagaaagcagaagagagacgacagcgaccugaagagacugagagaccugaaccaggccgugaacaaccugguggagcugaagagcacccagcagaagagcgugcugagagugggcacccugaccagcgacgaccugcugacccuggccgccgaccuggagaagcugaagagcaaggugaucagaaccgagagaccccugagcagcggcguguacaugggcaaccugagcacccagcagcuggagcagagaagagcccugcugaacaugaucggcauggugggcggcgcccagggcacccagcccggcagagacggcguggugagagugugggacgugaagaaccccgaccugcugaacaaccaguucggcaccaugcccagccugacccuggccugccugaccaagcagggccagguggaccugaacgacguggugcuggcccugaccgaccugggccugaucuacaccgccaaguaccccaacagcagcgaccuggacagacugagccagagccaccccauccugaacaugguggacaccaagaagagcagccugaacaucagcggcuacaacuucagccugggcgccgccgugaaggccggcgccugcaugcuggacggcggcaacaugcuggagaccaucaaggugaccccccagaccauggacggcauccugaagagcauccugaaggugaagaagagccugggcauguucgugagcgacacccccggcgagagaaaccccuacgagaacauccuguacaagaucugccugagcggcgacggcuggcccuacaucgccagcagaaccagcaucgugggcagagccugggagaacaccaccguggaccuggagagcgacggcaagccccagaaggugggcaccgccggcagcaacaagagccugcagagcgccggcuuccccaccggccugaccuacagccagcugaugacccugaaggacagcaugaugcagcuggaccccagcgccaagaccuggaucgacaucgagggcagacccgaggaccccguggagaucgcccuguaccagcccaugagcggcugcuacauccacuucuucagagagcccaccgaccugaagcaguucaagcaggacgccaaguacagccacggcaucgacgugaccgaccuguuccccgcccagcccggccugaccagcgccgugaucgaggcccugcccagaaacauggugcugaccugccagggcagcgacgacaucaagagacugcuggacagccagggcagaagagacaucaagcugaucgacaucgcccugagcaaggccgacagcagaagauucgagaacgccgugugggaccagugcaaggaccugugccacaugcacaccggcguggugguggagaagaagaagagaggcggcaaggaggagaucaccccccacugcgcccugauggacugcaucauguacgacgccgccgugagcggcggccugaacauccccgugcugagagccgugcugcccagagacaugguguucagaaccagcagccccaagguggugcugugaggacuaguaauaaggaaacuguaugaaugucugugggcaggaagugaagagauccuucuguaaagguuuuuggaauuaugucugcugaauaauaaacuuuuuugaaauaauaaaucugguagaaaaaugagaucucaaaggcucuuuucagagccaccaaaaaaaaaaaaaaaaaaaaaaaaaaaaaaaaaaaaaaaaaaaaaaaaaaaaaaaaaaaaaaaaagaauu

SEQ ID NO: 18770 - RNA, 2078 nt, Artificial Sequence
  mRNA product Design b-4 (hSL-A64-N5) comprising derived and/or modified sequence from LASV(LASV254-NIG-2011;Clade II)__AIT17675__SP-HsPLAT_NP(2-569) (opt4)
aggagagucccgcagucggcguccagcggcucugcuuguucgugugugugucguugcaggccuuauucaagcuuaccauggacgccaugaagagaggccugugcugcgugcugcugcugugcggcgccguguucgugagccccagcgccagcaaggaggugaagagcuuccuguggacccagagccugagaagagagcugagcggcuacugcagcagcaucaagcugcagguggugaaggacgcccaggcccugcugcacggccuggacuucagcgaggugagcaacgugcagagacugaugagaaagcagaagagagacgacagcgaccugaagagacugagagaccugaaccaggccgugaacaaccugguggagcugaagagcacccagcagaagagcgugcugagagugggcacccugaccagcgacgaccugcugacccuggccgccgaccuggagaagcugaagagcaaggugaucagaaccgagagaccccugagcagcggcguguacaugggcaaccugagcacccagcagcuggagcagagaagagcccugcugaacaugaucggcauggugggcggcgcccagggcacccagcccggcagagacggcguggugagagugugggacgugaagaaccccgaccugcugaacaaccaguucggcaccaugcccagccugacccuggccugccugaccaagcagggccagguggaccugaacgacgccgugcuggcccugaccgaccugggccugaucuacaccgccaaguaccccaacagcagcgaccuggacagacugagccagagccaccccauccugaacaugguggacaccaagaagagcagccugaacaucagcggcuacaacuucagccugggcgccgccgugaaggccggcgccugcaugcuggacggcggcaacaugcuggagaccaucaaggugaccccccagaccauggacggcauccugaagagcauccugaaggugaagaagagccugggcauguucgugagcgacacccccggcgagagaaaccccuacgagaacauccuguacaagaucugccugagcggcgacggcuggcccuacaucgccagcagaaccagcaucgugggcagagccugggagaacaccaucguggaccuggagagcgacggcaagccccagaaggugggcaccgccggcagcaacaagagccugcagagcgccggcuuccccaccggccugaccuacagccagcugaugacccugaaggacagcaugaugcagcuggaccccagcgccaagaccuggaucgacaucgagggcagacccgaggaccccguggagaucgcccuguaccagcccaugagcggcugcuacauccacuucuucagagagcccaccgaccugaagcaguucaagcaggacgccaaguacagccacggcaucgacguggccgaccuguuccccgcccagcccggccugaccagcgccgugaucgaggcccugcccagaaacauggugcugaccugccagggcagcgacgacaucaagagacugcuggacagccagggcagaagagacaucaagcugaucgacaucgcccugagcaaggccgacagcagaagauucgagaacgccgugugggaccagugcaaggaccugugccacaugcacaccggcguggugguggagaagaagaagagaggcggcaaggaggagaucaccccccacugcgcccugauggacugcaucauguacgacgccgccgugagcggcggccugaacauccccgugcugagagccgugcugcccagagacaugguguucagaaccagcagccccaagguggugcugugaggacuaguaauaaggaaacuguaugaaugucugugggcaggaagugaagagauccuucuguaaagguuuuuggaauuaugucugcugaauaauaaacuuuuuugaaauaauaaaucugguagaaaaaugagaucucaaaggcucuuuucagagccaccaaaaaaaaaaaaaaaaaaaaaaaaaaaaaaaaaaaaaaaaaaaaaaaaaaaaaaaaaaaaaaaaagaauu

SEQ ID NO: 18771 - RNA, 2078 nt, Artificial Sequence
  mRNA product Design b-4 (hSL-A64-N5) comprising derived and/or modified sequence from LASV(Nig08-04;Clade II)__ADU56611__SP-HsPLAT_NP(2-569) (opt4)
aggagagucccgcagucggcguccagcggcucugcuuguucgugugugugucguugcaggccuuauucaagcuuaccauggacgccaugaagagaggccugugcugcgugcugcugcugugcggcgccguguucgugagccccagcgccagcaaggaggugaagagcuuccuguggacccagagccugagaagagagcugagcggcuacugcagcaacaucaagcugcagguggugaaggacgcccaggcccugcugcacggccuggacuucagcgaggugagcaacgugcagagacugaugagaaagcagaagagagacgacggcgaccugaagagacugagagaccugaaccaggccgugaacaaccugguggagcugaagagcacccagcagaagagcgugcugagagugggcacccugaccagcgacgaccugcugacccuggccgccgaccuggagaagcugaagagcaaggugaucagaaccgagagaccccugagcagcggcguguacaugggcaaccugagcacccagcagcuggagcagagaaaggcccugcugagcaugaucggcauggugggcggcgcccagggcacccagcccggcagagacggcguggugagagugugggacgugaagaaccccgaccugcugaacaaccaguucggcaccaugcccagccugacccuggccugccugaccaagcagggccagguggaccugaacgacgccgugcuggcccugaccgaccugggccugaucuacaccgccaaguaccccaacagcagcgaccuggacagacugagccagagccaccccauccugaacaugguggacaccaagaagagcagccugaacaucagcggcuacaacuucagccugggcgccgccgugaaggccggcgccugcaugcuggacggcggcaacaugcuggagaccaucaaggugaccccccagaccauggacggcauccugaagagcauccugaaggugaagagaagccugggcauguucgugagcgacacccccggcgagagaaaccccuacgagaacauccuguacaagaucugccugagcggcgacggcuggcccuacaucgccagcagaaccagcaucgugggcagagccugggagaacaccaccguggaccuggagagcgacggcaagccccagaaggugggcaccgccggcagcaacaagagccugcagagcgccggcuuccccaccggccugaccuacagccagcugaugacccugaaggacagcaugaugcagcuggaccccagcgccaagaccuggaucgacaucgagggcagacccgaggaccccguggagaucgcccuguaccagcccaugagcggcugcuacauccacuucuucagagagcccaccgaccugaagcaguucaagcaggacgccaaguacagccacggcaucgacgugaccgaccuguucagcgcccagcccggccugaccagcgccgugaucgaggcccugcccagaaacauggugcugaccugccagggcagcgacgacaucaagaagcugcuggacagccagggcagaagagacaucaagcugaucgacaucagccugaacaaggccgacagcagaagauucgagaacgccgugugggaccagugcaaggaccugugccacaugcacaccggcguggugguggagaagaagaagagaggcggcaaggaggagaucaccccccacugcgcccugauggacugcaucauguucgacgccgccgugagcggcggccugaacauccccauccugagagccgugcugcccagagacaugguguucagaaccagcagccccaagguggugcugugaggacuaguaauaaggaaacuguaugaaugucugugggcaggaagugaagagauccuucuguaaagguuuuuggaauuaugucugcugaauaauaaacuuuuuugaaauaauaaaucugguagaaaaaugagaucucaaaggcucuuuucagagccaccaaaaaaaaaaaaaaaaaaaaaaaaaaaaaaaaaaaaaaaaaaaaaaaaaaaaaaaaaaaaaaaaagaauu

SEQ ID NO: 18772 - RNA, 2081 nt, Artificial Sequence
  mRNA product Design b-4 (hSL-A64-N5) comprising derived and/or modified sequence from LASV(GA391;Clade III)__AAA46284__SP-HsPLAT_NP(2-570) (opt4)
aggagagucccgcagucggcguccagcggcucugcuuguucgugugugugucguugcaggccuuauucaagcuuaccauggacgccaugaagagaggccugugcugcgugcugcugcugugcggcgccguguucgugagccccagcgccagcaaggaggugagaagcugccuguggacccagagccugagaagagagcugagcggcuacugcagcaacaucaagcugcagguggugaaggacgcccaggcccugcugcacggccuggacuucagcgaggugagcaacgugcagagacugaugagaaagcagaagagagacgacggcgaccugaagagacugagagaccugaaccaggccgugaacaaccugguggagcugaagagcacccagcagaagagcgugcugagagugggcacccugagcagcgacgaccugcugauccuggccgccgaccuggagaagcugaagagcaaggugaccagaaccgagagaccccugagcagcggcguguacaugggcaaccugagcagccagcagcuggaccagagaagagcccugcugaacaugaucggcaugaccggcgugagcggcggcggcaagggcgccagcaacggcaucgugagagugugggacgugaagaacgccgagcugcugaacaaccaguucggcaccaugcccagccugacccuggccugccugaccaagcagggccagguggaccugaacgacgccgugcaggcccugaccgaccugggccugaucuacaccgccaaguaccccaacagcagcgaccuggacagacugagccagagccaccccauccugaacaugaucgacaccaagaagagcagccugaacaucagcggcuacaacuucagccugggcgccgccgugaaggccggcgccugcaugcuggacggcggcaacaugcuggagaccaucaaggugagcccccagaccauggacggcauccugaagagcauccugaaggugaagaagagccugggcauguucgugagcgacacccccggcgagagaaaccccuacgagaacauccuguacaagaucugccugagcggcgacggcuggagcuacaucgccagcagaaccagcaucgugggcagagccugggagaacaccgugguggaccuggagcaggacaacaagccccagaagaucggcaacggcggcagcaacaagagccugcagagcgccggcuucgccgccggccugaucuacagccagcugaugacccugaaggacuucaagugcuucaaccugauccccaacgccaagaccuggauggacaucgagggcagacccgaggaccccguggagaucgcccuguaccagcccagcagcggcugcuacgugcacuucuucagagagcccaccgaccugaagcaguucaagcaggacgccaaguacagccacggcagagacgugaccgaccuguucgccgcccagcccggccugaccagcgccgugaucgaggcccugcccagaaacauggugaucaccugccagggcagcgaggacaucagaaagcugcuggagagccagggcagaagagacaucaagcugaucgacaucacccugagcaaggccgacagcagaaaguucgagaacgccgugugggaccaguucaaggaccugugccacaugcacaccggcguggugguggagaagaagaagagaggcggcaaggaggagaucaccccccacugcgcccugauggacugcaucauguucgacgccgccgugagcggcggccuggacgccaaggugcugagaguggugcugcccagagacaugguguucagaaccagcacccccaagguggugcugugaggacuaguaauaaggaaacuguaugaaugucugugggcaggaagugaagagauccuucuguaaagguuuuuggaauuaugucugcugaauaauaaacuuuuuugaaauaauaaaucugguagaaaaaugagaucucaaaggcucuuuucagagccaccaaaaaaaaaaaaaaaaaaaaaaaaaaaaaaaaaaaaaaaaaaaaaaaaaaaaaaaaaaaaaaaaagaauu

SEQ ID NO: 18773 - RNA, 2078 nt, Artificial Sequence
  mRNA product Design b-4 (hSL-A64-N5) comprising derived and/or modified sequence from LASV(Nig08-A19;Clade III)__ADU56619__SP-HsPLAT_NP(2-569) (opt4)
aggagagucccgcagucggcguccagcggcucugcuuguucgugugugugucguugcaggccuuauucaagcuuaccauggacgccaugaagagaggccugugcugcgugcugcugcugugcggcgccguguucgugagccccagcgccagcaaggaggugaagagcuuccuguggacccagagccugagaagagagcugagcggcuacugcagcaacaucaagcugcagguggugaaggacgcccaggcccugcugcacggccuggacuucagcgaggugagcaacgugcagagacugaugagaaagcagaagagagacgacggcgaccugaagagacugagagaccugaaccaggccgugaacaaccugguggagcugaagagcacccagcagaagagcgugcugagagugggcacccugagcagcgacgaccugcuggugcuggccgccgaccuggagaagcugaagagcaagguggugagaaccgagagaccccugagcagcggcaucuacaugggcaaccugagcagccagcagcuggaccagagaaaggcccugcugaacaugaucggcaugaccggcggcaacggcggcagaaacaccaccagcgacggcaucgugagagugugggacgugaagaacgccgagcugcugaacaaccaguucggcaccaugcccagccugacccuggccugccugaccaagcagggccagguggaccugaacgacgccgugcaggcccugaccgaccugggccugaucuacaccgccaaguaccccaacagcagcgaccuggacagacuggcccagagccaccccauccugaacaugaucgacaccaagaagagcagccugaacaucagcggcuacaacuucagccugggcgccgccgugaaggccggcgccugcaugcuggacggcggcaacaugcuggagaccaucaaggugagcccccagaccauggacggcauccugaagagcauccugaaggugaagagaagccugggcauguucaucagcgacacccccggcgagagaaaccccuacgagaacauccuguacaagaucugccugagcggcgacggcuggcccuacaucgccagcagaaccagcaucgugggcagagccugggagaacaccgugguggaccuggagagcgacaacaagccccagaagaccggcaacggcggcagcaacaagagccugcagagcgccggcuucgccgccggccugaccuacagccagcugaugacccugaaggacagcaugcugcagcuggaccccaacgccaagaccuggauggacaucgagggcagacccgaggaccccguggagaucgcccuguaccagcccagcagcggcugcuacauccacuucuucagagagcccaccgaccugaagcaguucaagcaggacgccaaguacagccacggcaucgacgugaccgaccuguucgccgcccagcccggccugaccagcgccgugaucgaggcccugcccagaaacauggugaucaccugccagggcagcgaggacaucagaaagcugcuggagagccagggcagaagagacaucaagcugaucgacaucagccugagcaagguggacagcagaaaguucgagaacgccgugugggaccaguucaaggaccugugccacaugcacaccggcaucgugguggagaagaagaagagaggcggcaaggaggagaucaccccccacugcgcccugauggacugcaucauguucgacgccgccgugagcggcggcguggacgccaaggugcugagagccgugcugcccagagacaugguguucagaaccagcacccccaagguggugcugugaggacuaguaauaaggaaacuguaugaaugucugugggcaggaagugaagagauccuucuguaaagguuuuuggaauuaugucugcugaauaauaaacuuuuuugaaauaauaaaucugguagaaaaaugagaucucaaaggcucuuuucagagccaccaaaaaaaaaaaaaaaaaaaaaaaaaaaaaaaaaaaaaaaaaaaaaaaaaaaaaaaaaaaaaaaaagaauu

SEQ ID NO: 18774 - RNA, 2078 nt, Artificial Sequence
  mRNA product Design b-4 (hSL-A64-N5) comprising derived and/or modified sequence from LASV(G1180-SLE-2010;Clade IV)__AIT17169__SP-HsPLAT_NP(2-569) (opt4)
aggagagucccgcagucggcguccagcggcucugcuuguucgugugugugucguugcaggccuuauucaagcuuaccauggacgccaugaagagaggccugugcugcgugcugcugcugugcggcgccguguucgugagccccagcgccagcaaggagaucaagagcuuccuguggacccagagccugagaagagagcugagcggcuacugcagcaacaucaagcugcagguggugaaggacgcccaggcccugcugcacggccuggacuucagcgaggugagcaacgugcagagacugaugagaaaggagagaagagacgacaacgaccugaagagacugagagaccugaaccaggccgugaacaaccugguggagcugaagagcacccagcagaagagcauccugagagugggcacccugaccagcgacgaccugcugauccuggccgccgaccuggagaagcugaagagcaaggugaucagaaccgagagaccccugagcgccggcguguacaugggcaaccugagcagccagcagcuggaccagagaagagcccugcugagcaugaucggcaugagcagcggcaaccagagagcccaggccggcagagacggcguggugagagugugggacgugaagaacguggagcugcugaacaaccaguucggcaccaugcccagccugacccuggccugccugaccaagcagggccagguggaccugaacgacgccgugcaggcccugaccgaccugggccugaucuacaccgccaaguaccccaacaccagcgaccuggacagacugacccagagccaccccauccugaacaugaucgacaccaagaagagcagccugaacaucagcggcuacaacuucagccugggcgccgccgugaaggccggcgccugcaugcuggacggcggcaacaugcuggagaccaucaaggugagcccccagaccauggacggcauccugaagagcauccugaaggugaagaaggcccugggcauguucaucagcgacacccccggcgagagaaaccccuacgagaacauccuguacaagaucugccugagcggcgacggcuggcccuacaucgccagcagaaccagcaucaccggcagagccugggagaacaccgugguggaccuggagagcgacggcaagccccagaaggccggcagcaacaacagcaacaagagccugcagagcgugggcuucaccgccggccugaccuacagccagcugaugacccugaaggacgccaugcugcagcuggaccccaacgccaagaccuggauggacaucgagggcagacccgaggaccccguggagaucgcccuguaccagcccagcagcggcugcuacauccacuucuucagagagcccaccgaccugaagcaguucaagcaggacgccaaguacagccacggcaucgacgugaccgaccuguucgccgcccagcccggccugaccagcgccgugaucgacgcccugcccagaaacauggugaucaccugccagggcagcgacgacaucagaaagcugcuggagagccagggcagaaaggacaucaagcugaucgacaucgcccugagcaagaccgacagcagaaaguacgagaacgccgugugggaccaguacaaggaccugugccacaugcacaccggcguggugguggagaagaagaagagaggcggcaaggaggagaucaccccccacugcgcccugauggacugcaucauguucgacgccgccgugagcggcggccugaacaccagcgugcugagagccgugcugcccagagacaugguguucagaaccagcacccccagaguggugcugugaggacuaguaauaaggaaacuguaugaaugucugugggcaggaagugaagagauccuucuguaaagguuuuuggaauuaugucugcugaauaauaaacuuuuuugaaauaauaaaucugguagaaaaaugagaucucaaaggcucuuuucagagccaccaaaaaaaaaaaaaaaaaaaaaaaaaaaaaaaaaaaaaaaaaaaaaaaaaaaaaaaaaaaaaaaaagaauu

SEQ ID NO: 18775 - RNA, 2078 nt, Artificial Sequence
  mRNA product Design b-4 (hSL-A64-N5) comprising derived and/or modified sequence from LASV(G1442-SLE-2011;Clade IV)__AIT17181__SP-HsPLAT_NP(2-569) (opt4)
aggagagucccgcagucggcguccagcggcucugcuuguucgugugugugucguugcaggccuuauucaagcuuaccauggacgccaugaagagaggccugugcugcgugcugcugcugugcggcgccguguucgugagccccagcgccagcaaggaggugaagagcuuccuguggacccagagccugagaagagagcugagcggcuacugcagcaacaucaagcugcagguggugaaggacgcccaggcccugcugcacggccuggacuucagcgaggugagcaacgugcagagacugaugagaaagcagagaagagacgacaacgaccugaagagacugagagaccugaaccaggccgugaacaaccugguggagcugaagagcacccagcagaagagcgugcugagagugggcacccugaccagcgacgaccugcuggugcuggccgccgaccuggagaagcugaagagcaaggugaucagaaccgagagaccccugagcgccggcguguacaugggcaaccugagcagccagcagcuggaccagagaagagcccugcugaacaugaucggcaugagcggcggcauccagggcaccagaaccggcagagacggcguggugagagugugggacgugaagaacgccgaccugcugaacaaccaguucggcaccaugcccagccugacccuggccugccugaccaagcagggccagguggaccugaacgacguggugcaggcccugaccgaccugggccugaucuacaccgccaaguaccccaacgccagcgaccuggacagacugacccagagccaccccauccugaacaugaucgacaccaagaagagcagccugaacaucagcggcuacaacuucagccugggcgccgccgugaaggccggcgccugcaugcuggacggcggcaacaugcuggagaccaucaaggugagcccccagaccauggacggcauccugaagagcauccugaaggugaagaagacccugggcauguucaucagcgacacccccggcgagagaaaccccuacgagaacauccuguacaagaucugccugagcggcgacggcuggcccuacaucgccagcagaaccagcaucaccggcagagccugggagaacaccgugguggaccuggagagcgacggcaagccccagaaggccggcagcaacaacagcaacaagagccugcagagcgccggcuucgccgccggccugaccuacagccagcugaugacccugaaggacgccaugcugcagcuggaccccaacgccaagaccuggauggacaucgagggcagacccgaggaccccguggagaucgcccuguaccagcccagcagcggcugcuacauccacuucuucagagagcccaccgaccugaagcaguucaagcaggacgccaaguacagccacggcaucgacgugaccgaccuguucgccgcccagcccggccugaccagcgccgugaucgaggcccugcccagaaacauggugaucaccugccagggcagcgacgacaucaagaagcugcuggagagccagggcagaaaggacaucaagcugaucgacaucgcccugagcaagaccgacagcagaaaguacgagaacgccgugugggaccaguacaaggaccugugccacaugcacaccggcguggugguggagaagaagaagagaggcggcaaggaggagaucaccccccacugcgcccugauggacugcaucauguucgacgccgccgugagcggcggccugaacacccuggugcugagagccgugcugcccagagacaugguguucagaaccagcacccccagaguggugcugugaggacuaguaauaaggaaacuguaugaaugucugugggcaggaagugaagagauccuucuguaaagguuuuuggaauuaugucugcugaauaauaaacuuuuuugaaauaauaaaucugguagaaaaaugagaucucaaaggcucuuuucagagccaccaaaaaaaaaaaaaaaaaaaaaaaaaaaaaaaaaaaaaaaaaaaaaaaaaaaaaaaaaaaaaaaaagaauu

SEQ ID NO: 18776 - RNA, 2078 nt, Artificial Sequence
  mRNA product Design b-4 (hSL-A64-N5) comprising derived and/or modified sequence from LASV(G3010-SLE-2013;Clade IV)__AIT17345__SP-HsPLAT_NP(2-569) (opt4)
aggagagucccgcagucggcguccagcggcucugcuuguucgugugugugucguugcaggccuuauucaagcuuaccauggacgccaugaagagaggccugugcugcgugcugcugcugugcggcgccguguucgugagccccagcgccagcaaggagaucaagagcuuccuguggacccagagccugagaagagagcugagcggcuacugcagcaacaucaagcugcagguggugaaggacgcccaggcccugcugcacggccuggacuucagcgaggugagcaacgugcagagacugaugagaaaggagagaagagacgacaacgaccugaagagacugagagaccugaaccaggccgugaacaaccugguggagcugaagagcacccagcagaagagcauccugagagugggcacccugaccagcgacgaccugcugauccuggccgccgaccuggagaagcugaagagcaaggugaccagaaccgagagaccccugagcgccggcguguacaugggcaaccugagcagccagcagcuggaccagagaagagcccugcugagcaugaucggcaugagcagcggcgugcagggcgccagagccggcagagacggcguggugagagugugggacgugaagaacgccgagcugcugaacaaccaguucggcaccaugcccagccugacccuggccugccugaccaagcagggccagguggaccugaacgacguggugcaggcccugaccgaccugggccugaucuacaccgccaaguaccccaacaccagcgaccuggacagacugacccagagccaccccauccugaacaugaucgacaccaagaagagcagccugaacaucagcggcuacaacuucagccugggcgccgccgugaaggccggcgccugcaugcuggacggcggcaacaugcuggagaccaucaaggugagcccccagaccauggacggcauccugaagagcauccugaaggugaagaaggcccugggcauguucaucagcgagacccccggcgagagaaaccccuacgagaacauccuguacaagaucugccugagcggcgacggcuggcccuacaucgccagcagaaccagcaucaccggcagagccugggagaacaccgugguggaccuggagagcgacggcaagccccagaaggccggcagcaacaacagcaacaagagccugcagagcgccggcuucaccgccggccugaccuacagccagcugaugacccugaaggacgccaugcugcagcuggaccccaacgccaagaccuggauggacaucgagggcagacccgaggaccccguggagguggcccuguaccagcccagcagcggcugcuacauccacuucuucagagagcccaccgaccugaagcaguucaagcaggacgccaaguacagccacggcaucgacgugaccgaccuguucgccgcccagcccggccugaccagcgccgugaucgacgcccugcccagaaacauggugaucaccugccagggcagcgacgacaucaagaagcugcuggagagccagggcagaaaggacaucaagcugaucgacaucgcccugagcaagaccgacagcagaaaguacgagaacgccgugugggaccaguacaaggaccugugccacaugcacaccggcguggugguggagaagaagaagagaggcggcaaggaggagaucaccccccacugcgcccugauggacugcaucauguucgacgccgccgugagcggcggccugaacaccagcgugcugagagccgugcugcccagagacaugguguucagaaccagcacccccagaguggugcugugaggacuaguaauaaggaaacuguaugaaugucugugggcaggaagugaagagauccuucuguaaagguuuuuggaauuaugucugcugaauaauaaacuuuuuugaaauaauaaaucugguagaaaaaugagaucucaaaggcucuuuucagagccaccaaaaaaaaaaaaaaaaaaaaaaaaaaaaaaaaaaaaaaaaaaaaaaaaaaaaaaaaaaaaaaaaagaauu

SEQ ID NO: 18777 - RNA, 2078 nt, Artificial Sequence
  mRNA product Design b-4 (hSL-A64-N5) comprising derived and/or modified sequence from LASV(G502-SLE-2009;Clade IV)__AIT17127__SP-HsPLAT_NP(2-569) (opt4)
aggagagucccgcagucggcguccagcggcucugcuuguucgugugugugucguugcaggccuuauucaagcuuaccauggacgccaugaagagaggccugugcugcgugcugcugcugugcggcgccguguucgugagccccagcgccagcaaggagaucaagagcuuccuguggacccagagccugagaagagagcugagcggcuacugcagcaacaucaagcugcagguggugaaggacgcccaggcccugcugcacggccuggacuucagcgaggugagcaacgugcagagacugaugagaaaggagagaagagacgacaacgaccugaagagacugagagaccugaaccaggccgugaacaaccugguggagcugaagagcacccagcagaagagcauccugagagugggcacccugaccagcgacgaccugcugauccuggccgccgaccuggagaagcugaagagcaaggugaucagaaccgagagaccccugagcgccggcguguacaugggcaaccugagcagccagcagcuggaccagagaagagcccugcugagcaugaucggcaugagcggcggcaaccagggcgugagagccggcaaggacggcguggugagagugugggacgugaagaacgccgagcugcugaacaaccaguucggcaccaugcccagccugacccuggccugccugaccaagcagggccagguggaccugaacgacgccgugcaggcccugaccgaccugggccugaucuacaccgccaaguaccccaacaccagcgaccuggacagacugacccagagccaccccauccugaacaugaucgacaccaagaagagcagccugaacaucagcggcuacaacuucagccugggcgccgccgugaaggccggcgccugcaugcuggacggcggcaacaugcuggagaccaucaaggugagcccccagaccauggacggcauccugaagagcauccugaaggugaagaaggcccugggcauguucaucagcgacacccccggcgagagaaaccccuacgagaacauccuguacaagaucugccugagcggcgacggcuggcccuacaucgccagcagaaccagcaucaccggcagagccugggagaacaccgugguggaccuggagagcgacggcaagccccagaaggccggcagcaacaacagcaacaagagccugcagagcgccggcuucaccgccggccugaccuacagccagcugaugacccugaaggacgccaugcugcagcuggaccccaacaccaagaccuggauggacaucgagggcagacccgaggaccccguggagaucgcccuguaccagcccagcagcggcugcuacauccacuucuucagagagcccaccgaccugaagcaguucaagcaggacgccaaguacagccacggcaucgacgugaccgaccuguucgccgcccagcccggccugaccagcgccgugaucgacgcccugcccagaaacauggugaucaccugccagggcagcgacgacaucagaaagcugcuggagagccagggcagaaaggacaucaagcugaucgacaucgcccugaacaagaccgacagcagaaaguacgagaacgccgugugggaccaguacaaggaccugugccacaugcacaccggcguggugguggagaagaagaagagaggcggcaaggaggagaucaccccccacugcgcccugauggacugcaucauguucgacgccgccgugagcggcggccugaacaccagcgugcugagagccgugcugcccagagacaugguguucagaaccagcacccccagaguggugcugugaggacuaguaauaaggaaacuguaugaaugucugugggcaggaagugaagagauccuucuguaaagguuuuuggaauuaugucugcugaauaauaaacuuuuuugaaauaauaaaucugguagaaaaaugagaucucaaaggcucuuuucagagccaccaaaaaaaaaaaaaaaaaaaaaaaaaaaaaaaaaaaaaaaaaaaaaaaaaaaaaaaaaaaaaaaaagaauu

SEQ ID NO: 18778 - RNA, 2078 nt, Artificial Sequence
  mRNA product Design b-4 (hSL-A64-N5) comprising derived and/or modified sequence from LASV(G733-SLE-2010;Clade IV)__AIT17155__SP-HsPLAT_NP(2-569) (opt4)
aggagagucccgcagucggcguccagcggcucugcuuguucgugugugugucguugcaggccuuauucaagcuuaccauggacgccaugaagagaggccugugcugcgugcugcugcugugcggcgccguguucgugagccccagcgccagcaaggagaucaagagcuuccuguggacccagagccugagaagagagcugagcggcuacugcagcaacaucaagcugcagguggugaaggacgcccaggcccugcugcacggccuggacuucagcgaggugagcaacgugcagagacugaugagaaaggagagaagagacgacaacgaccugaagagacugagagaccugaaccaggccgugaacaaccugguggagcugaagagcacccagcagaagagcgugcugagagugggcacccugaccagcgacgagcugcuggugcuggccgccgaccuggagaagcugaagagcaaggugaucagaaccgagagaccccugagcgccggcguguacaugggcaaccugagcagccagcagcuggaccagagaagagcccugcugagcaugaucggcaugagcggcggcaaccagggcgccagaaccggcagagacggcguggugagagugugggacgugaagaacgccgagcugcugaacaaccaguucggcaccaugcccagccugacccuggccugccugaccaagcagggccagguggaccugaacgacgccgugcaggcccugaccgaccugggccugaucuacaccgccaaguaccccaacaccagcgaccuggacagacugacccagagccaccccauccugaacaugaucgacaccaagaagagcagccugaacaucagcggcuacaacuucagccugggcgccgccgugaaggccggcgccugcaugcuggacggcggcaacaugcuggagaccaucaaggugagcccccagaccauggacggcauccugaagagcauccugaaggugaagaaggcccugggcauguucaucagcgacacccccggcgagagaaaccccuacgagaacauccuguacaagaucugccugagcggcgacggcuggcccuacaucgccagcagaaccagcaucaccggcagagccugggagaacaccgugguggaccuggagagcgacggcaagccccagaaggccggcagcaacaacagcaacaagagccugcagagcgccggcuucaccgccggccugaccuacagccagcugaugacccugaaggacgccaugcugcagcuggaccccaacgccaagaccuggauggacaucgagggcagacccgaggaccccguggagaucgcccuguaccagcccagcagcggcugcuacauccacuucuucagagagcccaccgaccugaagcaguucaagcaggacgccaaguacagccacggcaucgacgugaccgaccuguucgccgcccagcccggccugaccagcgccgugaucgacgcccugcccagaaacauggugaucaccugccagggcagcgacgacaucagaaagcugcuggagagccagggcagaaaggacaucaagcugaucgacaucgcccugagcaagaucgacagcagaaaguacgagaacgccgugugggaccaguacaaggaccugugccacaugcacaccggcguggugguggagaagaagaagagaggcggcaaggaggagaucaccccccacugcgcccugauggacugcaucauguucgacgccgccgugagcggcggccugaacagccuggugcugagagccgugcugcccagagacaugguguucagaaccagcacccccagaguggugcugugaggacuaguaauaaggaaacuguaugaaugucugugggcaggaagugaagagauccuucuguaaagguuuuuggaauuaugucugcugaauaauaaacuuuuuugaaauaauaaaucugguagaaaaaugagaucucaaaggcucuuuucagagccaccaaaaaaaaaaaaaaaaaaaaaaaaaaaaaaaaaaaaaaaaaaaaaaaaaaaaaaaaaaaaaaaaagaauu

SEQ ID NO: 18779 - RNA, 2078 nt, Artificial Sequence
  mRNA product Design b-4 (hSL-A64-N5) comprising derived and/or modified sequence from MOPV/LASV reassortant(IGS-1;Clade IV)__AFY05578__SP-HsPLAT_NP(2-569) (opt4)
aggagagucccgcagucggcguccagcggcucugcuuguucgugugugugucguugcaggccuuauucaagcuuaccauggacgccaugaagagaggccugugcugcgugcugcugcugugcggcgccguguucgugagccccagcgccagcaaggagaucaagagcuuccuguggacccagagccugagaagagagcugagcggcuacugcagcaacaucaagcugcagguggugaaggacgcccaggcccugcugcacggccuggacuucagcgaggugagcaacgugcagagacugaugagaaaggagagaagagacgacaacgaccugaagagacugagagaccugaaccaggccgugaacaaccugguggagcugaagagcacccagcagaagagcauccugagagugggcacccugaccagcgacgaccugcugauccuggccgccgaccuggagaagcugagaagcaaggugaucagaaccgagagaccccugagcgccggcguguacaugggcaaccugagcagccagcagcuggaccagagaagagcccugcugaacaugaucggcaugagcggcggcaaccagggcgccagagccggcagagacggcguggugagagugugggacgugaagaacgccgagcugcugagcaaccaguucggcaccaugcccagccugacccuggccugccugaccaagcagggccagguggaccugaacgacgccgugcaggcccugaccgaccugggccugaucuacaccgccaaguaccccaacaccagcgaccuggacagacugacccagagccaccccauccugaacaugaucgacaccaagaagagcagccugaacaucagcggcuacaacuucagccugggcgccgccgugaaggccggcgccugcaugcuggacggcggcaacaugcuggagaccaucaaggugagcccccagaccauggacggcauccugaagagcauccugaaggugaagaaggcccugggcauguucaucagcgacacccccggcgagagaaaccccuacgagaacauccuguacaagaucugccugagcggcgacggcuggcccuacaucgccagcagaaccagcaucaccggcagagccugggagaacaccgugguggaccuggagagcgacggcaagccccagaaggccgacagcaacaacagcagcaagagccugcagagcgccggcuucaccgccggccugaccuacagccagcugaugacccugaaggacgccaugcugcagcuggaccccaacgccaagaccuggauggacaucgagggcagacccgaggaccccguggagaucgcccuguaccagcccagcagcggcugcuacauccacuucuucagagagcccaccgaccugaagcaguucaagcaggacgccaaguacagccacggcaucgacgugaccgaccuguucgccacccagcccggccugaccagcgccgugaucgacgcccugcccagaaacauggugaucaccugccagggcagcgacgacaucagaaagcugcuggagagccagggcagaaaggacaucaagcugaucgacaucgaccugagcaagaccgacagcagaaaguacgagaacgccgugugggaccaguacaaggaccugugccacaugcacaccggcguggugguggagaagaagaagagaggcggcaaggaggagaucaccccccacugcgcccugauggacugcaucauguucgacgccgccgugagcggcggccugaacaccagcgugcugagagccgugcugcccagagacaugguguucagaaccagcacccccagaguggugcugugaggacuaguaauaaggaaacuguaugaaugucugugggcaggaagugaagagauccuucuguaaagguuuuuggaauuaugucugcugaauaauaaacuuuuuugaaauaauaaaucugguagaaaaaugagaucucaaaggcucuuuucagagccaccaaaaaaaaaaaaaaaaaaaaaaaaaaaaaaaaaaaaaaaaaaaaaaaaaaaaaaaaaaaaaaaaagaauu

SEQ ID NO: 18780 - RNA, 2078 nt, Artificial Sequence
  mRNA product Design b-4 (hSL-A64-N5) comprising derived and/or modified sequence from LASV(LM765-SLE-2012;Clade IV)__AIT17815__SP-HsPLAT_NP(2-569) (opt4)
aggagagucccgcagucggcguccagcggcucugcuuguucgugugugugucguugcaggccuuauucaagcuuaccauggacgccaugaagagaggccugugcugcgugcugcugcugugcggcgccguguucgugagccccagcgccagcaaggagaucaagagcuuccuguggacccagagccugagaagagagcugagcggcuacugcagcaacaucaagcugcagguggugaaggacgcccaggcccugcugcacggccuggacuucagcgaggugagcaacgugcagagacugaugagaaaggagagaagagacgacaacgaccugaagagacugagagaccugaaccaggccgugaacaaccugguggagcugaagagcacccagcagaagagcauccugagagugggcacccugaccagcgacgaccugcugauccuggccgccgaccuggagaagcugaagagcaaggugaccagaaccgagagaccccugagcgccggcguguacaugggcaaccugagcagccagcagcuggaccagagaagagcccugcuggacaugaucggcaugagcggcagcaaccagggcgccagagccggcagagacggcguggugagagugugggacgugaagaacgccgagcugcugaacaaccaguucggcaccaugcccagccugacccuggccugccugaccaagcagggccagguggaccugaacgacgccgugcaggcccugaccgaccugggccugaucuacaccgccaaguaccccaacaccagcgaccuggacagacugacccagagccaccccauccugaacaugaucgacaccaagaagagcagccugaacaucagcggcuacaacuucagccugggcgccgccgugaaggccggcgccugcaugcuggacggcggcaacaugcuggagaccaucaaggugagcccccagaccauggacggcauccugaagagcauccugaaggugaagaaggcccugggcauguucaucagcgacgcccccggcgagagaaaccccuacgagaacauccuguacaagaucugccugagcggcgacggcuggcccuacaucgccagcagaaccagcaucaccggcagagccugggagaacaccgugguggaccuggagagcgacggcaagccccagaaggccggcagcaacggcagcaacaagagccugcagagcgccggcuucaccgccggccugaccuacagccagcugaugacccugaaggacgccaugcugcagcuggaccccaacgccaagaccuggauggacaucgagggcagacccgaggaccccguggagaucgcccuguaccagcccagcagcggcugcuacauccacuucuucagagagcccaccgaccugaagcaguucaagcaggacgccaaguacagccacggcaucgacgugaccgaccuguucgccgcccagcccggccugaccagcgccgugaucgacgcccugcccagaaacauggugaucaccugccagggcagcgacgacaucagaaagcuguucgagagccagggcagaaaggacaucaagcugaucgacaucgcccugagcaagaccgacagcagaaaguacgagaacgccgugugggaccaguacaaggaccugugccacaugcacaccggcaucgugguggagaagaagaagagaggcggcaaggaggagaucaccccccacugcgcccugauggacugcaucauguucgacgccgccgugagcggcggccugaacaccagcgugcugagagccgugcugcccagagacaugguguucagaaccagcacccccagaguggugcugugaggacuaguaauaaggaaacuguaugaaugucugugggcaggaagugaagagauccuucuguaaagguuuuuggaauuaugucugcugaauaauaaacuuuuuugaaauaauaaaucugguagaaaaaugagaucucaaaggcucuuuucagagccaccaaaaaaaaaaaaaaaaaaaaaaaaaaaaaaaaaaaaaaaaaaaaaaaaaaaaaaaaaaaaaaaaagaauu

SEQ ID NO: 18781 - RNA, 2078 nt, Artificial Sequence
  mRNA product Design b-4 (hSL-A64-N5) comprising derived and/or modified sequence from LASV(LM776-SLE-2012;Clade IV)__AIT17825__SP-HsPLAT_NP(2-569) (opt4)
aggagagucccgcagucggcguccagcggcucugcuuguucgugugugugucguugcaggccuuauucaagcuuaccauggacgccaugaagagaggccugugcugcgugcugcugcugugcggcgccguguucgugagccccagcgccagcaaggagaucaagagcuuccuguggacccagagccugagaagagagcugagcagcuacugcagcaacaucaagcugcagguggugaaggacgcccaggcccugcugcacggccuggacuucagcgaggugagcaacgugcagagacugaugagaaaggagagaagagacgacaacgaccugaagagacugagagaccugaaccaggccgugaacaaccugguggagcugaagagcacccagcagaagagcauccugagagugggcacccugaccagcgacgaccugcugauccuggccgccgaccuggagaagcugaagagcaaggugaccagaaccgagagaccccugagcgccggcguguacaugggcaaccugagcagccagcagcuggaccagagaagagcccugcugagcaugaucggcaugagcggcagcaaccagggcgccagagccggcagagacggcguggugagagugugggacgugaagaacgccgagcugcugaacaaccaguucggcaccaugcccagccugacccuggccugccugaccaagcagggccagguggaccugaacgacgccgugcaggcccugaccgaccugggccugaucuacaccgccaaguaccccaacaccagcgaccuggacagacugacccagagccaccccauccugaacaugaucgacaccaagaagagcagccugaacaucagcggcuacaacuucagccugggcgccgccgugaaggccggcgccugcaugcuggacggcggcaacaugcuggagaccaucaaggugagcccccagaccauggacggcauccugaagagcauccugaaggugaagaaggcccugggcauguucaucagcgacacccccggcgagagaaaccccuacgagaacauccuguacaagaucugccugagcggcgacggcuggcccuacaucgccagcagaaccagcaucaccggcagagccugggagaacaccgugguggaccuggagagcgacggcaagccccagaaggccggcagcaacaacagcaacaagagccugcagagcgccggcuucaccgccggccugaccuacagccagcugaugacccugaaggacgccaugcugcagcuggaccccaacgccaagaccuggauggacaucgagggcagacccgaggaccccguggagguggcccuguaccagcccagcagcggcugcuacauccacuucuucagagagcccaccgaccugaagcaguucaagcaggacgccaaguacagccacggcaucgacgugaccgaccuguucgccgcccagcccggccugaccagcgccgugaucgacgcccugcccagaaacauggugaucaccugccagggcagcgacgacaucagaaagcugcuggagagccagggcagaaaggacaucaagcugaucgacaucgcccugagcaagaccgacagcagaaaguacgagaacgccgugugggaccaguacaaggaccugugccacaugcacaccggcguggugguggagaagaagaagagaggcggcaaggaggagaucaccccccacugcgcccugauggacugcaucauguucgacgccgccgugagcggcggccugaacaccagcgugcugagagccgugcugcccagagacaugguguucagaaccagcacccccagaguggugcugugaggacuaguaauaaggaaacuguaugaaugucugugggcaggaagugaagagauccuucuguaaagguuuuuggaauuaugucugcugaauaauaaacuuuuuugaaauaauaaaucugguagaaaaaugagaucucaaaggcucuuuucagagccaccaaaaaaaaaaaaaaaaaaaaaaaaaaaaaaaaaaaaaaaaaaaaaaaaaaaaaaaaaaaaaaaaagaauu

SEQ ID NO: 18782 - RNA, 2078 nt, Artificial Sequence
  mRNA product Design b-4 (hSL-A64-N5) comprising derived and/or modified sequence from LASV(Mad39;Clade IV)__ANH09723__SP-HsPLAT_NP(2-569) (opt4)
aggagagucccgcagucggcguccagcggcucugcuuguucgugugugugucguugcaggccuuauucaagcuuaccauggacgccaugaagagaggccugugcugcgugcugcugcugugcggcgccguguucgugagccccagcgccagcaaggagaucaagagcuuccuguggacccagagccugagaagagagcugagcggcuacugcagcaacaucaagcugcagguggugaaggacgcccaggcccugcugcacggccuggacuucagcgaggugagcaacgugcagagacugaugagaaagcagagaagagacgacaacgaccugaagagacugagagaccugaaccaggccgugaacaaccugguggagcugaagagcacccagcagaagagcgugcugagagugggcacccugaccagcgacgaccugcugacccuggccgccgaccuggagaagcugaagagcaaggugaccagaaccgagagaccccugaccgccggcguguacaugggcaaccugagcagccagcagcuggaccagagaagagcccugcugaacaugaucggcaugagcggcggcaaccagggcgccagaaccggcagagacggcguggugagagugugggacgugaagaacgccgagcugcugaacaaccaguucggcaccaugcccagccugacccuggccugccugaccaagcagggccagguggaccugaacgacguggugcaggcccugaccgaccugggccugaucuacaccgccaaguaccccaacaccagcgaccuggacagacugacccagagccaccccauccugaacaugaucgacaccaacaagagcagccugaacaucagcggcuacaacuucagccugggcgccgccgugaaggccggcgccugcaugcuggacggcggcaacaugcuggagaccaucaaggugagcccccagaccauggacggcauccugaagagcauccugaaggugaagaagagccugggcauguucaucagcgacacccccggcgagagaaaccccuacgagaacauccuguacaagaucugccugagcggcgacggcuggcccuacaucgccagcagaaccagcaucaccggcagagccugggagaacaccgugguggaccuggagagcggcggcaagccccagaaggccggcagcaacaacagcaacaagagccugcagagcgccggcuucgccgccggccugaccuacagccagcugaugacccugaaggacgccaugcugcagcuggaccccaacgccaagaccuggauggacaucgagggcagacccgaggaccccguggagaucgcccuguaccagcccaucagcggcugcuacauccacuucuucagagagcccaccgaccugaagcaguucaagcaggacgccaaguacagccacggcaucgacgugaccgaccuguucgccgcccagcccggccugaccagcgccgugaucgaggcccugcccagaaacauggugaucaccugccagggcagcgacgacaucagaaagcuguucgagagccagggcagaaaggacaucaagcugaucgacaucgcccugagcaagaccgacagcagaaaguacgagaacgccgugugggaccaguacaaggaccugugccacaugcacaccggcguggugguggagaagaagaagaagggcggcaaggaggagaucaccccccacugcgcccugauggacugcaucauguucgacgccgccgugagcggcggccugaacacccuggugcugagagccgugcugcccagagacaugguguucagaaccagcacccccaagguggugcugugaggacuaguaauaaggaaacuguaugaaugucugugggcaggaagugaagagauccuucuguaaagguuuuuggaauuaugucugcugaauaauaaacuuuuuugaaauaauaaaucugguagaaaaaugagaucucaaaggcucuuuucagagccaccaaaaaaaaaaaaaaaaaaaaaaaaaaaaaaaaaaaaaaaaaaaaaaaaaaaaaaaaaaaaaaaaagaauu

SEQ ID NO: 18783 - RNA, 2078 nt, Artificial Sequence
  mRNA product Design b-4 (hSL-A64-N5) comprising derived and/or modified sequence from LASV(Z0947-SLE-2011;Clade IV)__AIT17841__SP-HsPLAT_NP(2-569) (opt4)
aggagagucccgcagucggcguccagcggcucugcuuguucgugugugugucguugcaggccuuauucaagcuuaccauggacgccaugaagagaggccugugcugcgugcugcugcugugcggcgccguguucgugagccccagcgccagcaaggagaucaagagcuuccuguggacccagagccugagaagagagcugagcggcuacugcagcaacaucaagcugcagguggugaaggacgcccaggcccugcugcacggccuggacuucagcgaggugagcaacgugcagagacugaugagaaaggagagaagagacgacaacgaccugaagagacugagagaccugaaccaggccgugaacaaccugguggagcugaagagcacccagcagaagagcauccugagagugggcacccugaccagcgacgaccugcugauccuggccgccgaccuggagaagcugaagagcaaggugaccagaaccgagagaccccugagcgccggcguguacaugggcaaccugagcagccagcagcuggaccagagaagagcccugcugaacaugaucggcaugagcggcagcaaccagggcgccagaaccggcagagacggcguggugagagugugggacgugaagaacgccgagcugcugaacaaccaguucggcaccaugcccagccugacccuggccugccugaccaagcagggccagguggaccugaacgacgccgugcaggcccugaccgaccugggccugaucuacaccgccaaguaccccaacaccagcgaccuggacagacugacccagagccaccccauccugaacaugaucgacaccaagaagagcagccugaacaucagcggcuacaacuucagccugggcgccgccgugaaggccggcgccugcaugcuggacggcggcaacaugcuggagaccaucaaggugagcccccagaccauggacggcauccugaagagcauccugaaggugaagaaggcccugggcauguucaucagcgacgcccccggcgagagaaaccccuacgagaacauccuguacaagaucugccugagcggcgacggcuggcccuacaucgccagcagaaccagcaucaccggcagagccugggagaacaccgugguggaccuggagagcgacggcaagccccagaaggccggcagcaacggcagcaacaagagccugcagagcgccggcuucaccgccggccugaccuacagccagcugaugacccugaaggacgccaugcugcagcuggaccccaacgccaagaccuggauggacaucgagggcagacccgaggaccccguggagaucgcccuguaccagcccagcagcggcugcuacauccacuucuucagagagcccaccgaccugaagcaguucaagcaggacgccaaguacagccacggcaucgacgugaccgaccuguucgccgcccagcccggccugaccagcgccgugaucgacgcccugcccagaaacauggugaucaccugccagggcagcgacgacaucagaaagcuguucgagagccagggcagaaaggacaucaagcugaucgacaucgcccugagcaagaccgacagcagaaaguacgagaacgccgugugggaccaguacaaggaccugugccacaugcacaccggcaucgugguggagaagaagaagagaggcggcaaggaggagaucaccccccacugcgcccugauggacugcaucauguucgacgccgccgugagcggcggccugaacaccagcgugcugagagccgugcugcccagagacaugguguucagaaccagcacccccagaguggugcugugaggacuaguaauaaggaaacuguaugaaugucugugggcaggaagugaagagauccuucuguaaagguuuuuggaauuaugucugcugaauaauaaacuuuuuugaaauaauaaaucugguagaaaaaugagaucucaaaggcucuuuucagagccaccaaaaaaaaaaaaaaaaaaaaaaaaaaaaaaaaaaaaaaaaaaaaaaaaaaaaaaaaaaaaaaaaagaauu

SEQ ID NO: 18784 - RNA, 2078 nt, Artificial Sequence
  mRNA product Design b-4 (hSL-A64-N5) comprising derived and/or modified sequence from LASV(Josiah;Clade IV)__NP_694869__SP-HsPLAT_NP(2-569) (opt5)
aggagagucccgcagucggcguccagcggcucugcuuguucgugugugugucguugcaggccuuauucaagcuuaccauggacgccaugaagagaggccugugcugugugcuccugcuuugcggggcugucuucguuagccccagcgccuccaaggagaucaaaucuuuccuguggacccagagccucagacgggaacuguccggcuacugcucuaacauuaagcugcaaguggucaaagacgcucaggcccugcuccacgggcuggauuuuagcgagguuuccaaugugcagcgccuuaugagaaaggaacggcgcgacgauaacgaccugaaaagacuccgggaucugaaucaggcggugaacaaucuggucgagcucaagucuacacaacaaaagagcauccugcgcgugggaacgcuuaccuccgacgaucugcucauucuggcugccgaccuugaaaaacuuaagagcaaaguuaucagaacagagcggccccucucugccggcguguauauggggaaccuguccagccagcagcuggaucagcgcagagcucuccugaauaugauuggaaugucuggcgggaaccagggagcccgggcuggccgcgacggcgucgugagaguuugggaugugaagaaugccgagcuucugaacaaucaguucgggaccaugccuucccucacacuggcgugucuuaccaaacagggacaagucgaccugaacgaugccgugcaggcucucacagaccugggccugaucuacaccgccaaguauccgaauacgagcgaccucgaucggcugacccagucucaucccauccuuaacaugauugacacaaagaaauccagccugaauaucuccggguacaacuuuucucucggagcugccgugaaggcgggcgccugcaugcuggaugggggaaacaugcuugaaaccauuaaagucagcccucaaacaauggacggcauccugaaguccauucucaaaguuaagaaagcucugggcauguucaucagcgauacccccggggagcgcaauccuuaugaaaacauucuguacaagaucugucucucuggagacggcuggcccuauaucgccuccagaacgagcauuacagggcgggcuugggagaauaccgugguggaucuggagucugacggaaagccucagaaagccgauagcaacaauuccucuaagagccuucaguccgccggcuuuacagcugggcugaccuacagccagcucaugacccugaaagacgcgaugcugcaacuugauccgaacgccaagacauggauggacaucgaaggaagacccgaggacccugucgaaauugcucucuaccagcccucuuccggcugcuauauccacuucuuucgcgagccuacggaucugaaacaguucaagcaggacgccaaguacagccauggcauugaugugaccgaccuguuugccacacaacccgggcucaccucugcuguuaucgaugcccugccgcggaauauggugaucacaugucagggauccgacgauauuagaaaacuucuggaaagccagggccgcaaggacaucaaacucauugauaucgcgcuguccaagaccgacucucggaaauaugagaacgcugucugggaucaguacaaggaccugugccacaugcauacgggggugguuguggagaagaaaaagagaggaggcaaagaagagauuacaccucacugugcccuuauggauugcaucauguucgacgccgcugucagcgggggccucaauaccuccgugcugcgcgccguccugccccgggacaugguguuuagaaccucuacaccucgcguugugcucugaggacuaguaauaaggaaacuguaugaaugucugugggcaggaagugaagagauccuucuguaaagguuuuuggaauuaugucugcugaauaauaaacuuuuuugaaauaauaaaucugguagaaaaaugagaucucaaaggcucuuuucagagccaccaaaaaaaaaaaaaaaaaaaaaaaaaaaaaaaaaaaaaaaaaaaaaaaaaaaaaaaaaaaaaaaaagaauu

SEQ ID NO: 18785 - RNA, 2078 nt, Artificial Sequence
  mRNA product Design b-4 (hSL-A64-N5) comprising derived and/or modified sequence from LASV(LP;Clade I)__AAF86702__SP-HsPLAT_NP(2-569) (opt5)
aggagagucccgcagucggcguccagcggcucugcuuguucgugugugugucguugcaggccuuauucaagcuuaccauggacgccaugaagagaggccugugcugugugcuccugcuuugcggggcugucuucguuagccccagcaacuccaaggagaucaaaucuuuccuguggacccagagccucagacgggaacuguccggcuacugcucuaauauuaagcuccaaguggucaaagacgcccaggcucugcuccacgggcuggauuuuagcgagguuuccaacgugcagcgccuuaugagaaagcagaaacgggacgaugccgaccugaagcgccucagagaucugaaucaagcggugaacaaucuggucgaacucaagucuacacagcagaaaaacgugcugcggguuggaacgcuuagcuccgacgaucugaucacccucgcugccgaccuggagaaacuuaaaagcaaggugauucgcacagaaagaccccugucuuccggcgucuauauggggaaucucagcucucagcaacuggaucagcggcgcgcccugcucuccaugaucggaaugagcggcgggccucagggaaacagaaccggcggcgacggggugguucgggugugggaugucaaaaaugcugagcugcuuaacaaucaguucggaacaaugccgucucugacccucgccugucugacaaagcaaggccagguggaccuuaacgaugcugugcaggcccugaccgaccucgggcugauuuacacggcgaaguaucccaauuccagcgaccuggauaugcucacccaaucccauccuauccugggaauggucgacacaaagaagucuagccuuaacaucuccggcuacaauuuuagccugggggccgcuguuaaagccggagcuugcaugcucgauggcggcaacaugcuggagaccauuaaggugucuccccagacaauggacgggauccuuaaauccauucugaaggugaaacgcagccucggaauguucaucucugauaccccuggcgaaagaaaccccuaugagaauauucuguacaagaucugucugagcggggaaggauggccuuauauugccucccggacgucuaucacaggccgcgcgugggagaacacccucgucgaccuggagagcgauaauaagccgcccaaacuuaacuccgccgggagcaauaagucucugcaggcugccggacucaacgcuggccugacauacucccagcugaugacccuuaaagacugcaugcuccaacuggauccuagcucuaagaccuggaucgacauugaaggcagacccgaggauccuguggaaaucgcccuguuucagcccuccagcggguguuacauucacuucuuucgggagccgacagaccucaaacaguucaagcaggacgccaaguauucccauggaaucgauguuacggaccuguuuucuacccaaccuggccuuacaagcgcugugauugaagcgcugcccagaaauaugguccuuaccugccagggguccgaugacaucaaaaagcugcuggagucucagggacgccgggauaucaaacuuauugacaucagccucuccaaggccgauagcagaaaauucgagaacgcugugugggaccaguacaaggaucugugucacaugcauacaggcguuguggucgaaaagaaaaagcgcgggggcaaagaggaaauuaccccucacugcgcccugcucgacuguaucauguuugaugccgcuacgacaggaucucugaauauuaccacccuucgggccgugcugcccagagacauggucuuccgcacauccacccccaaggugguucucugaggacuaguaauaaggaaacuguaugaaugucugugggcaggaagugaagagauccuucuguaaagguuuuuggaauuaugucugcugaauaauaaacuuuuuugaaauaauaaaucugguagaaaaaugagaucucaaaggcucuuuucagagccaccaaaaaaaaaaaaaaaaaaaaaaaaaaaaaaaaaaaaaaaaaaaaaaaaaaaaaaaaaaaaaaaaagaauu

SEQ ID NO: 18786 - RNA, 2078 nt, Artificial Sequence
  mRNA product Design b-4 (hSL-A64-N5) comprising derived and/or modified sequence from LASV(803213;Clade II)__AAF86704__SP-HsPLAT_NP(2-569) (opt5)
aggagagucccgcagucggcguccagcggcucugcuuguucgugugugugucguugcaggccuuauucaagcuuaccauggacgccaugaagagaggccugugcugugugcuccugcuuugcggggcugucuucguuagccccagcgccuccaaggaggugaaaucuuuccuguggacccagagccucagacgggaacuguccggcuacugcucuaacaucaaacuucaagucguuaaggacgcucaggcccugcuccacgggcuggauuuuagcgaggugaauaacgugcagcgccuuaugagaaagcagaaacgggacgauggagaccugaagcgccucagagaucugaaucaagcggucaacaaucugguggaacucaaguccacacagcagaaaucuauucugcggguuggcacgcuuaccagcgacgaucugcucacacuggcugccgaccuugagaagcugaaauccaaggugauccgcaccgaaagaccccucagcucuggggucuauaugggaaaccuguccacacagcaacuggagcagcggcgcgcccuccugaauaugauuggcauggugggaggagcucagggcacccagccuggcagagaugggguugugcgggucugggacgugaaaaacccggaucuucugaauaaccaauucggaacaaugcccagccucacccuggccugucuuacgaagcagggccagguggaccugaaugaugcuguccucgcccugaccgaccuggggcucaucuacacagcgaaguauccuaacucuuccgaccuggaucgccuuagccaaucucaucccauucugaauaugguugacaccaaaaaguccagccucaacaucuccggauacaauuuuucucugggcgccgcugugaaagccggggcuugcaugcuugauggaggcaacaugcuggagacaaucaaggugaccccucagacgauggacggcauucucaaaagcauccugaaggucaaaagaucccuggggauguucgugagcgauacacccggagaacggaacccuuaugagaauauucucuacaagaucugucugucuggcgacggguggccguauauugccucccgcaccagcaucguugggagagcgugggaaaacacaaccguggaucuugagucugacggcaagccccagaaagucgggaccgccggaagcaauaagucccugcagucugcuggcuuuccuacaggccucacguacagccaacugaugacccugaaagauuccaugaugcagcuugaccccagcgccaagacauggauugauaucgaggggcggccugaagaccccguggagaucgcucucuaccagccgaugucuggaugcuauauucacuucuuuagagaaccuaccgaccugaaacaguucaagcaagaugccaaguacucccauggcaucgacguugccgaucuguuucccgcucagccugggcucacaagcgcggugauugaggcccugccccgcaacaugguccuuaccugucagggaucugacgauaucaaaaagcugcucgacucccagggccggagagauauuaaacugaucgacaucagccuguccaagguggauucucgcaaauucgaaaaugcugucugggaccaaugcaaggaucuuugucacaugcauacgggggugguuguggagaagaaaaagcggggcggaaaagaggaaauuacaccccacugcgcccucauggacuguaucauguuugaugccgcugucagcggcgggcugaacauuccugugcugagagccguucucccgcgcgacaugguguuccggaccuccucucccaaggucgugcugugaggacuaguaauaaggaaacuguaugaaugucugugggcaggaagugaagagauccuucuguaaagguuuuuggaauuaugucugcugaauaauaaacuuuuuugaaauaauaaaucugguagaaaaaugagaucucaaaggcucuuuucagagccaccaaaaaaaaaaaaaaaaaaaaaaaaaaaaaaaaaaaaaaaaaaaaaaaaaaaaaaaaaaaaaaaaagaauu

SEQ ID NO: 18787 - RNA, 2081 nt, Artificial Sequence
  mRNA product Design b-4 (hSL-A64-N5) comprising derived and/or modified sequence from LASV(GA391;Clade III)__CAA36646__SP-HsPLAT_NP(2-570) (opt5)
aggagagucccgcagucggcguccagcggcucugcuuguucgugugugugucguugcaggccuuauucaagcuuaccauggacgccaugaagagaggccugugcugugugcuccugcuuugcggggcugucuucguuagccccagcgccuccaaggaggugagaucuuuccuguggacccagagccuccggcgcgaacuguccggcuacugcucuaacaucaaacuucaagucguuaaggacgcucaggcccugcuccacgggcuggauuuuagcgagguguccaaugugcagagacuuaugcggaaacagaagcgcgacgauggagaccugaaaagacuccgggaucugaaccaagcggucaauaaccugguggaacucaagucuacacagcagaaaagcguucugcgcgugggcacgcuuuccagcgacgaucugcucauucuggcugccgaccuugagaaacugaagucuaaagucaccagaacagaacggccccucuccagcgggguguauaugggaaaucugucuucccagcaacuggaucagcgcagagcccuccugaacaugaucggcaugaccgggguuagcggaggcggcaagggggcuucugacggaauugugcgggucugggaugugaaaaaugccgagcuucugaacaaucaguucggcacaaugccuucccucacccuggcuugucuuacaaagcaggggcaaguggaccugaacgaugccguccaggcgcucaccgaccugggacugaucuacacggccaaguauccgaauagcuccgaccucgaucgccugucucagagccaucccauucuuaacaugaucgacaccaaaaaguccagccugaauaucucuggcuacaacuuuucccucggggcugccguuaaagcuggagccugcaugcuggauggcggcaauaugcuugagacaauuaaggugagcccucaaaccauggacgggauccugaaaucuauucucaaggugaaaaagagccugggaauguucgucuccgauacacccggcgaaagaaacccuuaugagaacauccuguacaagauuugucucucuggggacggauggcccuauaucgcgagccggaccuccauugugggccgcgccugggaaaauacgguuguggaucuggagcaggacaacaaaccucagaagaucgggaauggaggcagcaacaaaucucuucaguccgcuggcuuugccgcugggcugacauacagccaacucaugacccugaaggauuucaaaugcuuuaaucugaucccgaacgccaagacauggauggacauugagggaagacccgaagauccugucgagaucgcccuuuaccagcccucuuccggcuguuaugugcacuucuuucgggaaccuaccgaccucaagcaguucaaacaggacgcuaaguacagccaugggauugauguuaccgaccuguuugcggcccaacccggacugacauccgcugugaucgaggcccucccgagaaauauggucauuacgugccagggcucugaagauauccgcaaacugcuugagagccaggggcggagagacaucaagcugauugauaucacccucuccaaagccgacucucgcaaguucgagaacgcugugugggaucaguuuaaggaccugugucacaugcauacaggcgucgugguugaaaagaagaaacggggaggcaaggaggaaauuaccccucacugcgcccugauggauuguaucauguucgacgcggcugugagcgggggacuugaugccaaaguccucagagugguucugccccgcgacaugguguuccggacauccaccccuaaggucgugcugugaggacuaguaauaaggaaacuguaugaaugucugugggcaggaagugaagagauccuucuguaaagguuuuuggaauuaugucugcugaauaauaaacuuuuuugaaauaauaaaucugguagaaaaaugagaucucaaaggcucuuuucagagccaccaaaaaaaaaaaaaaaaaaaaaaaaaaaaaaaaaaaaaaaaaaaaaaaaaaaaaaaaaaaaaaaaagaauu

SEQ ID NO: 18788 - RNA, 2078 nt, Artificial Sequence
  mRNA product Design b-4 (hSL-A64-N5) comprising derived and/or modified sequence from LASV(AV;Clade V)__CCA30315__SP-HsPLAT_NP(2-569) (opt5)
aggagagucccgcagucggcguccagcggcucugcuuguucgugugugugucguugcaggccuuauucaagcuuaccauggacgccaugaagagaggccugugcugugugcuccugcuuugcggggcugucuucguuagccccagcgccuccaaggaggugaaaucuuuccuguggacccagagccucagacgggaacuguccggcuacugcucuaacaucaaacuucaagucguuaaggacgcucaggcccugcuccacgggcuggauuuuagcgagguguccaaugugcagcgccuuaugagaaagcagcggcgcgacgauucugaccugaaaagacuccgggaucugaaccaagcggucaauaaccugguggaacucaagagcacacagcagaaguccguucugcgcgugggaacgcuuagcucugacgaucugcucacccuggcugccgaccuugagaaacugaaguccaaagucacaagaaccgaacggccccucagcucuggcguguauauggggaaucuguccagccagcaacuggaucagcgcagagcccuccugaaccuuauuggaaugacaaauggcucucaggggucccaggcuggacgggacggcguugugcgcgucugggaugugaagaacgccgagcugcucaauaaccaauucggcaccaugccuagccugacacuugcuugucugaccaaacagggacagguggaccucaaugaugucguucaagcccugacggaccuggggcucaucuacaccgcgaaguauccgaacacauccgaccuggauagacuuacccagucucaucccauucugaauaugaucgacacaaagaaaagcucccucaacauuagcggcuacaauuuuucucugggggccgcugugaaggccggagcuugcaugcuugauggcgggaacaugcuggagaccaucaaaguguccccucagagcauggacggaauccucaagucuauucugaaagucaagcgggcccugggcauguucgugagcgauacgcccggcgaacgcaacccuuaugagaauauccucuacaaaauuugucuguccggggacggauggcccuauaucgcgucuagaacaagcauuguuggccgggccugggaaaacaccguggucgaucuugagacagacgggaagccucagaagaucggauccggcaauagcaacaaaucucugcaauccgcuggguuuagcgccggacucaccuacucucagcugaugacccugaaggaugcuaugcuucagcucgacccgaaugccaaaacauggauggauauugagggcagacccgaagacccuguggagguugcccuguaccagcccaucuccggcugcuauauccacuucuuucgcgaaccuacggaccugaagcaauucaaacaggaugcuaaguacagccaugggauugacaucgcggaucucuuugccgcucagcccggacugaccuccgccgugauugaggcccuuccgcggaacauggucaucacaugucagggcucugaagacauuaagaaacugcucgagagccaagggagaaaggauaucaaacugaucgacauugcucuguccaagaucgauucucgcaaauucgagaaugccgugugggaccaguauaaggaucuuugccacaugcauaccggagucgugguugaaaagaaaaagcggggcgggaaagaggaaauuacaccucacugugcgcucauggacugcaucauguuugaugcugccgugagcggcggacugaacacccugguccucagagccgugcugccccgcgacaugguuuuccggacguccacaccuagagugguccuuugaggacuaguaauaaggaaacuguaugaaugucugugggcaggaagugaagagauccuucuguaaagguuuuuggaauuaugucugcugaauaauaaacuuuuuugaaauaauaaaucugguagaaaaaugagaucucaaaggcucuuuucagagccaccaaaaaaaaaaaaaaaaaaaaaaaaaaaaaaaaaaaaaaaaaaaaaaaaaaaaaaaaaaaaaaaaagaauu

SEQ ID NO: 18789 - RNA, 2078 nt, Artificial Sequence
  mRNA product Design b-4 (hSL-A64-N5) comprising derived and/or modified sequence from LASV(Togo/2016/7082;Clade VI)__AMR44578__SP-HsPLAT_NP(2-569) (opt5)
aggagagucccgcagucggcguccagcggcucugcuuguucgugugugugucguugcaggccuuauucaagcuuaccauggacgccaugaagagaggccugugcugugugcuccugcuuugcggggcugucuucguuagccccagcaacuccaaggaggugaaaucuuuccuguggacccagagccucagacgggaacuguccggcuacugcucuaauaucaaacuucaagucguuaaagacgcccaggcucugcuccacgggcuggauuuuagcgagguguccaacgugcagcgccuuaugagaaagcagaaacgggacgauggagaccugaagcgccucagagaucugaaucaagccgucaacaaucugguggaacucaagucuguucagcagaaaagcauucugcgggugggcacacuuacguccgacgaucugcucacccuggcggcugaccuugagaagcugaaaagcaaggucacacgcaccgaaagaccccucucuuccgggguguauaugggaaaccugagcucucagcaacuggaucagcggcgcgcccuccuguccaugaucggcaugagcgggggaaaucagaacucucagccuaaaggcgacggcguugugagagucugggaugugaagaaugccgaccuucugaacaaucaauucgggacaaugccgucccucacccuggcuugucuuacaaagcagggacagguggaucugaacgacgccguccaagcucucaccgaccugggccugauuuacacggccaaauaucccaauagcuccgaucucgaccggcugucucagagccauccuauccuuaacaugauugauaccaagaaauccagccugaauaucucuggguacaacuuuucccucggagcggccaucaagacaggcgcuugcaugcuggacgggggaaacaugcuugagaccauuaaaguuacaccccagaccauggauggcauccucaagagcauucugaaagugaagcgcucucugggcauguucaucagcgacacgccuggggagagaaaucccuaugaaaacauucuguacaagaucugucucuccggagauggcuggccuuauauugccucucggacagcuaucaucgggcgcgccugggagaauaccguggucgaccuggaaagcgauuccaaaccgcagaagauuggaagcaacggcucuaauaaaucccuucaaagcgcgggguuugcccccggacugacauacucucagcucaugacccugaaggacuccaugcugcagcuugauccuaacgcuaaaaccuggaucgacauugagggcagacccgaggacccuguggaaguugcccucuuccagcccaucagcggcugcuacauucacuuuuuccgggagccgacagaucugaagcaauuuaagcaggacgcuaaauauucccaugggaucgaugugacggaccuguucgccgcccagccuggacucaccucugcugucaucgaagcgcugcccagaaauauggugcuuacaugucagggcagcgaugacauuaagaaacugcucgauucccaagggcgccgggacaucaagcugauugauguuucucugaacaaaaucgacagcagaaaguuugagaaugccgugugggaucaguacaaggaccuuugccacaugcauaccggagucguggucgaaaagaagaaaaagggcgggaaagaggagauuacaccucacugugcucuccuggauugcaucauguucgacgccgccguguccggcggacugaacgcuaccguucuccgcgccgugcugccccgggacauggucuuuagaacgagcucucccaaggugguucuuugaggacuaguaauaaggaaacuguaugaaugucugugggcaggaagugaagagauccuucuguaaagguuuuuggaauuaugucugcugaauaauaaacuuuuuugaaauaauaaaucugguagaaaaaugagaucucaaaggcucuuuucagagccaccaaaaaaaaaaaaaaaaaaaaaaaaaaaaaaaaaaaaaaaaaaaaaaaaaaaaaaaaaaaaaaaaagaauu

SEQ ID NO: 18790 - RNA, 2078 nt, Artificial Sequence
  mRNA product Design b-4 (hSL-A64-N5) comprising derived and/or modified sequence from LASV(KAK-428;Clade n.d. (VII))__ANH09741__SP-HsPLAT_NP(2-569) (opt5)
aggagagucccgcagucggcguccagcggcucugcuuguucgugugugugucguugcaggccuuauucaagcuuaccauggacgccaugaagagaggccugugcugugugcuccugcuuugcggggcugucuucguuagccccagcaacuccaaggaggugaaaucuuuccuguggacccagagccucagacgggaacuguccggcuacugcacaaauaucaaacuucaagucguuaaggacgcccaggcucugcuccacgggcuggauuuuucugaggugagcaacgugcagcgccuuaugagaaagcagaaacgggacgauaaugaccugaagcgccucagagaucugaaccaagccgucaauaaccugguggaacucaaguccguucagcagaaaucugugcugaaggucggaacgcuuaauagcgacgaucugcucacccuggcggcugaccuugagaaacugaaguccaaagugguucggacagaacgcccccucagcucuggcguguauauggggaaccuguccagccagcaacuggaucagagacgggcccuccugaauaugauuggaauggccggcgggucucagggaaaccagccuucccgcgacggcgucgugagagugugggaugucaagaaugcugaccuucugaacaaucaauucggcaccaugccgagccucacacuggccugucuuaccaagcaggggcagguugaucugaacgacguggugcucgcucugacagaccugggacucaucuacaccgccaaauaucccaauucuuccgaucuggaccggcuuagccaaaaccauccuguccugaacaugauugaugugaauaaguccucucucaacaucagcggcuacaauuuuucccugggggcggccguuaaagcuggagccugcaugcuugacggcgggaacaugcuggagacgauuaagaucagcccccagaccguggauggaauccucaaaucuauucugaaggucaaacgcgcucugggcauguucguguccgacacaccuggcgagagaaaucccuaugaaaacauccucuacaagguuugucugagcgggaauggauggccuuauauugccucucggaccagcaucgugggccgcgcgugggagaacacagucguggaucuugaauccaauaagaaccagccgaaagucgggaauaacggaucuaauaagaugcugcagagcuccggcuuugccaccgggcucacguacagccaacugaugacacugagagacucuaugcuucagcucgaucccaccgcuaaaacauggauugacaucgagggacggccugaggaucccguggaacuggcccuguuccagccuuccagcggcugcuacauucacuuuuucagagagcccaccgaccucaagcaguuuaaacaagacgcuaaguauucucauggcaucgauguuaacgaccuguucuccgcccagccggggcuuaccagcgccgugcuggaagcucucccucgcaauaugguccugacaugucagggauccgaugacauccggaagcugcuugauucucaggacagaaaagauauuaagcucaucgacauuagccuguccaaagcggaugcccgcaaguuugagaacgacgugugggaucaauucaaagaccugugccacaugcauacgggcaucguuguggaaaagaagaaaaagggagggaaacaggagaugacaccccacugugcucuccuggauugcauuauguuugacgccgccgucucuggcgggcuuaacgugccuacccugcgggcugugcuccccaccgacaugguuuucagaacaaucaccacgaaggucgugcugugaggacuaguaauaaggaaacuguaugaaugucugugggcaggaagugaagagauccuucuguaaagguuuuuggaauuaugucugcugaauaauaaacuuuuuugaaauaauaaaucugguagaaaaaugagaucucaaaggcucuuuucagagccaccaaaaaaaaaaaaaaaaaaaaaaaaaaaaaaaaaaaaaaaaaaaaaaaaaaaaaaaaaaaaaaaaagaauu

SEQ ID NO: 18791 - RNA, 2078 nt, Artificial Sequence; identical to SEQ ID NO: 18785
  mRNA product Design b-4 (hSL-A64-N5) comprising derived and/or modified sequence from LASV(Pinneo-NIG-1969;Clade I)__AIT17837__SP-HsPLAT_NP(2-569) (opt5)

SEQ ID NO: 18792 - RNA, 2078 nt, Artificial Sequence
  mRNA product Design b-4 (hSL-A64-N5) comprising derived and/or modified sequence from LASV(ISTH0009-NIG-2011;Clade II)__AIT17405__SP-HsPLAT_NP(2-569) (opt5)
aggagagucccgcagucggcguccagcggcucugcuuguucgugugugugucguugcaggccuuauucaagcuuaccauggacgccaugaagagaggccugugcugugugcuccugcuuugcggggcugucuucguuagccccagcguguccaaggaggucaaaucuuuccuguggacccagagccucagacgggaacuguccggcuacugcucuaacaucaaacuucaaguugugaaggacgcccaggcucugcuccacgggcuggauuuuagcgagguguccaauguccagcgccuuaugagaaagcagaaacgggacgauucugaccugaagcgccucagagaucugaaccaagccgugaauaaccugguugaacucaagagcacacagcagaaauccauucugcgggugggaacgcuuaccagcgacgaucugcucacacuggcggcugaccuugagaagcugaaaucuaaggucauccgcaccgaaagaccccucuccagcggcguguauauggggaaucugucuacacagcaacuggagcagcggcgcgcccuccugaacaugauuggaaugguuggcggggcccagggaacccagccuggcagagauggcgugguccgggugugggacgugaaaaauccggaucuucugaacaaucaauucgggacaaugcccucccucacccuggcuugucuuacgaagcagggacaggucgaccugaacgaugccguucucgcucugaccgaccugggccucaucuacacagccaaguauccuaauagcucugaccuggaucgccuuucccaaagccaucccauucugaacaugguggacaucaaaaaguccucucucaauaucagcggguacaacuuuucccugggagcggccgugaaagcuggcgccugcaugcuugaugggggaaauaugcuggagaccauuaaggucacaccucagaccauggacggcauccucaaaagcauucugaaggugaaaagaucucugggcauguucguuuccgauacgcccggggaacggaacccuuaugagaacauccucuacaagauuugucugagcggagacggcuggccguauaucgcuucucgcacaagcauuguggggagagccugggaaaauaccacagucgaucuugaguccgacggaaagccccagaaagugggcucugcggggagcaacaagucccugcagagcgccggauuuccuaccggccucaccuacucucaacugaugacacugaaagauuccaugaugcagcuugaccccagcgcuaagacguggaucgauaucgagggccggccugaagaccccguugagauugcccucuaccagccgaugucugggugcuauauccacuucuuuagagaaccuaccgaccugaaacaguucaagcaagaugcuaaguacucccauggaauugacguggccgaucuguuucccgcccagccuggccucacaagcgcugucaucgaggcgcugccccgcaauauggugcuuaccugucagggguccgacgauauuaaacggcugcucgacucucagggaagacgcgauaucaagcugaucgacauugcccugagcaaagcugauucccggagauucgaaaacgccgucugggaccaaugcaaggaucuuugucacaugcauacaggcgugguuguggagaaaaagaagcgcgggggcaaagaggaaaucacgccccacugcgcccucauggacuguauuauguaugaugcugccgucucuggaggccugaauaucccugugcugcgggcgguucucccgagagacaugguguuucgcaccagcucccccaaggucgugcugugaggacuaguaauaaggaaacuguaugaaugucugugggcaggaagugaagagauccuucuguaaagguuuuuggaauuaugucugcugaauaauaaacuuuuuugaaauaauaaaucugguagaaaaaugagaucucaaaggcucuuuucagagccaccaaaaaaaaaaaaaaaaaaaaaaaaaaaaaaaaaaaaaaaaaaaaaaaaaaaaaaaaaaaaaaaaagaauu

SEQ ID NO: 18793 - RNA, 2078 nt, Artificial Sequence
  mRNA product Design b-4 (hSL-A64-N5) comprising derived and/or modified sequence from LASV(ISTH2010-NIG-2012;Clade II)__AIT17483__SP-HsPLAT_NP(2-569) (opt5)
aggagagucccgcagucggcguccagcggcucugcuuguucgugugugugucguugcaggccuuauucaagcuuaccauggacgccaugaagagaggccugugcugugugcuccugcuuugcggggcugucuucguuagccccagcgccuccaaggaggugaaaucuuuccuguggacccagagccucagacgggaacuguccggcuacugcucuaacaucaaacuucaagucguuaaggacgcucaggcccugcuccacgggcuggauuuuagcgagguguccaaugugcagcgccuuaugagaaagcagaaacgggacgauucugaccugaagcgccucagagaucugaaccaagcggucaauaaccugguggaacucaagagcacacagcagaaauccauucugcggguuggaacgcuuaccagcgacgaucugcucacacuggcugccgaccuugagaagcugaaaucuaaggugauccgcaccgaaagaccccucuccagcggcgucuauauggggaaucugucuacacagcaacuggagcagcggcgcgcccuccugaaccuuauuggaauggugggcggggcucagggaacccagccuggcagagauggcguugugcgggucugggacgugaaaaauccggaucugcucaacaaucaauucgggacaaugcccucccugacccuugccugucugacgaagcagggacagguggaccucaacgaugcuguccuggcccugaccgaccucggccugaucuacacagcgaaguauccuaauagcucugaccuugaucgccugucccaaagccaucccauucucaacaugguugacaccaaaaaguccucucugaauaucagcggguuuaacuucucccuuggagccgcugugaaagccggcgcuugcaugcuggaugggggaaauaugcucgagacaaucaaggugaccccucagacgauggacggcauucugaaaagcauccugaaggucaaaaagucucucggcauguuuguguccgauacacccggggaaagaaacccuuacgagaacauucuguauaagaucugucuuagcggagacggcuggccguacauugccucucggaccagcaucguugggcgcgcgugggaaaauacaaccguggaucuggaguccgacggaaaaccccacaaggucggcaccgccgggucuaacaaaagccuccaguccgcuggauucccuacaggccugacguauagccagcugaugacccuuaaggauucuaugaugcaacucgaccccuccgccaaaacauggauugauaucgagggcagaccugaagaccccguggagaucgcucuguaccagccgaugagcgggugcuacauucacuuuuuccgggaaccuaccgaccugaagcaguuuaagcaggaugccaaauauucucauggaaucgacguugccgaucucuuccccgcucaaccuggccugacauccgcggugauugaggcccuucccagaaauaugguccugaccugucaggggagcgacgauaucaagcgccuccuggacucccagggacggagagauauuaaacugaucgacaucgcucuuucuaaggccgauagccgccgguuugaaaacgccgugugggaccagugcaaagaucucugucauaugcacacgggcgucgugguugagaagaagaaaagagggggcaaggaggaaauuacaccccacugcgcucugauggacuguaucauguacgaugccgcgguguccggaggccugaauauuccuguccuccgcgcugugcugccgcgggacaugguuuucagaaccucuagccccaaagugguccuuugaggacuaguaauaaggaaacuguaugaaugucugugggcaggaagugaagagauccuucuguaaagguuuuuggaauuaugucugcugaauaauaaacuuuuuugaaauaauaaaucugguagaaaaaugagaucucaaaggcucuuuucagagccaccaaaaaaaaaaaaaaaaaaaaaaaaaaaaaaaaaaaaaaaaaaaaaaaaaaaaaaaaaaaaaaaaagaauu

SEQ ID NO: 18794 - RNA, 2078 nt, Artificial Sequence
  mRNA product Design b-4 (hSL-A64-N5) comprising derived and/or modified sequence from LASV(Lassa virus/H.sapiens-wt/NGA/2015/ISTH_0543;Clade II)__AVO03640__SP-HsPLAT_NP(2-569) (opt5)
aggagagucccgcagucggcguccagcggcucugcuuguucgugugugugucguugcaggccuuauucaagcuuaccauggacgccaugaagagaggccugugcugugugcuccugcuuugcggggcugucuucguuagccccagcgccuccaaggaggugaaaucuuuccuguggacccagagccucagacgggaacuguccggcuacugcucuaacaucaaacuucaagucguuaaggacgcucaggcccugcuccacgggcuggauuuuagcgagguguccaaugugcagcgccuuaugagaaagcagaaacgggacgauucugaccugaagcgccucagagaucugaaccaagcggucaauaaccugguggaacucaagagcacacagcagaaauccauucugcggguuggaacgcuuaccagcgacgaucugcucacacuggcugccgaccuugagaagcugaaaucuaaggugauccgcaccgaaagaccccucuccagcggcgucuauauggggaaucugucuacacagcaacuggagcagcggcgcgcccuccugaacaugauuggaauggugggcggggcucagggaacccagccuggcagagauggcguugugcgggucugggacgugaaaaauccggaucuucugaacaaucaauucgggacaaugcccucccucacccuggccugucuuacgaagcagggacagguggaccugaacgaugcuguccucgcccugaccgaccugggccucaucuacacagcgaaguauccuaauagcucugaccuggaucgccuuucccaaagccaucccauucugaacaugguugacaccaaaaaguccucucucaauaucagcggguacaacuuuucccugggagccgcugugaaagccggcgcuugcaugcuugaugggggaaauaugcuggagacaaucaaggugaccccucagacgauggacggcauucucaaaagcauccugaaggucaaaaagucucugggcauguucguguccgauacacccggggaaagaaacccuuaugagaacauucucuacaagaucugucugagcggagacggcuggccguauauugccucucggaccagcaucguugggcgcgcgugggaaaauacaaccguggaucuugaguccgacggaaaaccccagaaggucggcucugccgggagcaacaaaucccugcagagcgcuggauuuccuaccggccucacauacucucaacugaugacgcugaaggauuccaugaugcagcuugaccccagcgccaaaaccuggauugauaucgagggcagaccugaagaccccguggagaucgcucucuaccagccgaugucugggugcuauauucacuucuuucgggaaccuacagaccugaagcaguucaagcaagaugccaaauacucccauggaaucgacguugccgaucuguuucccgcucagccuggccucaccagcgcggugauugaggcccugcccagaaauaugguccuuacaugucagggguccgacgauaucaagcgccugcucgacucucagggacggaaagauauuaagcugaucgacaucgcucugagcaaagccgauuccagacgcuucgaaaacgccgugugggaccaaugcaaggaucuuugucacaugcauaccggcgucgugguugagaagaaaaagagagggggcaaagaggaaauuacgccccacugcgcucucauggacuguaucauguaugaugccgcggugucuggaggccugaauauuccuguccugcgggcugugcucccgcgcgacaugguuuuucggacaagcucccccaaggugguccugugaggacuaguaauaaggaaacuguaugaaugucugugggcaggaagugaagagauccuucuguaaagguuuuuggaauuaugucugcugaauaauaaacuuuuuugaaauaauaaaucugguagaaaaaugagaucucaaaggcucuuuucagagccaccaaaaaaaaaaaaaaaaaaaaaaaaaaaaaaaaaaaaaaaaaaaaaaaaaaaaaaaaaaaaaaaaagaauu

SEQ ID NO: 18795 - RNA, 2078 nt, Artificial Sequence
  mRNA product Design b-4 (hSL-A64-N5) comprising derived and/or modified sequence from LASV(Lassa virus/H.sapiens-wt/NGA/2016/ISTH_0009;Clade II)__AVO03572__SP-HsPLAT_NP(2-569) (opt5)
aggagagucccgcagucggcguccagcggcucugcuuguucgugugugugucguugcaggccuuauucaagcuuaccauggacgccaugaagagaggccugugcugugugcuccugcuuugcggggcugucuucguuagccccagcgccuccaaggaggugaaaucuuuccuguggacccagagccucagacgggaacuguccggcuacugcucuaacaucaaacuucaagucguuaaggacgcucaggcccugcuccacgggcuggauuuuagcgagguguccaaugugcagcgccuuaugagaaagcagaaacgggacgauucugaccugaagcgccucagagaucugaaccaagcggucaauaaccugguggaacucaagagcacacagcagaaauccauucugcggguuggaacgcuuaccagcgacgaucugcucacacuggcugccgaccuugagaagcugaaaucuaaggugauccgcaccgaaagaccccucuccagcggcgucuauauggggaaucugucuacacagcaacuggagcagcggcgcgcccuccugaacaugauuggaauggugggcggggcucagggaacccagccuggcagagauggcguugugcgggucugggacgugaaaaauccggaucuucugaacaaucaauucgggacaaugcccucccucacccuggccugucuuacgaagcagggacagguggaccugaacgaugcuguccucgcccugaccgaccugggccucaucuacacagcgaaguauccuaauagcucugaccuggaucgccuuucccaaagccaucccauucugaacaugguugacaccaaaaaguccucucucaauaucagcggguacaacuuuucccugggagccgcugugaaagccggcgcuugcaugcuugaugggggaaauaugcuggagacaaucaaggugaccccucagacgauggacggcauucucaaaagcauccugaaggucaaaaagucucugggcauguucguguccgauacacccggggaaagaaacccuuaugagaacauucucuacaagaucugucugagcggagacggcuggccguauauugccucucggaccagcaucguugggcgcgcgugggaaaauacaaccguggaucuugaguccgacggaaaaccccagaaggucggcucugccgggagcaacaaaucccugcagagcgcuggauuuccuaccggccucacauacucucaacugaugacgcugaaggauuccaugaugcagcuugaccccagcgccaaaaccuggauugauaucgagggcagaccugaagaccccguggagaucgcucucuaccagccgaugucugggugcuauauucacuucuuucgggaaccuacagaccugaagcaguucaagcaagaugccaaauacucccauggaaucgacguugccgaucuguuucccgcucagccuggccucaccagcgcggugauugaggcccugcccagaaauaugguccuuacaugucagggguccgacgauaucaagcgccugcucgacucucagggacggagagauauuaaacugaucgacaucgcucugagcaaggccgauucccgccgguucgaaaacgccgugugggaccaaugcaaagaucuuugucacaugcauaccggcgucgugguugagaagaagaaaagagggggcaaggaggaaauuacgccccacugcgcucucauggacuguaucauguaugaugccgcggugucuggaggccugaauauuccuguccugcgcgcugugcucccgcgggacaugguuuuuagaacaagcucccccaaagugguccugugaggacuaguaauaaggaaacuguaugaaugucugugggcaggaagugaagagauccuucuguaaagguuuuuggaauuaugucugcugaauaauaaacuuuuuugaaauaauaaaucugguagaaaaaugagaucucaaaggcucuuuucagagccaccaaaaaaaaaaaaaaaaaaaaaaaaaaaaaaaaaaaaaaaaaaaaaaaaaaaaaaaaaaaaaaaaagaauu

SEQ ID NO: 18796 - RNA, 2078 nt, Artificial Sequence
  mRNA product Design b-4 (hSL-A64-N5) comprising derived and/or modified sequence from LASV(Lassa virus/H.sapiens-wt/NGA/2016/ISTH_0017;Clade II)__AVO03568__SP-HsPLAT_NP(2-569) (opt5)
aggagagucccgcagucggcguccagcggcucugcuuguucgugugugugucguugcaggccuuauucaagcuuaccauggacgccaugaagagaggccugugcugugugcuccugcuuugcggggcugucuucguuagccccagcgccuccaaggaggugaaaucuuuccuguggacccagagccucagacgggaacuguccggcuacugcucuagcaucaaacuucaagucguuaaggacgcucaggcccugcuccacgggcuggauuuuuccgaggugucuaacgugcagcgccuuaugagaaagcagaaacgggacgauagcgaccugaagcgccucagagaucugaaucaagcggucaacaaucugguggaacucaaguccacacagcagaaaagcauucugcggguuggaacgcuuaccucugacgaucugcucacacuggcugccgaccuugagaagcugaaauccaaggugauccgcaccgaaagaccccucagcucuggcgucuauauggggaaccuguccacacagcaacuggagcagcggcgcgcccuccugaauaugauuggaauggcuggcggggcccagggaacccagccuggcagagauggcgugguucgggugugggacgucaaaaacccggaucuucugaauaaccaauucgggacaaugcccagccucacccuggcuugucuuacgaagcagggacagguggaccugaaugaugccgugcucgcgcugaccgaccugggccucaucuacacagccaaguauccuaacucuuccgaccuggaucgccuuagccaaucccaucccauucugaauauggucgacaccaaaaagucuagccucaacaucuccggguacaauuuuagccugggagcugccguuaaagcuggcgccugcaugcuugaugggggaaacaugcuggagacaaucaaggugaccccucagacgauggacggcauucucaaaucuauccugaaggugaaaagaucccugggcauguucgucagcgaugcgcccggggaacggaauccuuaugagaacauucucuacaagaucugucugucuggagacggcuggccguauauugccagccgcacauccaucguggggagagcuugggaaaacaccacaguugaucuugagucugacggaaagccccagaaagugggcgccaccgggagcaauaagucccugcagagcgcuggauuuccuaccggccucacauacucucaacugaugacgcugaaagauuccaugaugcagcuugaccccagcgccaagaccuggauugauaucgagggccggccugaagaccccgucgagguggcccucuaccagccgguuucugggugcuauauccacuucuuuagagaaccuacagaccugaaacaguucaagcaagaugcuaaguacucccauggaauugacguggcggaucuguuucccgcccagccuggccucaccagcgcugucaucgaggcccugccccgcaacauggugcuuacaugucagggguccgacgauauuaaaaagcugcucgacucucagggacggaaagauaucaagcugauugacaucgcccugagcaaagcugauuccagacgcuucgaaaaugccgucugggaccaaugcaaggaucuuugucacaugcauaccggcgugguuguggagaagaaaaagagagggggcaaagaggaaaucacgccccacugcgcgcucauggacuguauuauguaugaugcugccgucucuggaggccugaacaucccugugcugcgggccguucucccgcgcgacaugguguuucggacaagcucccccaaggucgugcugugaggacuaguaauaaggaaacuguaugaaugucugugggcaggaagugaagagauccuucuguaaagguuuuuggaauuaugucugcugaauaauaaacuuuuuugaaauaauaaaucugguagaaaaaugagaucucaaaggcucuuuucagagccaccaaaaaaaaaaaaaaaaaaaaaaaaaaaaaaaaaaaaaaaaaaaaaaaaaaaaaaaaaaaaaaaaagaauu

SEQ ID NO: 18797 - RNA, 2078 nt, Artificial Sequence
  mRNA product Design b-4 (hSL-A64-N5) comprising derived and/or modified sequence from LASV(Lassa virus/H.sapiens-wt/NGA/2018/ISTH_0959;Clade II)__AVV65100__SP-HsPLAT_NP(2-569) (opt5)
aggagagucccgcagucggcguccagcggcucugcuuguucgugugugugucguugcaggccuuauucaagcuuaccauggacgccaugaagagaggccugugcugugugcuccugcuuugcggggcugucuucguuagccccagcgccuccaaggaggugaaaucuuuccuguggacccagagccucagacgggaacuguccggcuacugcucuaacaucaaacuucaagucguuaaggacgcucaggcccugcuccacgggcuggauuuuagcgagguguccaaugugcagcgccuuaugagaaagcagaaacgggacgauucugaccugaagcgccucagagaucugaaccaagcggucaauaaccugguggaacucaagagcacccagcagaaauccauucugcggguuggaacgcuuaccagcgacgaucugcucacacuggcugccgaccuugagaagcugaaaucuaaggugauccgcaccgaaagaccccucuccagcggcgucuauauggggaaucugucuacacagcaacuggagcagcggcgcgcccuccugaaccuuauuggaauggugggcggggcucagggaacccagccuggcagagauggcguugugcgggucugggacgugaaaaauccggaucugcucaacaaucaauucgggacaaugcccucccugacccuugccugucugacgaagcagggacagguggaccucaacgaugucguucuggcucugaccgaccucggccugaucuacacagccaaguauccuaauagcucugaccuugaucgccugucccaaagccaucccauucucaacaugguggacaccaaaaaguccucucugaauaucagcggguuuaacuucucccuuggagcggccgugaaagcuggcgccugcaugcuggaugggggaaauaugcucgagacaaucaaggucaccccucagacgauggacggcauucugaaaagcauccugaaggugaaaaagucucucggcauguuuguuuccgauacacccggggaaagaaacccuuacgagaacauucuguauaagaucugucuuagcggagacggcuggccguacauugcuucucggaccagcaucguggggcgcgccugggaaaauacaaccgucgaucuggaguccgacggaaaaccccacaaggugggcaccgcggggucuaacaaaagccuccaguccgccggauucccuacaggccugacguauagccagcugaugacccuuaaggauucuaugaugcaacucgaccccuccgcuaaaacauggauugauaucgagggcagaccugaagaccccguugagaucgcccuguaccagccgaugagcgggugcuacauucacuuuuuccgggaaccuaccgaccugaagcaguuuaagcaggaugcuaaauauucucauggaaucgacguggccgaucucuuccccgcccaaccuggccugacauccgcugucauugaggcgcuucccagaaauauggugcugaccugucaggggagcgacgauaucaagcgccuccuggacucccagggacggaaagauauuaagcugaucgacaucgcccuuucuaaaacggauagcagacgcuuugaaaacgcugucugggaccagugcaaggaucucugucauaugcacacaggcgugguuguggagaagaaaaagagagggggcaaagaggaaauuacaccccacugcgcccugauggacuguaucauguacgaugccgcugucuccggaggccugaauauuccugugcuccgggccguucugccgcgcgacaugguguuccggaccucuagccccaaggucgugcuuugaggacuaguaauaaggaaacuguaugaaugucugugggcaggaagugaagagauccuucuguaaagguuuuuggaauuaugucugcugaauaauaaacuuuuuugaaauaauaaaucugguagaaaaaugagaucucaaaggcucuuuucagagccaccaaaaaaaaaaaaaaaaaaaaaaaaaaaaaaaaaaaaaaaaaaaaaaaaaaaaaaaaaaaaaaaaagaauu

SEQ ID NO: 18798 - RNA, 2078 nt, Artificial Sequence
  mRNA product Design b-4 (hSL-A64-N5) comprising derived and/or modified sequence from LASV(LASV003-NIG-2008;Clade II)__AIT17581__SP-HsPLAT_NP(2-569) (opt5)
aggagagucccgcagucggcguccagcggcucugcuuguucgugugugugucguugcaggccuuauucaagcuuaccauggacgccaugaagagaggccugugcugugugcuccugcuuugcggggcugucuucguuagccccagcgccuccaaggaggugaaaucuuuccuguggacccagagccucagacgggaacuguccggcuacugcucuagcaucaaacuucaagucguuaaggacgcucaggcccugcuccacgggcuggauuuuuccgaggugucuaacgugcagcgccuuaugagaaagcagaaacgggacgauagcgaccugaagcgccucagagaucugaaucaagcggucaacaaucugguggaacucaaguccacccagcagaaaagcguucugcgggugggaacgcuuaccucugacgaucugcucacacuggcugccgaccuugagaagcugaaauccaaggucauucgcaccgaaagaccccucagcucuggcguguauauggggaaccuguccgcccagcaacuggagcagcggcgcacacuccugaauaugaucggaaugguuggcggggcucagggaacccagccuggcagagauggcgugguccgggugugggacgugaaaaacccggaucuucugaauaaccaauucgggacaaugcccagccucacccuggccugucuuacgaagcagggacaggucgaccugaaugauguugugcucgcucugaccgaccugggccucauuuacacagccaaguauccuaacucuuccgaccuggaucgccuuagccaaucccaucccauccugucuaugguggacaccaaaaagagcucccucaauauuagcggguacaacuuuucucugggagcggccgucaaagcuggcgccugcaugcuugaugggggaaauaugcuggagacaaucaaggugaccccucagacgauggacggcauccucaaauccauucugaagguuaaaaagagccugggcauguucgugucugauacacccggggaaagaaacccuuaugagaauauccucuacaagauuugucugagcggagacggcuggccguauaucgcuucccggaccucuauugucgggcgcgccugggaaaacacaaccguggaucuugagagcgacggaaaaccccagaagguuggcaccgcgggguccaacaaaagccugcagucugccggauuuccuacaggccucacguacucccaacugaugacccugaaggauagcaugaugcagcuugaccccucugcuaaaacauggaucgauauugagggcagaccugaagaccccguggagaucgcccucuaccagccgauguccgggugcuauauccacuucuuucgggaaccuaccgaccugaagcaguucaagcaagaugcuaaauacagccauggaauugacgucacagaucuguuucccgcccagccuggccucaccuccgccgugaucgaggcucugcccagaaauaugguccuuacgugucaggggucugacgauauuaagcgccugcucgacagccagggacggagagauaucaaacugauugacaucgcgcuguccaaggccgauucucgccgguucgaaaacgcugugugggaccaaugcaaagaucuuugucacaugcauacaggcguuguggucgagaagaagaaaagagggggcaaggaggaaaucacaccccacugcgcccucauggacuguauuauguaugaugccgcugugagcggaggccugaauaucccuguucugcgcgccgugcucccgcgggacauggucuuuagaaccuccagccccaaaguggugcugugaggacuaguaauaaggaaacuguaugaaugucugugggcaggaagugaagagauccuucuguaaagguuuuuggaauuaugucugcugaauaauaaacuuuuuugaaauaauaaaucugguagaaaaaugagaucucaaaggcucuuuucagagccaccaaaaaaaaaaaaaaaaaaaaaaaaaaaaaaaaaaaaaaaaaaaaaaaaaaaaaaaaaaaaaaaaagaauu

SEQ ID NO: 18799 - RNA, 2078 nt, Artificial Sequence
  mRNA product Design b-4 (hSL-A64-N5) comprising derived and/or modified sequence from LASV(LASV035-NIG-2009;Clade II)__AIT17589__SP-HsPLAT_NP(2-569) (opt5)
aggagagucccgcagucggcguccagcggcucugcuuguucgugugugugucguugcaggccuuauucaagcuuaccauggacgccaugaagagaggccugugcugugugcuccugcuuugcggggcugucuucguuagccccagcgccuccaaggaggugaaaucuuuccuguggacccagagccucagacgggaacuguccggcuacugcucuagcaucaaacuucaagucguuaaagacgcucaggcccugcuccacgggcuggauuuuuccgaggugucuaacgugcagcgccuuaugagaaagcagaaacgggacgauagcgaccugaagcgccucagagaucugaaucaagcggucaacaaucugguggaacucaaguccacacagcagaaaagcauucugcggguuggaacgcuuaccucugacgaucugcucacacuggcugccgaccuugagaagcugaaauccaaggugauccgcaccgaaagaccccucagcucuggcgucuauauggggaaccuguccgcccagcaacuggagcagcggcgcgcucuccugaauaugauuggaauggugggcggggcccagggaacacagccuggcagagauggcguugugcgggucugggacgugaaaaacccggaucuucugaauaaccaauucgggaccaugcccagccucacacuggcuugucuuaccaagcagggacagguggaccugaaugaugccguccucgcgcugacggaccugggccucaucuacaccgccaaguauccuaacucuuccgaccuggaucgccuuagccaaucccaucccauucugaauaugguugacacaaagaagucuagccucaacaucuccggguacaauuuuagccugggagcugccgugaaagcuggcgccugcaugcuugaugggggaaacaugcuggagaccaucaaggugacaccucagaccauggacggcauucucaaaucuauccugaaggucaaaagaucccugggcauguucgugagcgauacgcccggggaacggaauccuuaugagaacauucucuacaagaucugucugucuggagacggcuggccguauauugcgagccgcacauccaucguugggagagccugggaaaacaccacaguggaucuugagucugacggaaagccccagaaagucggcaccaccgggagcaauaagucccugcagagcgcuggauuuccuacaggccucacguacucucaacugaugacccugaaagauuccaugaugcagcuugaccccagcgccaagacauggauugauaucgagggccggccugaagaccccguggagaucgcucucuaccagccgaugucugggugcuauauucacuucuuuagagaaccuaccgaccugaaacaguucaagcaagaugccaaguacucccauggaaucgacguugccgaucuguuucccgcucagccuggccucacaagcgcggugauugaggcccugccccgcaacaugguccuuaccugucagggguccgacgauaucaaaaagcugcucgacucucagggacggagagauauuaaacugaucgacaucgcucugagcaaggccgauucccgcaaauucgaaaaugccgugugggaccaaugcaaggaucuuugucacaugcauacgggcgucgugguugagaagaaaaagagagggggcaaagaggaaauuacaccccacugcgcucucauggacuguaucauguaugaugccgcggugucuggaggccugaacauuccuguccugcgggcugugcucccgcgcgacaugguuuuucggaccagcucccccaaggugguccugugaggacuaguaauaaggaaacuguaugaaugucugugggcaggaagugaagagauccuucuguaaagguuuuuggaauuaugucugcugaauaauaaacuuuuuugaaauaauaaaucugguagaaaaaugagaucucaaaggcucuuuucagagccaccaaaaaaaaaaaaaaaaaaaaaaaaaaaaaaaaaaaaaaaaaaaaaaaaaaaaaaaaaaaaaaaaagaauu

SEQ ID NO: 18800 - RNA, 2078 nt, Artificial Sequence
  mRNA product Design b-4 (hSL-A64-N5) comprising derived and/or modified sequence from LASV(LASV1000-NIG-2009;Clade II)__AIT17783__SP-HsPLAT_NP(2-569) (opt5)
aggagagucccgcagucggcguccagcggcucugcuuguucgugugugugucguugcaggccuuauucaagcuuaccauggacgccaugaagagaggccugugcugugugcuccugcuuugcggggcugucuucguuagccccagcgccuccaaggaggugaaaucuuuccuguggacccagagccucagacgggaacuguccggcuacugcucuaacaucaaacuucaagucguuaaggacgcucaggcccugcuccacgggcuggauuuuagcgagguguccaaugugcagcgccuuaugagaaagcagaaacgggacgauucugaccugaagcgccucagagaucugaaccaagcggucaauaaccugguggaacucaagagcacacagcagaaauccauucugcggguuggaacgcuuaccagcgacgaucugcucacacuggcugccgaccuugagaagcugaaaucuaaggugauccgcaccgaaagaccccucuccagcggcgucuauauggggaaucugucuacacagcaacuggagcagcggcgcgcccuccugaacaugauuggaauggugggcggggcucagggaacccagccuggcagagauggcguugugcgggucugggacgugaaaaauccggaucuucugaacaaucaauucgggacaaugcccucccucacccuggccugucuuacgaagcagggacagguggaccugaacgaugucguucucgcucugaccgaccugggccucaucuacacagccaaguauccuaauagcucugaccuggaucgccuuucccaaagccaucccauucugaacaugguggacaccaaaaaguccucucucaauaucagcggguacaacuuuucccugggagcggccgugaaagcuggcgccugcaugcuugaugggggaaauaugcuggagacaaucaaggucaccccucagacgauggacggcauucucaaaagcauccugaaggugaaaaagucucugggcauguucguuuccgauacacccggggaaagaaacccuuaugagaacauucucuacaagaucugucugagcggagacggcuggccguauauugcuucucggaccagcaucguggggcgcgccugggaaaauacaaccgucgaucuugaguccgacggaaaaccccagaaggugggcaccgcggggucuaacaaaagccugcaguccgccggauuuccuacaggccucacguacagccaacugaugacccugaaggauucuaugaugcagcuugaccccuccgcuaaaacauggauugauaucgagggcagaccugaagaccccguugagaucgcccucuaccagccggugagcgggugcuauauucacuucuuucgggaaccuaccgaccugaagcaguucaagcaagaugcuaaauacucucauggaaucgacgucgccgaucuguuucccgcccagccuggccucacauccgcugugauugaggcgcugcccagaaauaugguccuuaccugucaggggagcgacgauaucaagcgccugcucgacucccagggacggagagauauuaaacugaucgacaucgcccugucuaaggcugauagccgccgguucgaaaacgccgugugggaccaaugcaaagaucuuugucacaugcauacgggcguuguggucgagaagaagaaaagagggggcaaggaggaaauuacaccccacugcgcccucauggacuguaucauguaugaugcugccguguccggaggccugaauauuccuguucugcgcgcggugcucccgcgggacauggucuuuagaaccucuagccccaaaguggugcugugaggacuaguaauaaggaaacuguaugaaugucugugggcaggaagugaagagauccuucuguaaagguuuuuggaauuaugucugcugaauaauaaacuuuuuugaaauaauaaaucugguagaaaaaugagaucucaaaggcucuuuucagagccaccaaaaaaaaaaaaaaaaaaaaaaaaaaaaaaaaaaaaaaaaaaaaaaaaaaaaaaaaaaaaaaaaagaauu

SEQ ID NO: 18801 - RNA, 2078 nt, Artificial Sequence
  mRNA product Design b-4 (hSL-A64-N5) comprising derived and/or modified sequence from LASV(LASV221-NIG-2010;Clade II)__AIT17625__SP-HsPLAT_NP(2-569) (opt5)
aggagagucccgcagucggcguccagcggcucugcuuguucgugugugugucguugcaggccuuauucaagcuuaccauggacgccaugaagagaggccugugcugugugcuccugcuuugcggggcugucuucguuagccccagcgccuccaaggaggugaaaucuuuccuguggacccagagccucagacgggaacuguccggcuacugcucuagcaucaaacuucaagucguuaaggacgcucaggcccugcuccacgggcuggauuuuuccgaggugucuaacgugcagcgccuuaugagaaagcagcggcgcgacgauagcgaccugaaaagacuccgggaucugaaucaagcggucaacaaucugguggaacucaaguccacacagcaaaagagcauucugcgcguuggaacgcuuaccucugacgaucugcucacacuggcugccgaccuugagaaacugaaguccaaagugaucagaaccgaacggccccucagcucuggcgucuauauggggaaccuguccacacagcagcuggagcagcgcagagcccuccugaauaugauuggaauggugggcggggcucagggaacccagccuggccgggauggcguugugcgcgucugggacgugaagaacccggaucuucugaauaaccaauucgggacaaugcccagccucacccuggccugucuuacgaaacagggacagguggaccugaaugaugcuguccucgcccugaccgaccugggccucaucuacacagcgaaguauccuaacucuuccgaccuggauagacuuagccaaucccaucccauucugaauaugguugacaccaagaaaucuagccucaacaucuccggguacaauuuuagccugggagccgcugugaaggccggcgcuugcaugcuugaugggggaaacaugcuggagacaaucaaagugaccccucagacggucgacggcauucucaagucuauccugaaagugaagcggucccugggcauguucguuagcgauacacccggggaacgcaauccuuaugagaacauucucuacaaaaucugucugucuggagacggcuggccguauauugccagcagaaccuccaucguggggcgggcgugggaaaacacaaccgucgaucuugagucugacggaaagccccagaaggugggcaccgccgggagcaauaaaucccugcagagcgcuggauuuccuacaggccucacguacucucaacugaugacccugaaggauuccaugaugcagcuugaccccagcgccaaaacauggauugauaucgagggcagaccugaagaccccguugagaucgcucucuaccagccgaugucugggugcuauauucacuucuuucgcgaaccuaccgaccugaagcaguucaaacaagaugccaaguacucccauggaaucgacguggccgaucuguuucccgcucagccuggccucacaagcgcggucauugaggcccugccccggaacauggugcuuaccugucagggguccgacgauaucaagagacugcucgacucucagggacgccgggauauuaaacugaucgacaucgcucugagcaaggccgauuccagaaaauucgaaaaugccgucugggaccaaugcaaggaucuuugucacaugcauacgggcgugguuguggagaaaaagaagcgcgggggcaaagaggaaauuacaccccacugcgcucucauggacuguaucauguaugaugccgcggucucuggaggccugaacauuccugugcugcgggcuguucucccgagagacaugguguuucgcaccagcucccccaaggucgugcugugaggacuaguaauaaggaaacuguaugaaugucugugggcaggaagugaagagauccuucuguaaagguuuuuggaauuaugucugcugaauaauaaacuuuuuugaaauaauaaaucugguagaaaaaugagaucucaaaggcucuuuucagagccaccaaaaaaaaaaaaaaaaaaaaaaaaaaaaaaaaaaaaaaaaaaaaaaaaaaaaaaaaaaaaaaaaagaauu

SEQ ID NO: 18802 - RNA, 2078 nt, Artificial Sequence
  mRNA product Design b-4 (hSL-A64-N5) comprising derived and/or modified sequence from LASV(LASV237-NIG-2010;Clade II)__AIT17639__SP-HsPLAT_NP(2-569) (opt5)
aggagagucccgcagucggcguccagcggcucugcuuguucgugugugugucguugcaggccuuauucaagcuuaccauggacgccaugaagagaggccugugcugugugcuccugcuuugcggggcugucuucguuagccccagcgccuccaaggaggugaaaucuuuccuguggacccagagccucagacgggaacuguccggcuacugcucuaacaucaaacuucaagucguuaaggacgcucaggcccugcuccacgggcuggauuuuagcgagguguccaaugugcagcgccuuaugagaaagcagaaacgggacgauucugaccugaagcgccucagagaucugaaccaagcggucaauaaccugguggaacucaagagcacacagcagaaauccauucugcggguuggaacgcuuaccagcgacgaucugcucacacuggcugccgaccuugagaagcugaaaucuaaggugauccgcaccgaaagaccccucuccagcggcgucuauauggggaaucugucuacacagcaacuggagcagcggcgcgcccuccugaacaugauuggaauggugggcggggcucagggaacccagccuggcagagauggcguugugcgggucugggacgugaaaaauccggaucuucugaacaaucaauucgggacaaugcccucccucacccuggccugucuuacgaagcagggacagguggaccugaacgaugcuguccucgcccugaccgaccugggccucaucuacacagcgaaguauccuaauagcucugaccuggaucgccuuucccaaagccaucccauucugaacaugguugacaucaaaaaguccucucucaauaucagcggguacaacuuuucccugggagccgcugugaaagccggcgcuugcaugcuugaugggggaaauaugcuggagaccauuaaggugacaccucagaccauggacggcauccucaaaagcauucugaaggucaaaagaucucugggcauguucguguccgauacgcccggggaacggaacccuuaugagaacauccucuacaagauuugucugagcggagacggcuggccguauaucgccucucgcacaagcauuguugggagagcgugggaaaauaccacaguggaucuugaguccgacggaaagccccagaaagucggcucugccgggagcaacaagucccugcagagcgcuggauuuccuaccggccucaccuacucucaacugaugacacugaaagauuccaugaugcagcuugaccccagcgccaagacguggaucgauaucgagggccggccugaagaccccguggagauugcucucuaccagccgaugucugggugcuauauccacuucuuuagagaaccuaccgaccugaaacaguucaagcaagaugccaaguacucccauggaauugacguugccgaucuguuucccgcucagccuggccucacaagcgcggugaucgaggcccugccccgcaauaugguccuuaccugucagggguccgacgauauuaaacggcugcucgacucucagggaagacgcgauaucaagcugaucgacauugcucugagcaaagccgauucccggagauucgaaaacgccgugugggaccaaugcaaggaucuuugucacaugcauacaggcgucgugguugagaaaaagaagcgcgggggcaaagaggaaaucacgccccacugcgcucucauggacuguauuauguaugaugccgcggugucuggaggccugaauaucccuguccugcgggcugugcucccgagagacaugguuuuucgcaccagcucccccaaggugguccugugaggacuaguaauaaggaaacuguaugaaugucugugggcaggaagugaagagauccuucuguaaagguuuuuggaauuaugucugcugaauaauaaacuuuuuugaaauaauaaaucugguagaaaaaugagaucucaaaggcucuuuucagagccaccaaaaaaaaaaaaaaaaaaaaaaaaaaaaaaaaaaaaaaaaaaaaaaaaaaaaaaaaaaaaaaaaagaauu

SEQ ID NO: 18803 - RNA, 2078 nt, Artificial Sequence
  mRNA product Design b-4 (hSL-A64-N5) comprising derived and/or modified sequence from LASV(LASV253-NIG-2011;Clade II)__AIT17671__SP-HsPLAT_NP(2-569) (opt5)
aggagagucccgcagucggcguccagcggcucugcuuguucgugugugugucguugcaggccuuauucaagcuuaccauggacgccaugaagagaggccugugcugugugcuccugcuuugcggggcugucuucguuagccccagcgccuccaaggaggugaaaucuuuccuguggacccagagccucagacgggaacuguccggcuacugcucuagcaucaaacuucaagucguuaaggacgcucaggcccugcuccacgggcuggauuuuuccgaggugucuaacgugcagcgccuuaugagaaagcagaaacgggacgauagcgaccugaagcgccucagagaucugaaucaagcggucaacaaucugguggaacucaaguccacccagcagaaaagcguucugcgggugggaacgcuuaccucugacgaucugcucacacuggcugccgaccuugagaagcugaaauccaaggucauucgcaccgaaagaccccucagcucuggcguguauauggggaaccuguccacacagcaacuggagcagcggcgcgcccuccugaauaugaucggaaugguuggcggggcucagggaacccagccuggcagagauggcgugguccgggugugggacgugaaaaacccggaucuucugaauaaccaauucgggacaaugcccagccucacccuggccugucuuacgaagcagggacaggucgaccugaaugauguugugcucgcucugaccgaccugggccucauuuacacagccaaguauccuaacucuuccgaccuggaucgccuuagccaaucccaucccauccugaauaugguggacaccaaaaagucuagccucaacauuuccggguacaauuuuagccugggagcggccgucaaagcuggcgccugcaugcuugaugggggaaacaugcuggagacaaucaaggugaccccucagacgauggacggcauccucaaaucuauucugaagguuaaaaagucccugggcauguucgugagcgauacacccggggaaagaaauccuuaugagaacauccucuacaagauuugucugucuggagacggcuggccguauaucgcuagccggaccuccauugucgggcgcgccugggaaaacacaaccguggaucuugagucugacggaaaaccccagaagguuggcaccgcggggagcaauaaaucccugcagagcgccggauuuccuacaggccucacguacucucaacugaugacccugaaggauuccaugaugcagcuugaccccagcgcuaaaacauggaucgauauugagggcagaccugaagaccccguggagaucgcccucuaccagccgaugucugggugcuauauccacuucuuucgggaaccuaccgaccugaagcaguucaagcaagaugcuaaauacucccauggaauugacgucacagaucuguuucccgcccagccuggccucaccagcgccgugaucgaggcucugcccagaaacaugguccuuacgugucagggguccgacgauauuaagcgccugcucgacucucagggacggagagauaucaaacugauugacaucgcgcugagcaaggccgauucccgccgguucgaaaaugcugugugggaccaaugcaaagaucuuugucacaugcauacaggcguuguggucgagaagaagaaaagagggggcaaggaggaaaucacaccccacugcgcccucauggacuguauuauguaugaugccgcugugucuggaggccugaacaucccuguucugcgcgccgugcucccgcgggacauggucuuuagaaccagcucccccaaaguggugcugugaggacuaguaauaaggaaacuguaugaaugucugugggcaggaagugaagagauccuucuguaaagguuuuuggaauuaugucugcugaauaauaaacuuuuuugaaauaauaaaucugguagaaaaaugagaucucaaaggcucuuuucagagccaccaaaaaaaaaaaaaaaaaaaaaaaaaaaaaaaaaaaaaaaaaaaaaaaaaaaaaaaaaaaaaaaaagaauu

SEQ ID NO: 18804 - RNA, 2078 nt, Artificial Sequence
  mRNA product Design b-4 (hSL-A64-N5) comprising derived and/or modified sequence from LASV(LASV254-NIG-2011;Clade II)__AIT17675__SP-HsPLAT_NP(2-569) (opt5)
aggagagucccgcagucggcguccagcggcucugcuuguucgugugugugucguugcaggccuuauucaagcuuaccauggacgccaugaagagaggccugugcugugugcuccugcuuugcggggcugucuucguuagccccagcgccuccaaggaggugaaaucuuuccuguggacccagagccucagacgggaacuguccggcuacugcucuagcaucaaacuucaagucguuaaggacgcucaggcccugcuccacgggcuggauuuuuccgaggugucuaacgugcagcgccuuaugagaaagcagaaacgggacgauagcgaccugaagcgccucagagaucugaaucaagcggucaacaaucugguggaacucaaguccacacagcagaaaagcguucugcgggugggaacgcuuaccucugacgaucugcucacacuggcugccgaccuugagaagcugaaauccaaggucauucgcaccgaaagaccccucagcucuggcguguauauggggaaccuguccacacagcaacuggagcagcggcgcgcccuccugaauaugaucggaaugguuggcggggcucagggaacccagccuggcagagauggcgugguccgggugugggacgugaaaaacccggaucuucugaauaaccaauucgggacaaugcccagccucacccuggccugucuuacgaagcagggacaggucgaccugaaugaugcuguucucgcccugaccgaccugggccucauuuacacagcgaaguauccuaacucuuccgaccuggaucgccuuagccaaucccaucccauccugaauaugguggacaccaaaaagucuagccucaacauuuccggguacaauuuuagccugggagccgcugugaaagccggcgcuugcaugcuugaugggggaaacaugcuggagacaaucaaggucaccccucagacgauggacggcauccucaaaucuauucugaaggugaaaaagucccugggcauguucguuagcgauacacccggggaaagaaauccuuaugagaacauccucuacaagauuugucugucuggagacggcuggccguauaucgccagccggaccuccauuguggggcgcgcgugggaaaacacaaucgucgaucuugagucugacggaaaaccccagaaggugggcaccgccgggagcaauaaaucccugcagagcgcuggauuuccuaccggccucacauacucucaacugaugacgcugaaggauuccaugaugcagcuugaccccagcgccaaaaccuggauugauaucgagggcagaccugaagaccccguugagaucgcucucuaccagccgaugucugggugcuauauucacuucuuucgggaaccuacagaccugaagcaguucaagcaagaugccaaauacucccauggaaucgacguggccgaucuguuucccgcucagccuggccucaccagcgcggucauugaggcccugcccagaaacauggugcuuacaugucagggguccgacgauaucaagcgccugcucgacucucagggacggagagauauuaaacugaucgacaucgcucugagcaaggccgauucccgccgguucgaaaaugccgucugggaccaaugcaaagaucuuugucacaugcauaccggcgugguuguggagaagaagaaaagagggggcaaggaggaaauuacgccccacugcgcucucauggacuguaucauguaugaugccgcggucucuggaggccugaacauuccugugcugcgcgcuguucucccgcgggacaugguguuuagaacaagcucccccaaagucgugcugugaggacuaguaauaaggaaacuguaugaaugucugugggcaggaagugaagagauccuucuguaaagguuuuuggaauuaugucugcugaauaauaaacuuuuuugaaauaauaaaucugguagaaaaaugagaucucaaaggcucuuuucagagccaccaaaaaaaaaaaaaaaaaaaaaaaaaaaaaaaaaaaaaaaaaaaaaaaaaaaaaaaaaaaaaaaaagaauu

SEQ ID NO: 18805 - RNA, 2078 nt, Artificial Sequence
  mRNA product Design b-4 (hSL-A64-N5) comprising derived and/or modified sequence from LASV(Nig08-04;Clade II)__ADU56611__SP-HsPLAT_NP(2-569) (opt5)
aggagagucccgcagucggcguccagcggcucugcuuguucgugugugugucguugcaggccuuauucaagcuuaccauggacgccaugaagagaggccugugcugugugcuccugcuuugcggggcugucuucguuagccccagcgccuccaaggaggugaaaucuuuccuguggacccagagccucagacgggaacuguccggcuacugcucuaacaucaaacuucaagucguuaaggacgcucaggcccugcuccacgggcuggauuuuagcgagguguccaaugugcagcgccuuaugagaaagcagaaacgggacgauggagaccugaagcgccucagagaucugaaccaagcggucaauaaccugguggaacucaagucuacccagcagaaaagcguucugcgggugggcacgcuuaccuccgacgaucugcucacacuggcugccgaccuugagaagcugaaaagcaaggucauucgcaccgaaagaccccucucuuccgggguguauaugggaaaucugagcacacagcaacuggagcagcggaaagcccuccugucuaugaucggcaugguugggggagcucagggcacccagccuggccgcgaugggguggucagagugugggacgugaagaacccggaucuucugaauaaccaauucggaacaaugcccucccucacccuggccugucuuacgaagcagggccaggucgaccugaaugaugcuguucucgcccugaccgaccuggggcucauuuacacagcgaaauauccuaacagcucugaccuggaucggcuuucccaaagccaucccauccugaauaugguggacaccaagaaauccucucucaacauuagcggauacaauuuuucccugggcgccgcugugaaggccggggcuugcaugcuugauggaggcaacaugcuggagacaaucaaagucaccccucagacgauggacggcauccucaagagcauucugaaagugaagcgcucucuggggauguucguuuccgauacacccggagaaagaaauccuuaugagaacauccucuacaagauuugucugagcggcgacggguggccguauaucgccucucggaccagcauugugggacgcgcgugggaaaacacaaccgucgaucuugaguccgacggcaaaccccagaagguggggaccgccggaucuaauaaaagccugcaguccgcuggcuuuccuacaggccucacguacagccaacugaugacccugaaggauucuaugaugcagcuugaccccuccgccaaaacauggaucgauauugaggggagaccugaagaccccguugagaucgcucucuaccagccgaugagcggaugcuauauccacuucuuucgggaaccuaccgaccugaagcaguucaagcaagaugccaaauacucucauggcauugacgugacagaucuguuuuccgcccagcccgggcucaccagcgcugucaucgaggcgcugccuagaaacauggugcuuacgugucagggauccgacgauauuaagaaacugcucgacucucagggccgccgggauaucaagcugauugacaucagccugaauaaagccgauuccagacgcuucgaaaacgcugucugggaccaaugcaaggaucuuugucacaugcauacaggggugguuguggagaagaaaaagcggggcggaaaagaggaaaucacaccccacugcgcccucauggacuguauuauguuugaugccgcugucucuggcgggcugaauauccccauucugagagccgugcucccucgcgacaugguuuuccggaccagcuccccgaaggugguccugugaggacuaguaauaaggaaacuguaugaaugucugugggcaggaagugaagagauccuucuguaaagguuuuuggaauuaugucugcugaauaauaaacuuuuuugaaauaauaaaucugguagaaaaaugagaucucaaaggcucuuuucagagccaccaaaaaaaaaaaaaaaaaaaaaaaaaaaaaaaaaaaaaaaaaaaaaaaaaaaaaaaaaaaaaaaaagaauu

SEQ ID NO: 18806 - RNA, 2081 nt, Artificial Sequence
  mRNA product Design b-4 (hSL-A64-N5) comprising derived and/or modified sequence from LASV(GA391;Clade III)__AAA46284__SP-HsPLAT_NP(2-570) (opt5)
aggagagucccgcagucggcguccagcggcucugcuuguucgugugugugucguugcaggccuuauucaagcuuaccauggacgccaugaagagaggccugugcugugugcuccugcuuugcggggcugucuucguuagccccagcgccuccaaggaggugagaucuugccuguggacccagagccuccggcgcgaacuguccggcuacuguucuaacaucaaacuucaagucguuaaggacgcucaggcccugcuccacgggcuggauuucagcgagguguccaaugugcagagacuuaugcggaaacagaagcgcgacgauggagaccugaaaagacuccgggaucugaaccaagcggucaauaaccugguggaacucaagucuacacagcagaaaagcguucugcgcgugggcacgcuuuccagcgacgaucugcucauucuggcugccgaccuugagaaacugaagucuaaagucaccagaacagaacggccccucuccagcgggguguauaugggaaaucugucuucccagcaacuggaucagcgcagagcccuccugaacaugaucggcaugaccgggguuagcggaggcggcaagggggcuucuaauggaauugugcgggucugggacgugaaaaacgccgagcuucugaauaaccaguuuggcacaaugccuucccucacccuggcuugccuuacaaagcaggggcaaguggaucugaaugacgccguccaggcgcucaccgaucugggacugaucuacacggccaaguauccgaacagcuccgaccucgaccgccugucucagagccaucccauucuuaauaugaucgauaccaaaaaguccagccugaacaucucuggcuacaauuucucccucggggcugccguuaaagcuggagccuguaugcuggacggcggcaacaugcuugagacaauuaaggugagcccucaaaccauggaugggauccugaaaucuauucucaaggugaaaaagagccugggaauguuugucuccgacacacccggcgaaagaaacccuuaugagaauauccuguacaagauuugccucucuggggauggauggagcuauaucgcgucccggaccagcauugugggccgcgccugggaaaacacgguuguggaccuggagcaggauaauaaaccccagaagaucgggaacggaggcucuaauaaaucccuucagagcgcuggcuucgccgcugggcugaucuacucucaacucaugacacugaaggacuuuaaauguuucaaccugauuccuaaugccaagaccuggauggauaucgagggaagaccggaagaccccgucgagauugcccuuuaccagccuuccagcggcugcuaugugcacuuuuuccgggaacccacagaucucaagcaguuuaaacaggacgcuaaguacucccaugggagagacguuaccgaucuguucgcggcccaaccuggacugaccucugcugugaucgaggcccucccccgcaacauggucauuacaugucagggcagcgaagacauccggaaacugcuugagucccaggggagacgcgauaucaagcugauugacaucacgcucucuaaagccgauagccggaaguuugagaaugcugugugggaccaguucaaggaucugugccacaugcauaccggcgucgugguugaaaagaagaaaagaggaggcaaggaggaaauuacaccgcacugugcccugauggacugcaucauguuugaugcggcuguguccgggggacuugacgccaaaguccuccgcgugguucugccucgggauaugguguucagaaccagcacacccaaggucgugcugugaggacuaguaauaaggaaacuguaugaaugucugugggcaggaagugaagagauccuucuguaaagguuuuuggaauuaugucugcugaauaauaaacuuuuuugaaauaauaaaucugguagaaaaaugagaucucaaaggcucuuuucagagccaccaaaaaaaaaaaaaaaaaaaaaaaaaaaaaaaaaaaaaaaaaaaaaaaaaaaaaaaaaaaaaaaaagaauu

SEQ ID NO: 18807 - RNA, 2078 nt, Artificial Sequence
  mRNA product Design b-4 (hSL-A64-N5) comprising derived and/or modified sequence from LASV(Nig08-A19;Clade III)__ADU56619__SP-HsPLAT_NP(2-569) (opt5)
aggagagucccgcagucggcguccagcggcucugcuuguucgugugugugucguugcaggccuuauucaagcuuaccauggacgccaugaagagaggccugugcugugugcuccugcuuugcggggcugucuucguuagccccagcgccuccaaggaggugaaaucuuuccuguggacccagagccucagacgggaacuguccggcuacugcucuaacaucaaacuucaagucguuaaggacgcucaggcccugcuccacgggcuggauuuuagcgagguguccaaugugcagcgccuuaugagaaagcagaaacgggacgauggagaccugaagcgccucagagaucugaaccaagcggucaauaaccugguggaacucaagucuacacagcagaaaagcguucugcgggugggcacgcuuuccagcgacgaucugcucguccuggcugccgaccuugagaagcugaaaucuaaggugguucgcaccgaaagaccccucuccagcgggauuuauaugggaaaucugucuucccagcaacuggaucagcggaaagcccuccugaacaugaucggcaugacagggggaaauggcggccgcaacaccacaagcgacgggauugugagagucugggaugugaagaaugcugagcuucugaacaaucaguucggaaccaugccuucucucacacuggccugucuuaccaagcagggccaaguggaccugaacgaugcuguccaggcccucacggaccuggggcugaucuacaccgcgaaauaucccaauuccagcgaccucgaucggcuggcccagucccauccgauucuuaacaugaucgacacaaagaaaucuagccugaauaucuccggauacaacuuuagccucggcgcugccguuaaggcuggggccugcaugcuggauggaggcaacaugcuugagaccauuaaagugucuccucaaacaauggacggcauccugaaguccauucucaaagugaagcgcagccuggggauguucaucucugauacccccggagaaagaaauccuuaugagaacauucuguacaagaucugucucagcggcgacggguggcccuauauugcgucccggacgucuaucgucggacgcgccugggaaaauacagugguugaucuggagagcgacaacaaaccucagaagaccggcaaugggggauccaacaaaagccuucagucugcuggcuuugccgcuggccugacauacucccagcucaugacccugaaggauagcaugcugcaacuugacccgaaugccaaaaccuggauggauaucgaggggagacccgaagacccuguggagauugcccucuaccagcccucuuccggaugcuauauccacuucuuucgggaaccuacagaccugaagcaguucaagcaggaugcuaaauacagccauggcauugacgucacggaucuguuugcggcccaacccgggcucaccuccgcugugaucgaggcccugccgagaaacaugguuauuacaugucagggaucugaagacauccgcaaacuucuggagagccagggccggagagauaucaagcucauugacaucucccugucuaagguggauagccgcaaauucgagaaugccgucugggaccaguuuaaggaucugugccacaugcauaccgggauuguggucgaaaagaaaaagcggggcggaaaagaggaaaucacaccucacugugcucuuauggacugcauuauguucgaugccgcgguguccggcgggguugacgcuaaggugcucagagccguccugccccgcgauaugguguuucggaccagcacgccuaaaguugugcugugaggacuaguaauaaggaaacuguaugaaugucugugggcaggaagugaagagauccuucuguaaagguuuuuggaauuaugucugcugaauaauaaacuuuuuugaaauaauaaaucugguagaaaaaugagaucucaaaggcucuuuucagagccaccaaaaaaaaaaaaaaaaaaaaaaaaaaaaaaaaaaaaaaaaaaaaaaaaaaaaaaaaaaaaaaaaagaauu

SEQ ID NO: 18808 - RNA, 2078 nt, Artificial Sequence
  mRNA product Design b-4 (hSL-A64-N5) comprising derived and/or modified sequence from LASV(G1180-SLE-2010;Clade IV)__AIT17169__SP-HsPLAT_NP(2-569) (opt5)
aggagagucccgcagucggcguccagcggcucugcuuguucgugugugugucguugcaggccuuauucaagcuuaccauggacgccaugaagagaggccugugcugugugcuccugcuuugcggggcugucuucguuagccccagcgccuccaaggagaucaaaucuuuccuguggacccagagccucagacgggaacuguccggcuacugcucuaacauuaagcugcaaguggucaaagacgcucaggcccugcuccacgggcuggauuuuagcgagguuuccaaugugcagcgccuuaugagaaaggaacggcgcgacgauaacgaccugaaaagacuccgggaucugaaucaggcggugaacaaucuggucgagcucaagucuacacaacaaaagagcauccugcgcgugggaacgcuuaccuccgacgaucugcucauucuggcugccgaccuugaaaaacuuaagagcaaaguuaucagaacagagcggccccucucugccggcguguauauggggaaccuguccagccagcagcuggaucagcgcagagcucuccugucuaugauuggaauguccagcggcaaucagcgggcccaggcugggcgcgacggagucgugagaguuugggaugugaagaacgucgagcuucugaauaaccaguucggcaccaugccuucucucacacuggccugucuuaccaaacaaggccagguggaccugaaugaugcggugcaggcccucacagaccuggggcugaucuacaccgcuaaguauccgaacacguccgaccucgaucggcugacccaaagccaucccauccuuaauaugauugacacaaagaaauccucucugaacaucagcggauacaauuuuucccucggcgccgcugucaaggccggggcgugcaugcuggauggaggcaacaugcuugaaaccauuaaaguuagcccucagacaauggacgggauccugaagucuauucucaaagugaagaaagcccugggaauguucaucuccgauacccccggcgagcgcaacccuuaugaaaauauucuguacaagaucugucucagcggcgacggguggcccuauaucgcuucuagaacgagcauuacaggacgggccugggagaacaccguggucgaucuggaguccgacggcaagccucagaaagcugggucuaauaacagcaauaagucccuucagagcgugggauuuacagccggccugaccuacucucaacucaugacccugaaagaugccaugcugcagcuugacccgaacgcuaagacauggauggauaucgaagggagacccgaggacccuguugaaauugcgcucuaccagcccuccagcggaugcuauauccacuucuuucgcgagccuacggaccugaaacaguucaagcaagaugccaaguacucucauggcauugacgugaccgaucuguuugcugcccagcccggccucacauccgccgucaucgacgcucugccgcggaauauggugaucaccugucaggggagcgaugacauuagaaaacuucuggaaucccagggacgcaaggauaucaaacucauugacaucgcccugucuaagacagauagccggaaauaugagaacgcgguuugggaccaauacaaggaucugugccacaugcauaccggcguggucguggagaagaaaaagagagggggaaaagaagagauuacgccucacugugcucuuauggacugcaucauguucgaugccgccgucuccggcgggcucaauacaucugugcugcgcgcuguucugccccgggacaugguguuuagaaccagcaccccucgcgucgugcucugaggacuaguaauaaggaaacuguaugaaugucugugggcaggaagugaagagauccuucuguaaagguuuuuggaauuaugucugcugaauaauaaacuuuuuugaaauaauaaaucugguagaaaaaugagaucucaaaggcucuuuucagagccaccaaaaaaaaaaaaaaaaaaaaaaaaaaaaaaaaaaaaaaaaaaaaaaaaaaaaaaaaaaaaaaaaagaauu

SEQ ID NO: 18809 - RNA, 2078 nt, Artificial Sequence
  mRNA product Design b-4 (hSL-A64-N5) comprising derived and/or modified sequence from LASV(G1442-SLE-2011;Clade IV)__AIT17181__SP-HsPLAT_NP(2-569) (opt5)
aggagagucccgcagucggcguccagcggcucugcuuguucgugugugugucguugcaggccuuauucaagcuuaccauggacgccaugaagagaggccugugcugugugcuccugcuuugcggggcugucuucguuagccccagcgccuccaaggaggugaaaucuuuccuguggacccagagccucagacgggaacuguccggcuacugcucuaacaucaaacuucaagucguuaaggacgcucaggcccugcuccacgggcuggauuuuagcgagguguccaaugugcagcgccuuaugagaaagcagcggcgcgacgauaacgaccugaaaagacuccgggaucugaaucaagcggucaacaaucugguggaacucaagucuacacagcaaaagagcguucugcgcgugggaacgcuuaccuccgacgaucugcucguccuggcugccgaccuugagaaacuuaagagcaaagugauuagaacagaacggccccucucugccggcguuuauauggggaaccuguccagccagcagcuggaucagcgcagagcucuccugaauaugaucggaaugucuggcgggauucagggaacccggacaggccgcgacggcguggucagagugugggaugugaagaacgccgaccuucugaauaaccaguucgggaccaugccuucccucacacuggcuugucuuaccaaacaaggacaggucgaucugaaugacguugugcaggcccucacggaccugggccugaucuacaccgcgaaguauccgaacgccagcgaucucgaccggcugacacaaucucaucccauucuuaauaugaucgauaccaagaaauccagccugaacaucuccggguacaauuuuucucucggagcugccgugaaggcuggcgccugcaugcuggacgggggaaacaugcuugagacaauuaaagucagcccucagaccauggauggcauccugaaguccauucucaaagugaagaaaacgcugggcauguucaucagcgacacacccggggagcgcaacccuuaugaaaauauucuguacaagaucugucucucuggagauggcuggcccuauauugcguccagaaccagcaucacagggcgggccugggagaacaccguuguggaccuggaaucugauggaaagccucagaaagcuggcagcaauaacuccaauaagucucuucagagcgccggguuugcugccggacugaccuacucccaacucaugacacugaaagacgccaugcugcagcuugauccgaacgcuaagacguggauggacaucgagggcagacccgaggacccugucgaaauugcgcucuaccagcccagcucuggcugcuauauccacuucuuucgcgagccuaccgaucugaaacaguucaagcaagacgccaaguacucccaugggauugaugugacagaccuguuugcugcccagcccggacucaccagcgccguuaucgaagcucugccgcggaauauggugauuacaugucagggcucugaugacaucaaaaagcugcuggagucccaggggagaaaagauaucaagcucauugacaucgcccugagcaaaaccgauucccgcaaguaugaaaacgcggucugggaccaauacaaggaucugugccacaugcauacgggaguggucguggagaaaaagaaacggggcgggaaggaggaaauuacaccucacugugcucuuauggacugcaucauguucgaugccgccguuucuggcggacucaauacccuggugcugagagcuguccucccccgcgacaugguguuucggaccagcacaccuagaguugugcugugaggacuaguaauaaggaaacuguaugaaugucugugggcaggaagugaagagauccuucuguaaagguuuuuggaauuaugucugcugaauaauaaacuuuuuugaaauaauaaaucugguagaaaaaugagaucucaaaggcucuuuucagagccaccaaaaaaaaaaaaaaaaaaaaaaaaaaaaaaaaaaaaaaaaaaaaaaaaaaaaaaaaaaaaaaaaagaauu

SEQ ID NO: 18810 - RNA, 2078 nt, Artificial Sequence
  mRNA product Design b-4 (hSL-A64-N5) comprising derived and/or modified sequence from LASV(G3010-SLE-2013;Clade IV)__AIT17345__SP-HsPLAT_NP(2-569) (opt5)
aggagagucccgcagucggcguccagcggcucugcuuguucgugugugugucguugcaggccuuauucaagcuuaccauggacgccaugaagagaggccugugcugugugcuccugcuuugcggggcugucuucguuagccccagcgccuccaaggagaucaaaucuuuccuguggacccagagccucagacgggaacuguccggcuacugcucuaacauuaaacuucaaguggucaaagacgcucaggcccugcuccacgggcuggauuuuagcgagguuuccaaugugcagcgccuuaugagaaaggaacggcgcgacgauaacgaccugaaaagacuccgggaucugaaucaggcggugaacaaucuggucgagcucaagucuacacaacaaaagagcauccugcgcgugggaacgcuuaccuccgacgaucugcucauucuggcugccgaccuugaaaaacuuaagagcaaaguuacaagaaccgagcggccccucucugccggcguguauauggggaaccuguccagccagcagcuggaucagcgcagagcucuccugucuaugaucggaauguccagcggcguccagggggcccgggcuggacgcgacggcgugguuagagugugggaugucaagaaugccgagcuucugaacaaucaguucggcacaaugccuucucucacccuggcgugucuuacaaaacaggggcaaguggaccugaacgaugugguccaggcccucaccgaccugggacugauuuacacggcuaaguauccgaauaccuccgaccucgaucggcugacacagagccaucccauccuuaacaugaucgacaccaagaaauccucucugaauauuagcggcuacaacuuuucccucggggccgcuguuaaggccggagcgugcaugcuggauggcgggaauaugcuugaaacaaucaaagugagcccucaaaccauggacggcauucugaagucuauccucaaagugaagaaagcccugggaauguucauuuccgagacgcccggcgaacgcaacccuuaugagaacauccuguacaagauuugucucagcggggauggauggcccuauaucgcuucuagaacaagcaucaccggccgggccugggagaauacagucguggaccuggaauccgaugggaagccucagaaagcuggaucuaacaauagcaacaagucccuucagagcgccggcuuuaccgccgggcugaccuacucucagcucaugacacugaaagacgcuaugcugcaacuugauccgaaugcgaagacguggauggacauugagggaagacccgaagauccuguugagguggcccucuaccagcccuccagcggcugcuauauccacuucuuucgcgaaccuaccgaccugaaacaguucaagcaggacgcuaaguacucucauggcauugaugucacagaccuguuugccgcccaacccgggcucaccuccgcugugaucgaugcccugccgcggaacaugguuauuacaugucagggaagcgacgauaucaaaaagcugcuggagucccagggcagaaaagacaucaagcucauugauaucgcgcugucuaaaaccgacagccgcaaguaugagaaugcugugugggaucaguacaaggaccugugccacaugcauacgggggucguggucgaaaagaagaaacggggaggcaaggaggaaauuacaccucacugugcccuuauggauugcaucauguucgacgccgcuguguccgggggccucaacaccucuguucugagagccgugcugccccgcgauauggucuuucggaccagcacaccuagagugguucucugaggacuaguaauaaggaaacuguaugaaugucugugggcaggaagugaagagauccuucuguaaagguuuuuggaauuaugucugcugaauaauaaacuuuuuugaaauaauaaaucugguagaaaaaugagaucucaaaggcucuuuucagagccaccaaaaaaaaaaaaaaaaaaaaaaaaaaaaaaaaaaaaaaaaaaaaaaaaaaaaaaaaaaaaaaaaagaauu

SEQ ID NO: 18811 - RNA, 2078 nt, Artificial Sequence
  mRNA product Design b-4 (hSL-A64-N5) comprising derived and/or modified sequence from LASV(G502-SLE-2009;Clade IV)__AIT17127__SP-HsPLAT_NP(2-569) (opt5)
aggagagucccgcagucggcguccagcggcucugcuuguucgugugugugucguugcaggccuuauucaagcuuaccauggacgccaugaagagaggccugugcugugugcuccugcuuugcggggcugucuucguuagccccagcgccuccaaggagaucaaaucuuuccuguggacccagagccucagacgggaacuguccggcuacugcucuaacauuaagcugcaaguggucaaagacgcucaggcccugcuccacgggcuggauuuuagcgagguuuccaaugugcagcgccuuaugagaaaggaacggcgcgacgauaacgaccugaaaagacuccgggaucugaaucaggcggugaacaaucuggucgagcucaagucuacacaacaaaagagcauccugcgcgugggaacgcuuaccuccgacgaucugcucauucuggcugccgaccuugaaaaacuuaagagcaaaguuaucagaacagagcggccccucucugccggcguguauauggggaaccuguccagccagcagcuggaucagcgcagagcucuccugucuaugauuggaauguccggcgggaaucagggaguccgggccggcaaggacggcgugguucgcgugugggaugucaaaaacgcugagcuucugaauaaccaguucgggaccaugccuagccucacacuggccugucuuaccaagcagggacaaguggaccugaaugaugcggugcaggcccucacagaccugggccugaucuacaccgcuaaguauccgaacacgucugaccucgauagacugacccagucccaucccauccuuaauaugauugacaccaaaaagagcucccugaacaucucuggguacaauuuuagccucggagccgcugucaaagccggcgcgugcaugcuggaugggggaaacaugcuugaaacaauuaagguuuccccucaaacaauggacggcauccugaaaagcauucucaaggugaaaaaggcccugggcauguucaucucugauacccccggggagcggaacccuuaugaaaauauucuguacaagaucugucucuccggagacggcuggcccuauaucgcuagccgcacgucuauuacagggagagccugggagaacaccguggucgaucuggagagcgacggaaaaccucagaaggcuggcuccaauaacucuaauaaaagccuucaguccgccggguuuacagccggacugaccuacagccagcucaugacccugaaggaugcuaugcugcaacuugacccgaacacaaaaacguggauggauaucgaaggccggcccgaggacccuguggaaauugcgcucuaccagcccucuuccggcugcuauauccacuucuuuagagagccuaccgaccugaagcaguucaagcaggaugccaaauacagccaugggauugacguuacagaucuguuugcugcccaacccggacucaccucugccgugaucgacgcucugccgcgcaauauggucaucacaugucagggcuccgaugacauucggaaacuucuggaaagccaggggagaaaggauaucaagcucauugacaucgcccugaacaaaaccgauucccgcaaguaugagaaugcggugugggaccaguacaaggaucugugccacaugcauacgggaguuguggucgagaaaaagaaacggggcgggaaggaagagauuacaccucacugugcucuuauggacugcaucauguucgaugccgccgugucuggcggacucaacaccagcguccugagagcugugcugccccgcgacaugguuuuucggaccuccacaccuagagugguccucugaggacuaguaauaaggaaacuguaugaaugucugugggcaggaagugaagagauccuucuguaaagguuuuuggaauuaugucugcugaauaauaaacuuuuuugaaauaauaaaucugguagaaaaaugagaucucaaaggcucuuuucagagccaccaaaaaaaaaaaaaaaaaaaaaaaaaaaaaaaaaaaaaaaaaaaaaaaaaaaaaaaaaaaaaaaaagaauu

SEQ ID NO: 18812 - RNA, 2078 nt, Artificial Sequence
  mRNA product Design b-4 (hSL-A64-N5) comprising derived and/or modified sequence from LASV(G733-SLE-2010;Clade IV)__AIT17155__SP-HsPLAT_NP(2-569) (opt5)
aggagagucccgcagucggcguccagcggcucugcuuguucgugugugugucguugcaggccuuauucaagcuuaccauggacgccaugaagagaggccugugcugugugcuccugcuuugcggggcugucuucguuagccccagcgccuccaaggagaucaaaucuuuccuguggacccagagccucagacgggaacuguccggcuacugcucuaacauuaagcugcaaguggucaaagacgcucaggcccugcuccacgggcuggauuuuagcgagguuuccaaugugcagcgccuuaugagaaaggaacggcgcgacgauaacgaccugaaaagacuccgggaucugaaucaggcggugaacaaucuggucgagcucaagucuacacaacaaaagagcgugcugcgcguuggaacgcuuaccuccgacgaacugcucgugcuggcugccgaucuugagaaacuuaagagcaaagucaucagaacagagcggccccucucugccggcguguauauggggaaccuguccagccagcagcuggaccagcgcagagcucuccugucuaugauuggaauguccggcgggaaucagggagcccggaccggccgcgauggcguugugagagucugggacgugaagaacgcugaacuucugaauaaccaguucgggacaaugccuagccucacccuggccugucuuacaaaacagggacaaguggaucugaaugacgcgguccaggcccucaccgaucugggccugaucuacacggcuaaguauccgaacaccucugaccucgaccggcugacacagucccaucccauucuuaauaugaucgauaccaagaaaagcucccugaacaucucuggguacaauuuuagccucggagccgcuguuaaggccggcgcgugcaugcuggacgggggaaacaugcuugagacaauuaaaguguccccucaaaccauggauggcauccucaagagcauucugaaagugaagaaagcccugggcauguucaucucugacacgcccggggaacgcaacccuuaugagaauauucuguacaagaucugucucuccggagauggcuggcccuauauugcuagcagaacaucuaucaccgggcgggccugggagaacacagucguggaccuggaaagcgauggaaagccucagaaagcuggcuccaauaacucuaauaagagccuucaguccgccggguuuaccgccggacugaccuacagccagcucaugacacugaaagacgcuaugcugcaacuugauccgaacgcgaagacguggauggacaucgagggcagacccgaagauccuguugagauugcccucuaccagcccucuuccggcugcuauauccacuucuuucgcgaaccuaccgaccugaaacaguucaagcaggacgcuaaguacagccaugggauugaugugacagaccuguuugccgcccaacccggacucaccucugcugucaucgaugcccugccgcggaauauggugauuacaugucagggcuccgacgauaucagaaaacuucuggagagccaggggcgcaaggacaucaaacucauugauaucgcgcuguccaagauugacucucggaaauaugagaacgcuguuugggaucaguacaaggaccugugccacaugcauaccggaguggucguggaaaagaaaaagagaggcgggaaagaggaaaucacgccucacugugcccuuauggauugcauuauguucgacgccgcugucagcggcggacucaauucccuggugcugcgcgccguucucccccgggauaugguguuuagaacaucuaccccucgcgucgugcugugaggacuaguaauaaggaaacuguaugaaugucugugggcaggaagugaagagauccuucuguaaagguuuuuggaauuaugucugcugaauaauaaacuuuuuugaaauaauaaaucugguagaaaaaugagaucucaaaggcucuuuucagagccaccaaaaaaaaaaaaaaaaaaaaaaaaaaaaaaaaaaaaaaaaaaaaaaaaaaaaaaaaaaaaaaaaagaauu

SEQ ID NO: 18813 - RNA, 2078 nt, Artificial Sequence
  mRNA product Design b-4 (hSL-A64-N5) comprising derived and/or modified sequence from MOPV/LASV reassortant(IGS-1;Clade IV)__AFY05578__SP-HsPLAT_NP(2-569) (opt5)
aggagagucccgcagucggcguccagcggcucugcuuguucgugugugugucguugcaggccuuauucaagcuuaccauggacgccaugaagagaggccugugcugugugcuccugcuuugcggggcugucuucguuagccccagcgccuccaaggagaucaaaucuuuccuguggacccagagccucagacgggaacuguccggcuacugcucuaacauuaaacuucaaguggucaaggacgcucaggcccugcuccacgggcuggauuuuagcgagguuuccaaugugcagcgccuuaugagaaaggaacggcgcgacgauaacgaccugaaaagacuccgggaucugaaucaggcggugaacaaucuggucgagcucaagucuacacaacaaaagagcauccugcgcgugggaacgcuuaccuccgacgaucugcucauucuggcugccgaccuugaaaaacugagaagcaagguuauccggacagagcgcccccucucugccggcguguauauggggaaccuguccagccagcagcuggaucagagacgggcucuccugaauaugauuggaaugucuggcgggaaccagggagcccgcgcuggcagagacggcgucgugcggguuugggaugugaaaaaugccgagcuucuguccaaccaguucgggaccaugccuagccucacacuggcgugucuuaccaagcagggacaagucgaccugaaugaugccgugcaggcucucacagaccugggccugaucuacaccgccaaauauccgaacacgucugaccucgaucgccugacccagucccaucccauccuuaauaugauugacacaaagaaaagcucccugaacaucucuggguacaauuuuagccucggagcugccgugaaggcgggcgccugcaugcuggaugggggaaacaugcuugaaaccauuaaggucuccccucaaacaauggacggcauccugaaaagcauucucaagguuaaaaaggcucugggcauguucaucucugauacccccggggagagaaacccuuaugaaaauauucuguacaaaaucugucucuccggagacggcuggcccuauaucgccagccggacgucuauuacagggagagcuugggagaacaccgugguggaucuggagagcgacggaaagccucagaaggccgauuccaauaacucuagcaaaucccuucagagcgccggcuuuacagcugggcugaccuacucucagcucaugacccugaaggacgcgaugcugcaacuugauccgaaugccaaaacauggauggacaucgaaggacgccccgaggacccugucgaaauugcucucuaccagcccuccagcggcugcuauauccacuucuuucgggagccuacggaucugaagcaguucaaacaggacgccaaguacucucauggcauugaugugaccgaccuguuugccacacaacccgggcucaccuccgcuguuaucgaugcccugccgagaaacauggugaucacaugucagggaagcgacgauauucgcaaacuucuggaaucccagggccggaaggacaucaagcucauugauaucgaccugucuaaaaccgauagcagaaaguaugagaaugcggucugggaccaguacaaagaucugugccacaugcauacgggggugguuguggagaagaagaaacgcggaggcaaggaagagauuacaccucacugugcucuuauggacugcaucauguucgacgccgccgucuccgggggccucaacaccucugugcugcgggcuguccugcccagagauaugguguuucgcaccagcacaccucggguugugcucugaggacuaguaauaaggaaacuguaugaaugucugugggcaggaagugaagagauccuucuguaaagguuuuuggaauuaugucugcugaauaauaaacuuuuuugaaauaauaaaucugguagaaaaaugagaucucaaaggcucuuuucagagccaccaaaaaaaaaaaaaaaaaaaaaaaaaaaaaaaaaaaaaaaaaaaaaaaaaaaaaaaaaaaaaaaaagaauu

SEQ ID NO: 18814 - RNA, 2078 nt, Artificial Sequence
  mRNA product Design b-4 (hSL-A64-N5) comprising derived and/or modified sequence from LASV(LM765-SLE-2012;Clade IV)__AIT17815__SP-HsPLAT_NP(2-569) (opt5)
aggagagucccgcagucggcguccagcggcucugcuuguucgugugugugucguugcaggccuuauucaagcuuaccauggacgccaugaagagaggccugugcugugugcuccugcuuugcggggcugucuucguuagccccagcgccuccaaggagaucaaaucuuuccuguggacccagagccucagacgggaacuguccggcuacugcucuaacauuaagcugcaaguggucaaagacgcucaggcccugcuccacgggcuggauuuuagcgagguuuccaaugugcagcgccuuaugagaaaggaacggcgcgacgauaacgaccugaaaagacuccgggaucugaaucaggcggugaacaaucuggucgagcucaagucuacacaacaaaagagcauccugcgcgugggaacgcuuaccuccgacgaucugcucauucuggcugccgaccuugaaaaacuuaagagcaaaguuacaagaaccgagcggccccucucugccggcguguauauggggaaccuguccagccagcagcuggaucagcgcagagcucuccuggacaugaucggaaugucuggcuccaaucagggggcccgggcuggacgcgauggcgucgugagaguuugggacgugaagaacgccgagcuucugaauaaccaguucggcacaaugccuagccucacccuggcgugucuuacaaaacaggggcaagucgaucugaaugacgccgugcaggcucucaccgaccugggacugauuuacacggccaaguauccgaacaccucugaucucgaccggcugacacagucccaucccauccuuaauaugaucgauaccaagaaaagcucccugaacauuucuggcuacaauuuuagccucggggcugccgugaaggcgggagccugcaugcuggacggcgggaacaugcuugaaacaaucaaagucuccccucaaaccauggauggcauucucaagagcauccugaaaguuaagaaagcucugggaauguucauuucugacgcccccggcgagcgcaacccuuaugaaaauauccuguacaagauuugucucuccggggauggauggcccuauaucgcuagcagaacgucuaucacaggccgggccugggagaacaccgugguggaccuggagagcgaugggaagccucagaaagccggauccaauggcucuaacaagagccuucaguccgcuggguuuacagcgggacugaccuacagccagcucaugacccugaaagacgccaugcugcaacuugauccgaaugcuaagacauggauggacauugaaggcagacccgaggacccugucgaaaucgcccucuaccagcccucuuccggcugcuauauucacuucuuucgcgagccuacggaucugaaacaguucaagcaggacgccaaguacagccaugggaucgaugugaccgaccuguuugcugcccaacccggacucacaucugcgguuauugaugcucugccgcggaacauggugaucaccugucagggcuccgacgauaucagaaaacuuuucgaaagccaggggcgcaaggacauuaaacugaucgauauugcccucuccaagacagacucucggaaauaugagaaugccgucugggaucaguacaaggaccugugccacaugcauaccggaaucgugguugagaagaaaaagagaggcgggaaagaagagauuacgccucacugugcucugauggauugcaucauguuugacgccgcugugagcggcggacuuaacacauccguccuccgcgccgugcugccccgggacauggucuucagaaccucuaccccucgcgugguucugugaggacuaguaauaaggaaacuguaugaaugucugugggcaggaagugaagagauccuucuguaaagguuuuuggaauuaugucugcugaauaauaaacuuuuuugaaauaauaaaucugguagaaaaaugagaucucaaaggcucuuuucagagccaccaaaaaaaaaaaaaaaaaaaaaaaaaaaaaaaaaaaaaaaaaaaaaaaaaaaaaaaaaaaaaaaaagaauu

SEQ ID NO: 18815 - RNA, 2078 nt, Artificial Sequence
  mRNA product Design b-4 (hSL-A64-N5) comprising derived and/or modified sequence from LASV(LM776-SLE-2012;Clade IV)__AIT17825__SP-HsPLAT_NP(2-569) (opt5)
aggagagucccgcagucggcguccagcggcucugcuuguucgugugugugucguugcaggccuuauucaagcuuaccauggacgccaugaagagaggccugugcugugugcuccugcuuugcggggcugucuucguuagccccagcgccuccaaggagaucaaaucuuuccuguggacccagagccucagacgggaacuguccucuuacugcagcaacauuaaacuucaaguggucaaggacgcucaggcccugcuccacggccuggauuuuuccgagguuucuaaugugcagcgccuuaugagaaaggaacggcgcgacgauaacgaccugaaaagacuccgggaucugaaucaggcggugaacaaucuggucgagcucaagagcacacaacagaaguccauccugcgcguggggacgcuuaccagcgacgaucugcucauucuggcugccgaccuugaaaaacugaagucuaaaguuacaagaaccgagcggccccucuccgccggaguguauaugggcaaccugagcucucagcagcuggaucaacgcagagcucuccuguccaugaucgggaugagcggaucuaaucagggcgcccgggcugggcgcgacggagucgugagaguuugggaugugaagaacgccgagcuucugaauaaccaguucggcacaaugccuucccucacccuggcgugucuuacaaaacagggccaagucgaccugaaugaugccgugcaggcucucaccgaccuggggcugauuuacacggccaaguauccgaacaccagcgaccucgaucggcugacacagucccaucccauccuuaauaugaucgacaccaagaaaucuagccugaacauuuccggauacaauuuuagccucggcgcugccgugaaggcgggggccugcaugcuggauggaggcaacaugcuugaaacaaucaaagucucuccucaaaccauggacgggauucugaaguccauccucaaaguuaagaaagcucugggaauguucauuagcgauacgcccggcgagcgcaacccuuaugaaaauauccuguacaagauuugucucucuggcgacggguggcccuauaucgccagcagaacauccaucaccggacgggcuugggagaacacagugguggaucuggagucugacggcaagccucagaaagccgggagcaauaacuccaauaagagccuucagucugccggauuuaccgcuggccugaccuacucccagcucaugacacugaaagaugcgaugcugcaacuugacccgaacgccaagacguggauggauauugaagggagacccgaggacccugucgaaguggcucucuaccagcccagcucuggaugcuauauccacuucuuucgcgagccuaccgaccugaaacaguucaagcaggaugccaaguacucccauggcauugacguuacagaucuguuugccgcucaacccggccucaccagcgccgugaucgacgcgcugccgcggaauauggucauuacaugucagggguccgaugacaucagaaaacuucuggaaucucagggacgcaaggauaucaaacucauugacaucgcucugagcaagaccgauucccggaaauaugagaacgccgugugggaccaguacaaggaucugugccacaugcauacgggcguuguggucgagaagaaaaagagagggggaaaagaagagauuacaccucacugugcccuuauggacugcaucauguucgaugcugccgugucuggcgggcucaauaccagcguccugcgcgcugugcugccccgggacaugguuuuuagaaccuccacaccucgcgugguccucugaggacuaguaauaaggaaacuguaugaaugucugugggcaggaagugaagagauccuucuguaaagguuuuuggaauuaugucugcugaauaauaaacuuuuuugaaauaauaaaucugguagaaaaaugagaucucaaaggcucuuuucagagccaccaaaaaaaaaaaaaaaaaaaaaaaaaaaaaaaaaaaaaaaaaaaaaaaaaaaaaaaaaaaaaaaaagaauu

SEQ ID NO: 18816 - RNA, 2078 nt, Artificial Sequence
  mRNA product Design b-4 (hSL-A64-N5) comprising derived and/or modified sequence from LASV(Mad39;Clade IV)__ANH09723__SP-HsPLAT_NP(2-569) (opt5)
aggagagucccgcagucggcguccagcggcucugcuuguucgugugugugucguugcaggccuuauucaagcuuaccauggacgccaugaagagaggccugugcugugugcuccugcuuugcggggcugucuucguuagccccagcgccuccaaggagaucaaaucuuuccuguggacccagagccucagacgggaacuguccggcuacugcucuaacauuaagcugcaaguggucaaagacgcucaggcccugcuccacgggcuggauuuuagcgagguuuccaaugugcagcgccuuaugagaaagcagcggcgcgacgauaacgaccugaaaagacuccgggaucugaaucaagcggugaacaaucuggucgaacucaagucuacacagcaaaagagcgugcugcgcguuggaacgcuuaccuccgacgaucugcucacacuggcugccgaccuugagaaacuuaagagcaaagugaccagaacagaacggccccucaccgccggcgucuauauggggaaccugucuucccagcagcuggaucagcgcagagcucuccugaauaugaucggaaugagcggcgggaaccagggagcccggacaggccgcgacggcgugguuagagugugggaugucaagaaugcugagcuucugaacaaucaguucgggaccaugccuucucucacgcuggccugucuuaccaaacaaggacagguggaccugaacgaugugguccaggcgcucacagaccugggccugauuuacaccgccaaguauccgaauacauccgaccucgaucggcugacccaaagccaucccauccuuaacaugauugacacgaauaagucuucccugaacaucagcggguacaacuuuucccucggagcugccguuaaagcuggcgccugcaugcuggaugggggaaauaugcuugagacaaucaaggugucuccucagaccauggacggcauucugaaaagcauccucaaggugaaaaagucccugggcauguucauuagcgauacacccggggaacgcaacccuuaugagaauauccuguacaaaauuugucucucuggagacggcuggcccuauaucgcguccagaaccagcauuaccgggcgggccugggaaaacacagucguggaucuggagucuggaggcaagccucagaaggcugggagcaauaacuccaauaaaucucuucagagcgccggauuugcugccggccugacguacucccaacucaugacccugaaggacgccaugcugcagcuugauccgaacgcuaaaacauggauggacaucgagggcagacccgaagauccuguugagaucgcgcucuaccagcccauuagcgggugcuauauccacuucuuucgcgaaccuaccgaccugaagcaguucaaacaagacgccaaguacucucauggaauugaugugacagaccuguuugcugcccagcccggccucaccuccgccgucaucgaggcucugccgcggaauauggugauuacgugucaggggagcgaugacaucagaaaacuuuucgaaucucagggacgcaaggauaucaagcugauugacaucgcccucuccaaaacagauagccggaaguaugagaacgcgguuugggaccaauacaaagaucugugccacaugcauaccggcguggucguggagaagaagaaaaagggcgggaaagaagagauuaccccucacugugcucugauggacugcaucauguuugaugccgccgucuccggaggccuuaauacacucgugcugagagcuguucugccccgcgacaugguguuccggaccucuacaccuaaggucgugcucugaggacuaguaauaaggaaacuguaugaaugucugugggcaggaagugaagagauccuucuguaaagguuuuuggaauuaugucugcugaauaauaaacuuuuuugaaauaauaaaucugguagaaaaaugagaucucaaaggcucuuuucagagccaccaaaaaaaaaaaaaaaaaaaaaaaaaaaaaaaaaaaaaaaaaaaaaaaaaaaaaaaaaaaaaaaaagaauu

SEQ ID NO: 18817 - RNA, 2078 nt, Artificial Sequence
  mRNA product Design b-4 (hSL-A64-N5) comprising derived and/or modified sequence from LASV(Z0947-SLE-2011;Clade IV)__AIT17841__SP-HsPLAT_NP(2-569) (opt5)
aggagagucccgcagucggcguccagcggcucugcuuguucgugugugugucguugcaggccuuauucaagcuuaccauggacgccaugaagagaggccugugcugugugcuccugcuuugcggggcugucuucguuagccccagcgccuccaaggagaucaaaucuuuccuguggacccagagccucagacgggaacuguccggcuacugcucuaacauuaagcugcaaguggucaaagacgcucaggcccugcuccacgggcuggauuuuagcgagguuuccaaugugcagcgccuuaugagaaaggaacggcgcgacgauaacgaccugaaaagacuccgggaucugaaucaggcggugaacaaucuggucgagcucaagucuacacaacaaaagagcauccugcgcgugggaacgcuuaccuccgacgaucugcucauucuggcugccgaccuugaaaaacuuaagagcaaaguuacaagaaccgagcggccccucucugccggcguguauauggggaaccuguccagccagcagcuggaucagcgcagagcucuccugaauaugaucggaaugucuggcuccaaccagggggcccggacaggacgcgacggcgucgugagaguuugggaugugaagaaugcugagcuucugaacaaucaguucggcaccaugccuagccucacacuggccugucuuaccaaacaggggcaagucgaccugaacgaugcggugcaggcccucacggaccugggacugauuuacaccgcuaaguauccgaauacaucugaccucgaucggcugacccagucccaucccauccuuaacaugaucgacacaaagaaaagcucccugaauauuucuggcuacaacuuuagccucggggccgcugugaaggccggagcgugcaugcuggauggcgggaacaugcuugaaaccaucaaagucuccccucaaacgauggacggcauucucaagagcauccugaaaguuaagaaagcccugggaauguucauuucugaugcucccggcgagcgcaauccuuaugaaaacauccuguacaagauuugucucuccggggacggauggcccuauaucgccagcagaacaucuaucaccggccgggcuugggagaauacagugguggaucuggagagcgacgggaagccucagaaagccggauccaacggcucuaauaagagccuucaguccgccggguuuaccgcuggacugaccuacagccagcucaugacacugaaagaugcgaugcugcaacuugacccgaacgccaagacguggauggauauugaaggcagacccgaggacccugucgaaaucgcucucuaccagcccucuuccggcugcuauauucacuucuuucgcgagccuaccgaccugaaacaguucaagcaggaugccaaguacagccaugggaucgacgugacagaucuguuugccgcucaacccggacucaccucugccguuauugacgcgcugccgcggaauauggugaucacaugucagggcuccgaugacaucagaaaacuuuucgaaagccaggggcgcaaggauauuaaacugaucgacauugcucucuccaagaccgauucucggaaauaugagaacgccgucugggaccaguacaaggaucugugccacaugcauacgggaaucgugguugagaagaaaaagagaggcgggaaagaagagauuacaccucacugugcccugauggacugcaucauguuugaugcugccgugagcggcggacuuaauaccuccguccuccgcgcugugcugccccgggacauggucuucagaaccucuacaccucgcgugguucugugaggacuaguaauaaggaaacuguaugaaugucugugggcaggaagugaagagauccuucuguaaagguuuuuggaauuaugucugcugaauaauaaacuuuuuugaaauaauaaaucugguagaaaaaugagaucucaaaggcucuuuucagagccaccaaaaaaaaaaaaaaaaaaaaaaaaaaaaaaaaaaaaaaaaaaaaaaaaaaaaaaaaaaaaaaaaagaauu

SEQ ID NO: 18818 - RNA, 2109 nt, Artificial Sequence
  mRNA product Design b-4 (hSL-A100) comprising derived and/or modified sequence from LASV(Josiah;Clade IV)__NP_694869__SP-HsPLAT_NP(2-569) (opt1)
aggagagucccgcagucggcguccagcggcucugcuuguucgugugugugucguugcaggccuuauucaagcuuaccauggacgccaugaagcgcggccugugcugcgugcuccugcugugcggggccgucuucgugagccccagcgccuccaaggagaucaagagcuuccuguggacccagucccuccgccgggagcugagcggcuacugcuccaacaucaagcuccagguggucaaggacgcccaggcgcugcugcacgggcuggacuucagcgagguguccaacgugcagcgccucaugcggaaggagcgccgggacgacaacgaccugaagcgccugcgggaccucaaccaggccgucaacaaccugguggagcucaagagcacccagcagaaguccauccugcgcgugggcacccugaccagcgacgaccugcucauccuggccgccgaccuggagaagcucaaguccaaggucauccggaccgagcgcccccugagcgccgggguguacaugggcaaccuguccagccagcagcucgaccagcggcgcgcgcugcugaacaugaucgggauguccggcggcaaccagggggcccgggccggccgcgacggggugguccgggugugggacgugaagaacgccgagcuccugaacaaccaguucggcaccaugccgagccugacgcucgcgugccugaccaagcaggggcaggucgaccugaacgacgccgugcaggcccucaccgaccugggccugaucuacaccgccaaguaccccaacacguccgaccucgaccgccugacccagagccaccccauccugaacaugaucgacaccaagaaguccagccucaacaucagcggcuacaacuucucccugggggccgcggugaaggccggcgccugcaugcuggacgggggcaacaugcucgagaccaucaaggucagcccccagacgauggacggcauccugaaguccauccugaaggugaagaaggcccucgggauguucaucagcgacaccccgggcgagcggaaccccuacgagaacauccuguacaagaucugccuguccggggacggcuggcccuacaucgccagccgcaccuccaucaccgggcgggcgugggagaacacgguggucgaccucgagagcgacggcaagccccagaaggccgacuccaacaacagcuccaagagccugcaguccgccggcuucaccgccgggcugaccuacagccagcucaugacccugaaggacgccaugcugcagcuggacccgaacgcgaagacguggauggacaucgagggccgccccgaggaccccguggagaucgcccucuaccagcccuccagcgggugcuacauccacuucuuccgggagccgaccgaccugaagcaguucaagcaggacgccaaguacucccacggcaucgacgugaccgaccuguucgccacccagcccgggcucacgagcgccgucaucgacgcgcugccccgcaacauggugaucacgugccagggcuccgacgacauccgcaagcugcucgagagccagggccggaaggacaucaagcugaucgacaucgcccugagcaagaccgacucccgcaaguacgagaacgccgugugggaccaguacaaggaccucugccacaugcacaccggggucguggucgagaagaagaagcggggcgggaaggaggagaucaccccgcacugcgcccugauggacugcaucauguucgacgcggccgugagcggcgggcugaacaccuccgugcuccgcgccguccugccccgggacaugguguuccgcaccagcacgccccgggugguccugugaggacuaguaauaaggaaacuguaugaaugucugugggcaggaagugaagagauccuucuguaaagguuuuuggaauuaugucugcugaauaauaaacuuuuuugaaauaauaaaucugguagaaaaaugagaucucaaaggcucuuuucagagccaccaaaaaaaaaaaaaaaaaaaaaaaaaaaaaaaaaaaaaaaaaaaaaaaaaaaaaaaaaaaaaaaaaaaaaaaaaaaaaaaaaaaaaaaaaaaaaaaaaaaaa

SEQ ID NO: 18819 - RNA, 2109 nt, Artificial Sequence
  mRNA product Design b-4 (hSL-A100) comprising derived and/or modified sequence from LASV(LP;Clade I)__AAF86702__SP-HsPLAT_NP(2-569) (opt1)
aggagagucccgcagucggcguccagcggcucugcuuguucgugugugugucguugcaggccuuauucaagcuuaccauggacgccaugaagcgcggccugugcugcgugcuccugcugugcggggccgucuucgugagccccagcaacuccaaggagaucaagagcuuccuguggacccagucccuccgccgggagcugagcggcuacugcuccaacaucaagcuccagguggucaaggacgcccaggcccugcugcacgggcuggacuucagcgagguguccaacgugcagcgccucaugcggaagcagaagcgcgacgacgcggaccugaagcggcugcgcgaccucaaccaggccgucaacaaccugguggagcucaagagcacccagcagaagaacgugcugcgggucggcacgcuguccagcgacgaccugaucacccucgccgccgaccuggagaagcugaaguccaaggugauccgcaccgagcggccccucagcuccgggguguacaugggcaaccugagcucccagcagcuggaccagcgccgggcccuccugagcaugaucgggauguccggcggcccgcaggggaaccgcaccggcggggacggcgucgugcgggugugggacgucaagaacgcggagcugcucaacaaccaguucgggacgaugcccagccugacccuggccugccucaccaagcagggccagguggaccugaacgacgccgugcaggcccugaccgaccucggccugaucuacacggcgaaguaccccaacuccagcgaccuggacaugcucacccagagccaccccauccuggggauggucgacaccaagaaguccagccugaacaucuccggcuacaacuucagccucggggccgccgugaaggccggcgccugcaugcuggacggcgggaacaugcuggagaccaucaagguguccccgcagacgauggacggcauccucaagagcauccugaaggucaagcgcucccuggggauguucaucagcgacacccccggcgagcggaaccccuacgagaacauccucuacaagaucugccuguccggggagggcuggcccuacaucgcgagccgcaccuccaucaccggccgggccugggagaacacgcugguggaccucgagagcgacaacaagccgcccaagcugaacuccgccgggagcaacaagucccugcaggccgccggccucaacgcggggcugaccuacagccagcugaugacccugaaggacugcaugcuccagcuggaccccuccagcaagaccuggaucgacaucgagggccgccccgaggacccgguggagaucgcccuguuccagcccuccagcgggugcuacauccacuucuuccgggagcccacggaccucaagcaguucaagcaggacgccaaguacagccacggcaucgacgucaccgaccuguucuccacccagcccggccugaccagcgccgugaucgaggcccucccgcgcaacauggugcugacgugccagggguccgacgacaucaagaagcugcucgagagccagggccggcgcgacaucaagcugaucgacaucucccugagcaaggcggacucccgcaaguucgagaacgccgucugggaccaguacaaggaccucugccacaugcacaccgggguggucguggagaagaagaagcggggcgggaaggaggagaucacgccccacugcgcccugcuggacugcaucauguucgacgccgccaccaccggcagccucaacaucaccacccugcgcgcggugcugccccgggacauggucuuccgcaccuccacgcccaagguggugcucugaggacuaguaauaaggaaacuguaugaaugucugugggcaggaagugaagagauccuucuguaaagguuuuuggaauuaugucugcugaauaauaaacuuuuuugaaauaauaaaucugguagaaaaaugagaucucaaaggcucuuuucagagccaccaaaaaaaaaaaaaaaaaaaaaaaaaaaaaaaaaaaaaaaaaaaaaaaaaaaaaaaaaaaaaaaaaaaaaaaaaaaaaaaaaaaaaaaaaaaaaaaaaaaaa

SEQ ID NO: 18820 - RNA, 2109 nt, Artificial Sequence
  mRNA product Design b-4 (hSL-A100) comprising derived and/or modified sequence from LASV(803213;Clade II)__AAF86704__SP-HsPLAT_NP(2-569) (opt1)
aggagagucccgcagucggcguccagcggcucugcuuguucgugugugugucguugcaggccuuauucaagcuuaccauggacgccaugaagcgcggccugugcugcgugcuccugcugugcggggccgucuucgugagccccagcgccuccaaggaggugaaguccuuccuguggacccagagccuccgccgggagcugagcggcuacugcuccaacaucaagcugcaggucgugaaggacgcccaggcgcuccugcacgggcuggacuucagcgaggugaacaacguccagcgccucaugcggaagcagaagcgcgacgacggcgaccugaagcggcugcgcgaccucaaccaggccgugaacaaccugguggagcugaaguccacccagcagaaguccauccuccgggucgggacgcugaccagcgacgaccugcucacccuggccgccgaccuggagaagcucaagagcaaggugauccgcaccgagcggccccuguccagcggcguguacauggggaaccuguccacgcagcagcucgagcagcgccgggcccugcugaacaugaucggcauggucggcggggcgcagggcacccagccggggcgcgacggcguggugcgggucugggacgugaagaaccccgaccuccugaacaaccaguucgggaccaugcccagccugacccucgccugccugacgaagcagggccagguggaccugaacgacgccguccucgcccugaccgaccugggccucaucuacaccgcgaaguaccccaacuccagcgaccuggaccgccugucccagagccacccgauccucaacaugguggacaccaagaaguccagccugaacaucagcggguacaacuucucccugggcgccgccgugaaggccggggccugcaugcucgacggcggcaacaugcuggagacgaucaaggucacgccccagaccauggacgggauccucaagagcauccugaaggugaagcggucccugggcauguucgugagcgacacccccggggagcgcaaccccuacgagaacauccuguacaagaucugccucuccggcgacggguggccguacaucgcgagccggaccuccaucgucggccgcgccugggagaacaccaccguggaccuggagagcgacggcaagccccagaagguggggaccgccggcuccaacaagagccugcaguccgccggguuccccacgggccucaccuacagccagcugaugacccugaaggacuccaugaugcagcuggaccccagcgccaagaccuggaucgacaucgaggggcggccggaggaccccgucgagaucgcgcucuaccagcccauguccggcugcuacauccacuucuuccgcgagcccacggaccugaagcaguucaagcaggacgccaaguacagccacggcaucgacguggccgaccuguucccggcccagcccgggcucaccuccgccgucaucgaggcgcugccccggaacauggugcugaccugccagggcagcgacgacaucaagaagcuccuggacucccaggggcgccgcgacaucaagcugaucgacaucagccucagcaagguggacucccggaaguucgagaacgccgucugggaccagugcaaggaccugugccacaugcacaccggcgugguggucgagaagaagaagcgcgggggcaaggaggagaucacgccccacugcgcccugauggacugcaucauguucgacgccgccgugagcggcgggcucaacaucccggugcugcgggcgguccugccccgcgacaugguguuccggaccuccagccccaaggugguccucugaggacuaguaauaaggaaacuguaugaaugucugugggcaggaagugaagagauccuucuguaaagguuuuuggaauuaugucugcugaauaauaaacuuuuuugaaauaauaaaucugguagaaaaaugagaucucaaaggcucuuuucagagccaccaaaaaaaaaaaaaaaaaaaaaaaaaaaaaaaaaaaaaaaaaaaaaaaaaaaaaaaaaaaaaaaaaaaaaaaaaaaaaaaaaaaaaaaaaaaaaaaaaaaaa

SEQ ID NO: 18821 - RNA, 2112 nt, Artificial Sequence
  mRNA product Design b-4 (hSL-A100) comprising derived and/or modified sequence from LASV(GA391;Clade III)__CAA36646__SP-HsPLAT_NP(2-570) (opt1)
aggagagucccgcagucggcguccagcggcucugcuuguucgugugugugucguugcaggccuuauucaagcuuaccauggacgccaugaagcgcggccugugcugcgugcuccugcugugcggggccgucuucgugagccccagcgccuccaaggaggugcgcagcuuccuguggacccagucccuccggcgcgagcugagcggcuacugcuccaacaucaagcugcaggucgugaaggacgcccaggcgcuccugcacgggcuggacuucagcgagguguccaacguccagcggcucaugcgcaagcagaagcgggacgacggcgaccugaagcgccugcgggaccucaaccaggccgugaacaaccugguggagcucaagagcacccagcagaaguccguccugcgcguggggacccugagcuccgacgaccugcucauccuggccgccgaccuggagaagcucaagagcaaggugacccggaccgagcgcccccuguccagcggcgucuacauggggaaccuguccagccagcagcucgaccagcggcgcgcccugcugaacaugaucggcaugaccggcguguccgggggcgggaagggcgcgagcgacgggaucgugcgggucugggacgugaagaacgccgagcuccugaacaaccaguucggcacgaugccgucccugacccucgccugccugaccaagcagggccagguggaccugaacgacgccguccaggcgcucaccgaccuggggcugaucuacacggccaaguaccccaacagcagcgaccucgaccgccugucccagagccaccccauccugaacaugaucgacaccaagaaguccagccucaacaucuccggcuacaacuucagccugggggccgccgugaaggccggcgcgugcaugcuggacggcgggaacaugcucgagaccaucaaggugagcccccagaccauggacggcauccucaaguccauccugaaggucaagaagucccuggggauguucgugagcgacacgccgggcgagcggaaccccuacgagaacauccuguacaagaucugccuguccggggacggcuggcccuacaucgccagccgcaccuccaucgugggccgggccugggagaacaccgucguggaccucgagcaggacaacaagccccagaagaucgggaacggcgggagcaacaagucccugcagagcgccggcuucgccgcggggcugaccuacucccagcucaugacgcugaaggacuucaagugcuucaaccugaucccgaacgccaagaccuggauggacaucgagggccgccccgaggaccccguggagaucgcccuguaccagcccagcuccggcugcuacguccacuucuuccgggagccgaccgaccucaagcaguucaagcaggacgccaaguacagccacgggaucgacgugaccgaccuguucgccgcgcagcccggccugacgagcgccgucaucgaggcccucccccgcaacauggugaucacgugccagggguccgaggacauccggaagcugcuggagagccagggccgccgcgacaucaagcucaucgacaucacccuguccaaggccgacagccggaaguucgagaacgccgugugggaccaguucaaggaccugugccacaugcacaccggggucgugguggagaagaagaagcgcggcggcaaggaggagaucacgccccacugcgcgcucauggacugcaucauguucgacgccgccgucuccgggggccuggacgccaaggugcugcgggugguccucccgcgcgacaugguguuccggaccagcacccccaaggugguccugugaggacuaguaauaaggaaacuguaugaaugucugugggcaggaagugaagagauccuucuguaaagguuuuuggaauuaugucugcugaauaauaaacuuuuuugaaauaauaaaucugguagaaaaaugagaucucaaaggcucuuuucagagccaccaaaaaaaaaaaaaaaaaaaaaaaaaaaaaaaaaaaaaaaaaaaaaaaaaaaaaaaaaaaaaaaaaaaaaaaaaaaaaaaaaaaaaaaaaaaaaaaaaaaaa

SEQ ID NO: 18822 - RNA, 2109 nt, Artificial Sequence
  mRNA product Design b-4 (hSL-A100) comprising derived and/or modified sequence from LASV(AV;Clade V)__CCA30315__SP-HsPLAT_NP(2-569) (opt1)
aggagagucccgcagucggcguccagcggcucugcuuguucgugugugugucguugcaggccuuauucaagcuuaccauggacgccaugaagcgcggccugugcugcgugcuccugcugugcggggccgucuucgugagccccagcgccuccaaggaggugaaguccuuccuguggacccagagccuccgccgggagcugagcggcuacugcuccaacaucaagcugcaggucgugaaggacgcccaggcgcuccugcacgggcuggacuucagcgagguguccaacguccagcgccucaugcggaagcagcgccgggacgacagcgaccugaagcgccugcgggaccucaaccaggccgugaacaaccugguggagcugaaguccacccagcagaaguccguccuccgcgugggcacgcugagcagcgacgaccugcucacccuggccgccgaccuggagaagcucaaguccaaggugacccggaccgagcgcccccugagcuccggggucuacaugggcaaccugagcucccagcagcucgaccagcggcgcgcccugcugaaccucaucgggaugacgaacggcagccagggcucccaggcggggcgggacggcguggugcgcgucugggacgugaagaacgccgagcugcugaacaaccaguucgggaccaugccgagccucacccuggccugccugaccaagcagggccagguggaccucaacgacgucgugcaggcccugacggaccuggggcucaucuacaccgcgaaguaccccaacaccagcgaccuggaccggcugacccagucccaccccauccucaacaugaucgacacgaagaaguccagccugaacaucagcggcuacaacuucucccugggcgccgccgugaaggccggggccugcaugcucgacggcgggaacaugcuggagaccaucaaggucagcccccaguccauggacggcauccucaagagcauccugaaggugaagcgcgcgcugggcauguucguguccgacaccccgggggagcggaaccccuacgagaacauccuguacaagaucugccucagcggcgacggguggcccuacaucgccucccgcaccagcaucgucggccgggccugggagaacacggugguggaccuggagaccgacgggaagccccagaagaucggcuccggcaacagcaacaagucccugcagagcgccggguucuccgccggccucaccuacagccagcugaugacccugaaggacgcgaugcugcagcucgacccgaacgccaagacguggauggacaucgaggggcgccccgaggaccccgucgagguggcccuguaccagcccaucuccggcugcuacauccacuucuuccgggagccgaccgaccugaagcaguucaagcaggacgccaaguacagccacgggaucgacaucgccgaccucuucgcggcccagcccggccugaccagcgccgucaucgaggcccugccccgcaacauggugaucacgugccagggcuccgaggacaucaagaagcuccuggagagccaggggcgcaaggacaucaagcugaucgacaucgcccucuccaagaucgacagccggaaguucgagaacgcggugugggaccaguacaaggaccugugccacaugcacaccggcgucgugguggagaagaagaagcgcgggggcaaggaggagaucaccccgcacugcgcccugauggacugcaucauguucgacgccgccgucuccgggggccucaacacccuggugcugcgggcggugcucccccgcgacauggucuuccggaccagcacgccccgcguggugcugugaggacuaguaauaaggaaacuguaugaaugucugugggcaggaagugaagagauccuucuguaaagguuuuuggaauuaugucugcugaauaauaaacuuuuuugaaauaauaaaucugguagaaaaaugagaucucaaaggcucuuuucagagccaccaaaaaaaaaaaaaaaaaaaaaaaaaaaaaaaaaaaaaaaaaaaaaaaaaaaaaaaaaaaaaaaaaaaaaaaaaaaaaaaaaaaaaaaaaaaaaaaaaaaaa

SEQ ID NO: 18823 - RNA, 2109 nt, Artificial Sequence
  mRNA product Design b-4 (hSL-A100) comprising derived and/or modified sequence from LASV(Togo/2016/7082;Clade VI)__AMR44578__SP-HsPLAT_NP(2-569) (opt1)
aggagagucccgcagucggcguccagcggcucugcuuguucgugugugugucguugcaggccuuauucaagcuuaccauggacgccaugaagcgcggccugugcugcgugcuccugcugugcggggccgucuucgugagccccagcaacuccaaggaggugaaguccuuccuguggacccagagccuccgccgggagcugagcggcuacugcuccaacaucaagcugcaggucgugaaggacgcccaggcccuccugcacgggcuggacuucagcgagguguccaacguccagcgccucaugcggaagcagaagcgcgacgacggcgaccugaagcggcugcgcgaccucaaccaggcggugaacaaccugguggagcucaagagcguccagcagaaguccauccugcggguggggacccugaccagcgacgaccugcucacccuggccgccgaccuggagaagcucaaguccaaggugacccgcaccgagcggccccugagcuccggcgucuacauggggaaccugagcucccagcagcucgaccagcgccgggcccugcugagcaugaucggcauguccggcgggaaccagaacagccagccgaagggcgacgggguggugcgcgucugggacgugaagaacgccgaccuccugaacaaccaguucggcacgaugcccucccugacccucgcgugccugaccaagcagggccagguggaccugaacgacgccguccaggcccucaccgaccuggggcugaucuacacggccaaguaccccaacagcagcgaccucgaccggcugucccagagccaccccauccugaacaugaucgacaccaagaaguccagccucaacaucuccggcuacaacuucagccugggggcggccaucaagaccggcgccugcaugcuggacgggggcaacaugcucgagaccaucaaggugacgccgcagaccauggacggcauccugaaguccauccugaaggugaagcgcagccucgggauguucaucuccgacacccccggcgagcggaaccccuacgagaacauccuguacaagaucugccugagcggggacggcuggcccuacaucgccucccgcaccgccaucaucgggcgggcgugggagaacacggucguggaccucgagagcgacuccaagccgcagaagaucggcagcaacggcuccaacaagagccugcaguccgccggguucgcccccggccugaccuacagccagcucaugacccugaaggacuccaugcugcagcuggaccccaacgccaagaccuggaucgacaucgaggggcgccccgaggacccgguggaggucgcccucuuccagcccaucagcggcugcuacauccacuucuuccgggagcccacggaccugaagcaguucaagcaggacgcgaaguacagccacgggaucgacgugaccgaccuguucgccgcccagcccggccucaccuccgccgugaucgaggcccugccgcgcaacaugguccugaccugccagggcagcgacgacaucaagaagcuccuggacucccaggggcggcgcgacaucaagcugaucgacgugagccucaacaagaucgacucccgcaaguucgagaacgcggucugggaccaguacaaggaccugugccacaugcacacgggcgugguggucgagaagaagaagaagggcgggaaggaggagaucacgccccacugcgcccugcucgacugcaucauguucgacgccgccgugagcgggggccugaacgccaccgugcugcgggcgguccucccccgcgacaugguguuccggaccuccagccccaaggugguccugugaggacuaguaauaaggaaacuguaugaaugucugugggcaggaagugaagagauccuucuguaaagguuuuuggaauuaugucugcugaauaauaaacuuuuuugaaauaauaaaucugguagaaaaaugagaucucaaaggcucuuuucagagccaccaaaaaaaaaaaaaaaaaaaaaaaaaaaaaaaaaaaaaaaaaaaaaaaaaaaaaaaaaaaaaaaaaaaaaaaaaaaaaaaaaaaaaaaaaaaaaaaaaaaaa

SEQ ID NO: 18824 - RNA, 2109 nt, Artificial Sequence
  mRNA product Design b-4 (hSL-A100) comprising derived and/or modified sequence from LASV(KAK-428;Clade n.d. (VII))__ANH09741__SP-HsPLAT_NP(2-569) (opt1)
aggagagucccgcagucggcguccagcggcucugcuuguucgugugugugucguugcaggccuuauucaagcuuaccauggacgccaugaagcgcggccugugcugcgugcuccugcugugcggggccgucuucgugagccccagcaacuccaaggaggugaaguccuuccuguggacccagagccuccgccgggagcugagcggcuacugcaccaacaucaagcugcaggucgugaaggacgcccaggcccuccugcacgggcuggacuucuccgaggugagcaacguccagcgccucaugcggaagcagaagcgcgacgacaacgaccugaagcggcugcgcgaccucaaccaggcggugaacaaccugguggagcugaaguccguccagcagaaguccgugcucaaggugggcacgcugaacagcgacgaccugcucacccuggccgccgaccuggagaagcucaagagcaaggucgugcggaccgagcgcccccuguccagcgggguguacaugggcaaccuguccagccagcagcucgaccagcggcgcgcccugcugaacaugaucgggauggccggcggcucccaggggaaccagccgagccgggacggcgucgugcgcgugugggacgucaagaacgcggaccuccugaacaaccaguucgggaccaugcccucccugacgcucgccugccugaccaagcagggccagguggaccugaacgacgugguccucgcccugaccgaccuggggcucaucuacaccgccaaguaccccaacagcuccgaccuggaccggcugagccagaaccaccccgugcucaacaugaucgacgugaacaagagcucccugaacaucagcggcuacaacuucucccugggcgcggccgucaaggccggggccugcaugcucgacggcgggaacaugcuggagacgaucaagaucagcccgcagaccguggacggcauccugaaguccauccucaaggugaagcgcgcccugggcauguucgucagcgacacccccggggagcggaaccccuacgagaacauccuguacaaggugugccucuccggcaacggguggcccuacaucgcgagccgcaccuccaucgucggccgggccugggagaacacggugguggaccuggagagcaacaagaaccagccgaaggucgggaacaacggcuccaacaagaugcugcagagcuccggcuucgccaccgggcucaccuacagccagcugaugacccugcgcgacuccaugcugcagcucgaccccacggccaagaccuggaucgacaucgagggccggcccgaggaccccguggagcuggcccuguuccagccgagcuccgggugcuacauccacuucuuccgcgagcccaccgaccucaagcaguucaagcaggacgcgaaguacagccacggcaucgacgugaacgaccuguucuccgcccagcccgggcugaccagcgccguccucgaggcccugccccggaacauggugcugacgugccagggcagcgacgacauccgcaagcuccuggacucccaggaccgcaaggacaucaagcugaucgacaucagccucuccaaggccgacgcgcggaaguucgagaacgacgugugggaccaguucaaggaccugugccacaugcacaccggcaucgucguggagaagaagaagaagggcgggaagcaggagaugaccccgcacugcgcccugcucgacugcaucauguucgacgccgccgugagcgggggccugaacguccccacccugcgcgccgugcuccccacggacaugguguuccggaccaucaccaccaaggucgugcugugaggacuaguaauaaggaaacuguaugaaugucugugggcaggaagugaagagauccuucuguaaagguuuuuggaauuaugucugcugaauaauaaacuuuuuugaaauaauaaaucugguagaaaaaugagaucucaaaggcucuuuucagagccaccaaaaaaaaaaaaaaaaaaaaaaaaaaaaaaaaaaaaaaaaaaaaaaaaaaaaaaaaaaaaaaaaaaaaaaaaaaaaaaaaaaaaaaaaaaaaaaaaaaaaa

SEQ ID NO: 18825 - RNA, 2109 nt, Artificial Sequence; identical to SEQ ID NO: 18819
  mRNA product Design b-4 (hSL-A100) comprising derived and/or modified sequence from LASV(Pinneo-NIG-1969;Clade I)__AIT17837__SP-HsPLAT_NP(2-569) (opt1)

SEQ ID NO: 18826 - RNA, 2109 nt, Artificial Sequence
  mRNA product Design b-4 (hSL-A100) comprising derived and/or modified sequence from LASV(ISTH0009-NIG-2011;Clade II)__AIT17405__SP-HsPLAT_NP(2-569) (opt1)
aggagagucccgcagucggcguccagcggcucugcuuguucgugugugugucguugcaggccuuauucaagcuuaccauggacgccaugaagcgcggccugugcugcgugcuccugcugugcggggccgucuucgugagccccagcguguccaaggaggucaagagcuuccuguggacccagucccuccgccgggagcugagcggcuacugcuccaacaucaagcuccagguggugaaggacgcccaggcccugcugcacgggcuggacuucagcgaggucuccaacgugcagcgccucaugcggaagcagaagcgcgacgacagcgaccugaagcggcugcgcgaccucaaccaggcggugaacaaccuggucgagcugaaguccacccagcagaaguccauccuccgggugggcacccugaccagcgacgaccugcucacccuggccgccgaccuggagaagcucaagagcaaggugauccgcaccgagcggccccuguccagcggggucuacaugggcaaccuguccacgcagcagcucgagcagcgccgggcccugcugaacaugaucgggauggugggcggcgcccaggggacccagccgggccgcgacggggugguccgggugugggacgugaagaaccccgaccuccugaacaaccaguucggcaccaugcccagccugacccucgcgugccugacgaagcaggggcaggucgaccugaacgacgccgugcucgcccugaccgaccugggccucaucuacaccgccaaguaccccaacuccagcgaccuggaccgccugucccagagccacccgauccucaacaugguggacaucaagaaguccagccugaacaucagcggcuacaacuucucccugggggcggccgucaaggccggcgccugcaugcucgacgggggcaacaugcuggagaccaucaaggugacgccccagaccauggacggcauccucaagagcauccugaaggugaagcggucccuggggauguucgucagcgacacccccggcgagcgcaaccccuacgagaacauccuguacaagaucugccucuccggggacggcuggccguacaucgccagccggaccuccaucguggggcgcgcgugggagaacacgaccguggaccuggagagcgacggcaagccccagaaggucggcuccgccgggagcaacaagucccugcagagcgccggcuuccccaccgggcucaccuacucccagcugaugacgcugaaggacagcaugaugcagcuggaccccuccgccaagaccuggaucgacaucgagggccggccggaggaccccguggagaucgcccucuaccagcccaugagcgggugcuacauccacuucuuccgcgagcccaccgaccugaagcaguucaagcaggacgcgaaguacucccacggcaucgacgucgccgaccuguucccggcccagcccggccucaccagcgccgugaucgaggcccugccccggaacauggugcugacgugccaggggagcgacgacaucaagcgccuccuggacucccagggccgccgggacaucaagcugaucgacaucgcgcucagcaaggccgacucccgccgguucgagaacgccgucugggaccagugcaaggaccugugccacaugcacaccggggugguggucgagaagaagaagcgcggcgggaaggaggagaucacgccccacugcgcccugauggacugcaucauguacgacgccgcggugagcggcggccucaacaucccggugcugcgggccguccugccccgcgacaugguguuccggaccuccagccccaaggugguccucugaggacuaguaauaaggaaacuguaugaaugucugugggcaggaagugaagagauccuucuguaaagguuuuuggaauuaugucugcugaauaauaaacuuuuuugaaauaauaaaucugguagaaaaaugagaucucaaaggcucuuuucagagccaccaaaaaaaaaaaaaaaaaaaaaaaaaaaaaaaaaaaaaaaaaaaaaaaaaaaaaaaaaaaaaaaaaaaaaaaaaaaaaaaaaaaaaaaaaaaaaaaaaaaaa

SEQ ID NO: 18827 - RNA, 2109 nt, Artificial Sequence
  mRNA product Design b-4 (hSL-A100) comprising derived and/or modified sequence from LASV(ISTH2010-NIG-2012;Clade II)__AIT17483__SP-HsPLAT_NP(2-569) (opt1)
aggagagucccgcagucggcguccagcggcucugcuuguucgugugugugucguugcaggccuuauucaagcuuaccauggacgccaugaagcgcggccugugcugcgugcuccugcugugcggggccgucuucgugagccccagcgccuccaaggaggugaaguccuuccuguggacccagagccuccgccgggagcugagcggcuacugcuccaacaucaagcugcaggucgugaaggacgcccaggcgcuccugcacgggcuggacuucagcgagguguccaacguccagcgccucaugcggaagcagaagcgcgacgacagcgaccugaagcggcugcgcgaccucaaccaggccgugaacaaccugguggagcugaaguccacccagcagaaguccauccuccgggucggcacgcugaccagcgacgaccugcucacccuggccgccgaccuggagaagcucaagagcaaggugauccgcaccgagcggccccuguccagcgggguguacaugggcaaccuguccacgcagcagcucgagcagcgccgggcccugcugaaccucaucgggauggucggcggcgcgcaggggacccagccgggccgcgacgggguggugcgggucugggacgugaagaaccccgaccugcugaacaaccaguucggcaccaugcccagccucacccuggccugccugacgaagcagggccagguggaccucaacgacgccguccuggcccugaccgaccucgggcugaucuacaccgcgaaguaccccaacuccagcgaccuggaccgccucucccagagccacccgauccugaacaugguggacaccaagaaguccagccugaacaucagcggcuucaacuucucccucggggccgccgugaaggccggcgccugcaugcuggacgggggcaacaugcuggagacgaucaaggucacgccccagaccauggacggcauccucaagagcauccugaaggugaagaagucccuggggauguucgugagcgacacccccggcgagcggaaccccuacgagaacauccucuacaagaucugccuguccggggacggcuggccguacaucgcgagccgcaccuccaucgucgggcgggccugggagaacaccaccguggaccuggagagcgacggcaagccccacaaggugggcaccgccggguccaacaagagccuccaguccgccggcuuccccacggggcugaccuacagccagcugaugacccugaaggacuccaugaugcagcucgaccccagcgccaagaccuggaucgacaucgagggccgcccggaggaccccgucgagaucgcgcuguaccagcccauguccgggugcuacauccacuucuuccgggagcccacggaccugaagcaguucaagcaggacgccaaguacagccacggcaucgacguggccgaccucuucccggcccagcccggccugaccuccgccgucaucgaggcgcugccccgcaacauggugcugaccugccaggggagcgacgacaucaagcggcuccuggacagccagggccgccgcgacaucaagcucaucgacaucgcccuguccaaggccgacagccggcgcuucgagaacgccgugugggaccagugcaaggaccugugccacaugcacaccggggucgugguggagaagaagaagcggggcgggaaggaggagaucacgccccacugcgcccucauggacugcaucauguacgacgcggccgucuccggcggccugaacaucccggugcugcgcgccgugcucccccgggacauggucuuccgcaccagcucccccaagguggugcugugaggacuaguaauaaggaaacuguaugaaugucugugggcaggaagugaagagauccuucuguaaagguuuuuggaauuaugucugcugaauaauaaacuuuuuugaaauaauaaaucugguagaaaaaugagaucucaaaggcucuuuucagagccaccaaaaaaaaaaaaaaaaaaaaaaaaaaaaaaaaaaaaaaaaaaaaaaaaaaaaaaaaaaaaaaaaaaaaaaaaaaaaaaaaaaaaaaaaaaaaaaaaaaaaa

SEQ ID NO: 18828 - RNA, 2109 nt, Artificial Sequence
  mRNA product Design b-4 (hSL-A100) comprising derived and/or modified sequence from LASV(Lassa virus/H.sapiens-wt/NGA/2015/ISTH_0543;Clade II)__AVO03640__SP-HsPLAT_NP(2-569) (opt1)
aggagagucccgcagucggcguccagcggcucugcuuguucgugugugugucguugcaggccuuauucaagcuuaccauggacgccaugaagcgcggccugugcugcgugcuccugcugugcggggccgucuucgugagccccagcgccuccaaggaggugaaguccuuccuguggacccagagccuccgccgggagcugagcggcuacugcuccaacaucaagcugcaggucgugaaggacgcccaggcgcuccugcacgggcuggacuucagcgagguguccaacguccagcgccucaugcggaagcagaagcgcgacgacagcgaccugaagcggcugcgcgaccucaaccaggccgugaacaaccugguggagcugaaguccacccagcagaaguccauccuccgggucggcacgcugaccagcgacgaccugcucacccuggccgccgaccuggagaagcucaagagcaaggugauccgcaccgagcggccccuguccagcgggguguacaugggcaaccuguccacgcagcagcucgagcagcgccgggcccugcugaacaugaucgggauggucggcggcgcgcaggggacccagccgggccgcgacgggguggugcgggucugggacgugaagaaccccgaccuccugaacaaccaguucggcaccaugcccagccugacccucgccugccugacgaagcagggccagguggaccugaacgacgccguccucgcccugaccgaccuggggcucaucuacaccgcgaaguaccccaacuccagcgaccuggaccgccugucccagagccacccgauccucaacaugguggacaccaagaaguccagccugaacaucagcggcuacaacuucucccugggggccgccgugaaggccggcgccugcaugcucgacgggggcaacaugcuggagacgaucaaggucacgccccagaccauggacggcauccucaagagcauccugaaggugaagaagucccuggggauguucgugagcgacacccccggcgagcggaaccccuacgagaacauccuguacaagaucugccucuccggggacggcuggccguacaucgcgagccgcaccuccaucgucgggcgggccugggagaacaccaccguggaccuggagagcgacggcaagccccagaaggugggcuccgccgggagcaacaagucccugcagagcgccggcuuccccaccgggcucacguacucccagcugaugacccugaaggacagcaugaugcagcuggaccccuccgccaagaccuggaucgacaucgagggccgcccggaggaccccgucgagaucgcgcucuaccagcccaugagcgggugcuacauccacuucuuccgggagcccaccgaccugaagcaguucaagcaggacgccaaguacucccacggcaucgacguggccgaccuguucccggcccagcccggccucacgagcgccgucaucgaggcgcugccccgcaacauggugcugaccugccaggggagcgacgacaucaagcggcuccuggacucccagggccgcaaggacaucaagcugaucgacaucgcccucagcaaggccgacucccgccgguucgagaacgccgugugggaccagugcaaggaccugugccacaugcacaccggggucgugguggagaagaagaagcgcggcgggaaggaggagaucacgccccacugcgcccugauggacugcaucauguacgacgcggccgucagcggcggccucaacaucccggugcugcgggccgugcugccccgcgacauggucuuccggaccuccagccccaagguggugcucugaggacuaguaauaaggaaacuguaugaaugucugugggcaggaagugaagagauccuucuguaaagguuuuuggaauuaugucugcugaauaauaaacuuuuuugaaauaauaaaucugguagaaaaaugagaucucaaaggcucuuuucagagccaccaaaaaaaaaaaaaaaaaaaaaaaaaaaaaaaaaaaaaaaaaaaaaaaaaaaaaaaaaaaaaaaaaaaaaaaaaaaaaaaaaaaaaaaaaaaaaaaaaaaaa

SEQ ID NO: 18829 - RNA, 2109 nt, Artificial Sequence
  mRNA product Design b-4 (hSL-A100) comprising derived and/or modified sequence from LASV(Lassa virus/H.sapiens-wt/NGA/2016/ISTH_0009;Clade II)__AVO03572__SP-HsPLAT_NP(2-569) (opt1)
aggagagucccgcagucggcguccagcggcucugcuuguucgugugugugucguugcaggccuuauucaagcuuaccauggacgccaugaagcgcggccugugcugcgugcuccugcugugcggggccgucuucgugagccccagcgccuccaaggaggugaaguccuuccuguggacccagagccuccgccgggagcugagcggcuacugcuccaacaucaagcugcaggucgugaaggacgcccaggcgcuccugcacgggcuggacuucagcgagguguccaacguccagcgccucaugcggaagcagaagcgcgacgacagcgaccugaagcggcugcgcgaccucaaccaggccgugaacaaccugguggagcugaaguccacccagcagaaguccauccuccgggucggcacgcugaccagcgacgaccugcucacccuggccgccgaccuggagaagcucaagagcaaggugauccgcaccgagcggccccuguccagcgggguguacaugggcaaccuguccacgcagcagcucgagcagcgccgggcccugcugaacaugaucgggauggucggcggcgcgcaggggacccagccgggccgcgacgggguggugcgggucugggacgugaagaaccccgaccuccugaacaaccaguucggcaccaugcccagccugacccucgccugccugacgaagcagggccagguggaccugaacgacgccguccucgcccugaccgaccuggggcucaucuacaccgcgaaguaccccaacuccagcgaccuggaccgccugucccagagccacccgauccucaacaugguggacaccaagaaguccagccugaacaucagcggcuacaacuucucccugggggccgccgugaaggccggcgccugcaugcucgacgggggcaacaugcuggagacgaucaaggucacgccccagaccauggacggcauccucaagagcauccugaaggugaagaagucccuggggauguucgugagcgacacccccggcgagcggaaccccuacgagaacauccuguacaagaucugccucuccggggacggcuggccguacaucgcgagccgcaccuccaucgucgggcgggccugggagaacaccaccguggaccuggagagcgacggcaagccccagaaggugggcuccgccgggagcaacaagucccugcagagcgccggcuuccccaccgggcucacguacucccagcugaugacccugaaggacagcaugaugcagcuggaccccuccgccaagaccuggaucgacaucgagggccgcccggaggaccccgucgagaucgcgcucuaccagcccaugagcgggugcuacauccacuucuuccgggagcccaccgaccugaagcaguucaagcaggacgccaaguacucccacggcaucgacguggccgaccuguucccggcccagcccggccucacgagcgccgucaucgaggcgcugccccgcaacauggugcugaccugccaggggagcgacgacaucaagcggcuccuggacucccagggccgccgcgacaucaagcugaucgacaucgcccucagcaaggccgacucccggcgcuucgagaacgccgugugggaccagugcaaggaccugugccacaugcacaccggggucgugguggagaagaagaagcggggcgggaaggaggagaucacgccccacugcgcccugauggacugcaucauguacgacgcggccgucagcggcggccucaacaucccggugcugcgcgccgugcugccccgggacauggucuuccgcaccuccagccccaagguggugcucugaggacuaguaauaaggaaacuguaugaaugucugugggcaggaagugaagagauccuucuguaaagguuuuuggaauuaugucugcugaauaauaaacuuuuuugaaauaauaaaucugguagaaaaaugagaucucaaaggcucuuuucagagccaccaaaaaaaaaaaaaaaaaaaaaaaaaaaaaaaaaaaaaaaaaaaaaaaaaaaaaaaaaaaaaaaaaaaaaaaaaaaaaaaaaaaaaaaaaaaaaaaaaaaaa

SEQ ID NO: 18830 - RNA, 2109 nt, Artificial Sequence
  mRNA product Design b-4 (hSL-A100) comprising derived and/or modified sequence from LASV(Lassa virus/H.sapiens-wt/NGA/2016/ISTH_0017;Clade II)__AVO03568__SP-HsPLAT_NP(2-569) (opt1)
aggagagucccgcagucggcguccagcggcucugcuuguucgugugugugucguugcaggccuuauucaagcuuaccauggacgccaugaagcgcggccugugcugcgugcuccugcugugcggggccgucuucgugagccccagcgccuccaaggaggugaaguccuuccuguggacccagagccuccgccgggagcugagcggcuacugcuccagcaucaagcugcaggucgugaaggacgcccaggcgcuccugcacgggcuggacuucuccgaggugagcaacguccagcgccucaugcggaagcagaagcgcgacgacuccgaccugaagcggcugcgcgaccucaaccaggccgugaacaaccugguggagcucaagagcacccagcagaaguccauccugcgggucggcacgcugaccagcgacgaccugcucacccuggccgccgaccuggagaagcucaaguccaaggugauccgcaccgagcggccccugagcuccgggguguacaugggcaaccugagcacgcagcagcucgagcagcgccgggcccugcugaacaugaucgggauggcgggcggcgcccaggggacccagccgggccgcgacggggucgugcgggugugggacgucaagaaccccgaccuccugaacaaccaguucggcaccaugcccucccugacccucgccugccugacgaagcagggccagguggaccugaacgacgccgugcucgcgcugaccgaccuggggcucaucuacaccgccaaguaccccaacagcuccgaccuggaccgccugagccagagccacccgauccucaacauggucgacaccaagaaguccagccugaacaucuccggcuacaacuucagccugggggccgccgugaaggccggcgcgugcaugcucgacgggggcaacaugcuggagacgaucaaggugacgccccagaccauggacggcauccugaaguccauccucaaggucaagcggagccuggggauguucguguccgacgcccccggcgagcgcaaccccuacgagaacauccuguacaagaucugccucagcggggacggcuggccguacaucgccucccggaccagcaucguggggcgcgccugggagaacaccaccgucgaccuggaguccgacggcaagccccagaaggugggcgccaccgggagcaacaagucccugcagagcgcgggcuuccccaccgggcucacguacucccagcugaugacccugaaggacagcaugaugcagcuggaccccuccgccaagaccuggaucgacaucgagggccggccggaggaccccguggaggucgcccucuaccagcccgugagcgggugcuacauccacuucuuccgcgagcccaccgaccugaagcaguucaagcaggacgccaaguacucccacggcaucgacgucgccgaccuguucccggcgcagcccggccucacgagcgccgugaucgaggcccugccccggaacauggugcugaccugccaggggagcgacgacaucaagaagcuccuggacucccagggccgcaaggacaucaagcugaucgacaucgcccucagcaaggccgacucccgccgguucgagaacgcggucugggaccagugcaaggaccugugccacaugcacaccggggugguggucgagaagaagaagcgcggcgggaaggaggagaucacgccccacugcgcccugauggacugcaucauguacgacgccgccgugagcggcggccucaacaucccggugcugcgggcgguccugccccgcgacaugguguuccggaccuccagccccaaggugguccucugaggacuaguaauaaggaaacuguaugaaugucugugggcaggaagugaagagauccuucuguaaagguuuuuggaauuaugucugcugaauaauaaacuuuuuugaaauaauaaaucugguagaaaaaugagaucucaaaggcucuuuucagagccaccaaaaaaaaaaaaaaaaaaaaaaaaaaaaaaaaaaaaaaaaaaaaaaaaaaaaaaaaaaaaaaaaaaaaaaaaaaaaaaaaaaaaaaaaaaaaaaaaaaaaa

SEQ ID NO: 18831 - RNA, 2109 nt, Artificial Sequence
  mRNA product Design b-4 (hSL-A100) comprising derived and/or modified sequence from LASV(Lassa virus/H.sapiens-wt/NGA/2018/ISTH_0959;Clade II)__AVV65100__SP-HsPLAT_NP(2-569) (opt1)
aggagagucccgcagucggcguccagcggcucugcuuguucgugugugugucguugcaggccuuauucaagcuuaccauggacgccaugaagcgcggccugugcugcgugcuccugcugugcggggccgucuucgugagccccagcgccuccaaggaggugaaguccuuccuguggacccagagccuccgccgggagcugagcggcuacugcuccaacaucaagcugcaggucgugaaggacgcccaggcgcuccugcacgggcuggacuucagcgagguguccaacguccagcgccucaugcggaagcagaagcgcgacgacagcgaccugaagcggcugcgcgaccucaaccaggccgugaacaaccugguggagcugaaguccacccagcagaaguccauccuccgggucggcacccugaccagcgacgaccugcucacccuggccgccgaccuggagaagcucaagagcaaggugauccgcaccgagcggccccuguccagcgggguguacaugggcaaccuguccacgcagcagcucgagcagcgccgggcccugcugaaccucaucgggauggucggcggcgcgcaggggacccagccgggccgcgacgggguggugcgggucugggacgugaagaaccccgaccugcugaacaaccaguucggcaccaugcccagccucacccuggccugccugacgaagcagggccagguggaccucaacgacgucgugcuggcccugaccgaccucgggcugaucuacaccgccaaguaccccaacuccagcgaccuggaccgccucucccagagccacccgauccugaacaugguggacaccaagaaguccagccugaacaucagcggcuucaacuucucccucggggcggccgucaaggccggcgccugcaugcuggacgggggcaacaugcuggagacgaucaaggugacgccccagaccauggacggcauccucaagagcauccugaaggugaagaagucccuggggauguucgucagcgacacccccggcgagcggaaccccuacgagaacauccucuacaagaucugccuguccggggacggcuggccguacaucgccagccgcaccuccaucguggggcgggcgugggagaacaccaccguggaccuggagagcgacggcaagccccacaaggucggcaccgccggguccaacaagagccuccaguccgccggcuuccccacggggcugaccuacagccagcugaugacccugaaggacuccaugaugcagcucgaccccagcgccaagaccuggaucgacaucgagggccgcccggaggaccccguggagaucgcccuguaccagcccauguccgggugcuacauccacuucuuccgggagcccacggaccugaagcaguucaagcaggacgcgaaguacagccacggcaucgacgucgccgaccucuucccggcccagcccggccugaccuccgccgugaucgaggcccugccccgcaacauggugcugaccugccaggggagcgacgacaucaagcggcuccuggacagccagggccgcaaggacaucaagcucaucgacaucgcgcuguccaagaccgacagccgccgguucgagaacgccgucugggaccagugcaaggaccugugccacaugcacacgggggugguggucgagaagaagaagcgcggcgggaaggaggagaucacgccccacugcgcccucauggacugcaucauguacgacgccgccguguccggcggccugaacaucccggugcugcgggcgguccucccccgcgacaugguguuccggaccagcucccccaaggugguccugugaggacuaguaauaaggaaacuguaugaaugucugugggcaggaagugaagagauccuucuguaaagguuuuuggaauuaugucugcugaauaauaaacuuuuuugaaauaauaaaucugguagaaaaaugagaucucaaaggcucuuuucagagccaccaaaaaaaaaaaaaaaaaaaaaaaaaaaaaaaaaaaaaaaaaaaaaaaaaaaaaaaaaaaaaaaaaaaaaaaaaaaaaaaaaaaaaaaaaaaaaaaaaaaaa

SEQ ID NO: 18832 - RNA, 2109 nt, Artificial Sequence
  mRNA product Design b-4 (hSL-A100) comprising derived and/or modified sequence from LASV(LASV003-NIG-2008;Clade II)__AIT17581__SP-HsPLAT_NP(2-569) (opt1)
aggagagucccgcagucggcguccagcggcucugcuuguucgugugugugucguugcaggccuuauucaagcuuaccauggacgccaugaagcgcggccugugcugcgugcuccugcugugcggggccgucuucgugagccccagcgccuccaaggaggugaaguccuuccuguggacccagagccuccgccgggagcugagcggcuacugcuccagcaucaagcugcaggucgugaaggacgcccaggcgcuccugcacgggcuggacuucuccgaggugagcaacguccagcgccucaugcggaagcagaagcgcgacgacuccgaccugaagcggcugcgcgaccucaaccaggccgugaacaaccugguggagcucaagagcacccagcagaaguccguccugcgggugggcacccugaccagcgacgaccugcucacccuggccgccgaccuggagaagcucaaguccaaggugauccgcaccgagcggccccugagcuccggggucuacaugggcaaccugagcgcccagcagcucgagcagcgccggacgcugcugaacaugaucgggauggugggcggcgcgcaggggacccagccgggccgcgacggggugguccgggugugggacgugaagaaccccgaccuccugaacaaccaguucggcaccaugcccucccugacccucgccugccugacgaagcaggggcaggucgaccugaacgacguggugcucgcccugaccgaccugggccucaucuacaccgccaaguaccccaacagcuccgaccuggaccgccugagccagagccacccgauccucuccauggucgacaccaagaaguccagccugaacaucagcggcuacaacuucucccugggggcggccgugaaggccggcgccugcaugcucgacgggggcaacaugcuggagacgaucaaggugacgccccagaccauggacggcauccucaagagcauccugaaggucaagaagucccuggggauguucgugagcgacacccccggcgagcggaaccccuacgagaacauccuguacaagaucugccucuccggggacggcuggccguacaucgccagccgcaccuccaucguggggcgggcgugggagaacaccaccgucgaccuggagagcgacggcaagccccagaaggugggcaccgccggguccaacaagagccugcaguccgccggcuuccccacggggcucaccuacagccagcugaugacccugaaggacuccaugaugcagcuggaccccagcgccaagaccuggaucgacaucgagggccgcccggaggaccccgucgagaucgcccucuaccagcccauguccgggugcuacauccacuucuuccgggagcccacggaccugaagcaguucaagcaggacgcgaaguacagccacggcaucgacgugaccgaccuguucccggcccagcccggccucaccagcgccgugaucgaggcccugccccgcaacaugguccugaccugccagggguccgacgacaucaagcggcuccuggacagccagggccgccgcgacaucaagcugaucgacaucgcccucuccaaggcggacagccggcgcuucgagaacgccgugugggaccagugcaaggaccugugccacaugcacacggggguggucguggagaagaagaagcggggcgggaaggaggagaucacgccccacugcgcccugauggacugcaucauguacgacgccgccguguccggcggccucaacaucccgguccugcgcgcggugcugccccgggacaugguguuccgcaccagcucccccaaggucgugcucugaggacuaguaauaaggaaacuguaugaaugucugugggcaggaagugaagagauccuucuguaaagguuuuuggaauuaugucugcugaauaauaaacuuuuuugaaauaauaaaucugguagaaaaaugagaucucaaaggcucuuuucagagccaccaaaaaaaaaaaaaaaaaaaaaaaaaaaaaaaaaaaaaaaaaaaaaaaaaaaaaaaaaaaaaaaaaaaaaaaaaaaaaaaaaaaaaaaaaaaaaaaaaaaaa

SEQ ID NO: 18833 - RNA, 2109 nt, Artificial Sequence
  mRNA product Design b-4 (hSL-A100) comprising derived and/or modified sequence from LASV(LASV035-NIG-2009;Clade II)__AIT17589__SP-HsPLAT_NP(2-569) (opt1)
aggagagucccgcagucggcguccagcggcucugcuuguucgugugugugucguugcaggccuuauucaagcuuaccauggacgccaugaagcgcggccugugcugcgugcuccugcugugcggggccgucuucgugagccccagcgccuccaaggaggugaaguccuuccuguggacccagagccuccgccgggagcugagcggcuacugcuccagcaucaagcugcaggucgugaaggacgcccaggcgcuccugcacgggcuggacuucuccgaggugagcaacguccagcgccucaugcggaagcagaagcgcgacgacuccgaccugaagcggcugcgcgaccucaaccaggccgugaacaaccugguggagcucaagagcacccagcagaaguccauccugcgggucggcacgcugaccagcgacgaccugcucacccuggccgccgaccuggagaagcucaaguccaaggugauccgcaccgagcggccccugagcuccgggguguacaugggcaaccugagcgcccagcagcucgagcagcgccgggcgcugcugaacaugaucgggauggucggcggcgcccaggggacgcagccgggccgcgacgggguggugcgggucugggacgugaagaaccccgaccuccugaacaaccaguucggcaccaugcccucccugacccucgccugccugaccaagcagggccagguggaccugaacgacgccguccucgcgcugacggaccuggggcucaucuacaccgccaaguaccccaacagcuccgaccuggaccgccugagccagagccacccgauccucaacaugguggacaccaagaaguccagccugaacaucuccggcuacaacuucagccugggggccgccgugaaggccggcgcgugcaugcucgacgggggcaacaugcuggagaccaucaaggucacgccccagaccauggacggcauccugaaguccauccucaaggugaagcggagccuggggauguucguguccgacacccccggcgagcgcaaccccuacgagaacauccuguacaagaucugccucagcggggacggcuggccguacaucgccucccggaccagcaucgucgggcgcgccugggagaacacgaccguggaccuggaguccgacggcaagccccagaaggugggcaccaccgggagcaacaagucccugcagagcgccggcuuccccacggggcucaccuacucccagcugaugacccugaaggacagcaugaugcagcuggaccccuccgccaagaccuggaucgacaucgagggccggccggaggaccccgucgagaucgcgcucuaccagcccaugagcgggugcuacauccacuucuuccgcgagcccacggaccugaagcaguucaagcaggacgccaaguacucccacggcaucgacguggccgaccuguucccggcccagcccggccucaccagcgccgucaucgaggcgcugccccggaacauggugcugaccugccaggggagcgacgacaucaagaagcuccuggacucccagggccgccgcgacaucaagcugaucgacaucgcccucagcaaggccgacucccggaaguucgagaacgccgugugggaccagugcaaggaccugugccacaugcacaccggggucgugguggagaagaagaagcgcggcgggaaggaggagaucacgccccacugcgcccugauggacugcaucauguacgacgcggccgucagcggcggccucaacaucccggugcugcgggccgugcugccccgcgacauggucuuccggaccuccagccccaagguggugcucugaggacuaguaauaaggaaacuguaugaaugucugugggcaggaagugaagagauccuucuguaaagguuuuuggaauuaugucugcugaauaauaaacuuuuuugaaauaauaaaucugguagaaaaaugagaucucaaaggcucuuuucagagccaccaaaaaaaaaaaaaaaaaaaaaaaaaaaaaaaaaaaaaaaaaaaaaaaaaaaaaaaaaaaaaaaaaaaaaaaaaaaaaaaaaaaaaaaaaaaaaaaaaaaaa

SEQ ID NO: 18834 - RNA, 2109 nt, Artificial Sequence
  mRNA product Design b-4 (hSL-A100) comprising derived and/or modified sequence from LASV(LASV1000-NIG-2009;Clade II)__AIT17783__SP-HsPLAT_NP(2-569) (opt1)
aggagagucccgcagucggcguccagcggcucugcuuguucgugugugugucguugcaggccuuauucaagcuuaccauggacgccaugaagcgcggccugugcugcgugcuccugcugugcggggccgucuucgugagccccagcgccuccaaggaggugaaguccuuccuguggacccagagccuccgccgggagcugagcggcuacugcuccaacaucaagcugcaggucgugaaggacgcccaggcgcuccugcacgggcuggacuucagcgagguguccaacguccagcgccucaugcggaagcagaagcgcgacgacagcgaccugaagcggcugcgcgaccucaaccaggccgugaacaaccugguggagcugaaguccacccagcagaaguccauccuccgggucggcacgcugaccagcgacgaccugcucacccuggccgccgaccuggagaagcucaagagcaaggugauccgcaccgagcggccccuguccagcgggguguacaugggcaaccuguccacgcagcagcucgagcagcgccgggcccugcugaacaugaucgggauggucggcggcgcgcaggggacccagccgggccgcgacgggguggugcgggucugggacgugaagaaccccgaccuccugaacaaccaguucggcaccaugcccagccugacccucgccugccugacgaagcagggccagguggaccugaacgacgucgugcucgcccugaccgaccuggggcucaucuacaccgccaaguaccccaacuccagcgaccuggaccgccugucccagagccacccgauccucaacaugguggacaccaagaaguccagccugaacaucagcggcuacaacuucucccugggggcggccgucaaggccggcgccugcaugcucgacgggggcaacaugcuggagacgaucaaggugacgccccagaccauggacggcauccucaagagcauccugaaggugaagaagucccuggggauguucgucagcgacacccccggcgagcggaaccccuacgagaacauccuguacaagaucugccucuccggggacggcuggccguacaucgccagccgcaccuccaucguggggcgggcgugggagaacaccaccguggaccuggagagcgacggcaagccccagaaggucggcaccgccggguccaacaagagccugcaguccgccggcuuccccacggggcucaccuacagccagcugaugacccugaaggacuccaugaugcagcuggaccccagcgccaagaccuggaucgacaucgagggccgcccggaggaccccguggagaucgcccucuaccagcccgucuccgggugcuacauccacuucuuccgggagcccacggaccugaagcaguucaagcaggacgcgaaguacagccacggcaucgacguggccgaccuguucccggcccagcccggccucaccuccgccgugaucgaggcccugccccgcaacaugguccugaccugccaggggagcgacgacaucaagcggcuccuggacagccagggccgccgcgacaucaagcugaucgacaucgcgcucuccaaggccgacagccggcgcuucgagaacgccgugugggaccagugcaaggaccugugccacaugcacaccgggguggucguggagaagaagaagcggggcgggaaggaggagaucacgccccacugcgcccugauggacugcaucauguacgacgccgcgguguccggcggccucaacaucccgguccugcgcgccgugcugccccgggacaugguguuccgcaccagcucccccaaggucgugcucugaggacuaguaauaaggaaacuguaugaaugucugugggcaggaagugaagagauccuucuguaaagguuuuuggaauuaugucugcugaauaauaaacuuuuuugaaauaauaaaucugguagaaaaaugagaucucaaaggcucuuuucagagccaccaaaaaaaaaaaaaaaaaaaaaaaaaaaaaaaaaaaaaaaaaaaaaaaaaaaaaaaaaaaaaaaaaaaaaaaaaaaaaaaaaaaaaaaaaaaaaaaaaaaaa

SEQ ID NO: 18835 - RNA, 2109 nt, Artificial Sequence
  mRNA product Design b-4 (hSL-A100) comprising derived and/or modified sequence from LASV(LASV221-NIG-2010;Clade II)__AIT17625__SP-HsPLAT_NP(2-569) (opt1)
aggagagucccgcagucggcguccagcggcucugcuuguucgugugugugucguugcaggccuuauucaagcuuaccauggacgccaugaagcgcggccugugcugcgugcuccugcugugcggggccgucuucgugagccccagcgccuccaaggaggugaaguccuuccuguggacccagagccuccgccgggagcugagcggcuacugcuccagcaucaagcugcaggucgugaaggacgcccaggcgcuccugcacgggcuggacuucuccgaggugagcaacguccagcgccucaugcggaagcagcgccgggacgacuccgaccugaagcgccugcgggaccucaaccaggccgugaacaaccugguggagcucaagagcacccagcagaaguccauccugcgcgucggcacgcugaccagcgacgaccugcucacccuggccgccgaccuggagaagcucaaguccaaggugauccggaccgagcgcccccugagcuccgggguguacaugggcaaccugagcacgcagcagcucgagcagcggcgcgcccugcugaacaugaucgggauggucggcggcgcgcaggggacccagccgggccgggacgggguggugcgcgucugggacgugaagaaccccgaccuccugaacaaccaguucggcaccaugcccucccugacccucgccugccugacgaagcagggccagguggaccugaacgacgccguccucgcccugaccgaccuggggcucaucuacaccgcgaaguaccccaacagcuccgaccuggaccggcugagccagagccacccgauccucaacaugguggacaccaagaaguccagccugaacaucuccggcuacaacuucagccugggggccgccgugaaggccggcgccugcaugcucgacgggggcaacaugcuggagacgaucaaggucacgccccagaccguggacggcauccugaaguccauccucaaggugaagcgcagccuggggauguucgucuccgacacccccggcgagcggaaccccuacgagaacauccuguacaagaucugccucagcggggacggcuggccguacaucgcgucccgcaccagcaucguggggcgggccugggagaacaccaccguggaccuggaguccgacggcaagccccagaaggucggcaccgccgggagcaacaagucccugcagagcgccggcuuccccacggggcucaccuacucccagcugaugacccugaaggacagcaugaugcagcuggaccccuccgccaagaccuggaucgacaucgagggccgcccggaggaccccguggagaucgcgcucuaccagcccaugagcgggugcuacauccacuucuuccgggagcccacggaccugaagcaguucaagcaggacgccaaguacucccacggcaucgacgucgccgaccuguucccggcccagcccggccucaccagcgccgugaucgaggcgcugccccgcaacauggugcugaccugccaggggagcgacgacaucaagcgccuccuggacucccagggccggcgcgacaucaagcugaucgacaucgcccucagcaaggccgacucccggaaguucgagaacgccgucugggaccagugcaaggaccugugccacaugcacaccggggugguggucgagaagaagaagcgcggcgggaaggaggagaucacgccccacugcgcccugauggacugcaucauguacgacgcggccgugagcggcggccucaacaucccggugcugcgggccguccugccccgcgacaugguguuccggaccuccagccccaaggugguccucugaggacuaguaauaaggaaacuguaugaaugucugugggcaggaagugaagagauccuucuguaaagguuuuuggaauuaugucugcugaauaauaaacuuuuuugaaauaauaaaucugguagaaaaaugagaucucaaaggcucuuuucagagccaccaaaaaaaaaaaaaaaaaaaaaaaaaaaaaaaaaaaaaaaaaaaaaaaaaaaaaaaaaaaaaaaaaaaaaaaaaaaaaaaaaaaaaaaaaaaaaaaaaaaaa

SEQ ID NO: 18836 - RNA, 2109 nt, Artificial Sequence
  mRNA product Design b-4 (hSL-A100) comprising derived and/or modified sequence from LASV(LASV237-NIG-2010;Clade II)__AIT17639__SP-HsPLAT_NP(2-569) (opt1)
aggagagucccgcagucggcguccagcggcucugcuuguucgugugugugucguugcaggccuuauucaagcuuaccauggacgccaugaagcgcggccugugcugcgugcuccugcugugcggggccgucuucgugagccccagcgccuccaaggaggugaaguccuuccuguggacccagagccuccgccgggagcugagcggcuacugcuccaacaucaagcugcaggucgugaaggacgcccaggcgcuccugcacgggcuggacuucagcgagguguccaacguccagcgccucaugcggaagcagaagcgcgacgacagcgaccugaagcggcugcgcgaccucaaccaggccgugaacaaccugguggagcugaaguccacccagcagaaguccauccuccgggucggcacccugaccagcgacgaccugcucacccuggccgccgaccuggagaagcucaagagcaaggugauccgcaccgagcggccccuguccagcgggguguacaugggcaaccuguccacgcagcagcucgagcagcgccgggcccugcugaacaugaucgggauggucggcggcgcgcaggggacccagccgggccgcgacgggguggugcgggucugggacgugaagaaccccgaccuccugaacaaccaguucggcaccaugcccagccugacccucgccugccugacgaagcagggccagguggaccugaacgacgccguccucgcccugaccgaccuggggcucaucuacaccgcgaaguaccccaacuccagcgaccuggaccgccugucccagagccacccgauccucaacaugguggacaucaagaaguccagccugaacaucagcggcuacaacuucucccugggggccgccgugaaggccggcgccugcaugcucgacgggggcaacaugcuggagaccaucaaggucacgccccagaccauggacggcauccucaagagcauccugaaggugaagcggucccuggggauguucgugagcgacacccccggcgagcgcaaccccuacgagaacauccuguacaagaucugccucuccggggacggcuggccguacaucgcgagccggaccuccaucgucgggcgcgccugggagaacacgaccguggaccuggagagcgacggcaagccccagaaggugggcuccgccgggagcaacaagucccugcagagcgccggcuuccccaccgggcucaccuacucccagcugaugacgcugaaggacagcaugaugcagcuggaccccuccgccaagaccuggaucgacaucgagggccggccggaggaccccgucgagaucgcgcucuaccagcccaugagcgggugcuacauccacuucuuccgcgagcccaccgaccugaagcaguucaagcaggacgccaaguacucccacggcaucgacguggccgaccuguucccggcccagcccggccucaccagcgccgucaucgaggcgcugccccggaacauggugcugacgugccaggggagcgacgacaucaagcgccuccuggacucccagggccgccgggacaucaagcugaucgacaucgcccucagcaaggccgacucccgccgguucgagaacgccgugugggaccagugcaaggaccugugccacaugcacaccggggucgugguggagaagaagaagcgcggcgggaaggaggagaucacgccccacugcgcccugauggacugcaucauguacgacgcggccgucagcggcggccucaacaucccggugcugcgggccgugcugccccgcgacauggucuuccggaccuccagccccaagguggugcucugaggacuaguaauaaggaaacuguaugaaugucugugggcaggaagugaagagauccuucuguaaagguuuuuggaauuaugucugcugaauaauaaacuuuuuugaaauaauaaaucugguagaaaaaugagaucucaaaggcucuuuucagagccaccaaaaaaaaaaaaaaaaaaaaaaaaaaaaaaaaaaaaaaaaaaaaaaaaaaaaaaaaaaaaaaaaaaaaaaaaaaaaaaaaaaaaaaaaaaaaaaaaaaaaa

SEQ ID NO: 18837 - RNA, 2109 nt, Artificial Sequence
  mRNA product Design b-4 (hSL-A100) comprising derived and/or modified sequence from LASV(LASV253-NIG-2011;Clade II)__AIT17671__SP-HsPLAT_NP(2-569) (opt1)
aggagagucccgcagucggcguccagcggcucugcuuguucgugugugugucguugcaggccuuauucaagcuuaccauggacgccaugaagcgcggccugugcugcgugcuccugcugugcggggccgucuucgugagccccagcgccuccaaggaggugaaguccuuccuguggacccagagccuccgccgggagcugagcggcuacugcuccagcaucaagcugcaggucgugaaggacgcccaggcgcuccugcacgggcuggacuucuccgaggugagcaacguccagcgccucaugcggaagcagaagcgcgacgacuccgaccugaagcggcugcgcgaccucaaccaggccgugaacaaccugguggagcucaagagcacccagcagaaguccguccugcgggugggcacccugaccagcgacgaccugcucacccuggccgccgaccuggagaagcucaaguccaaggugauccgcaccgagcggccccugagcuccggggucuacaugggcaaccugagcacgcagcagcucgagcagcgccgggcccugcugaacaugaucgggauggugggcggcgcgcaggggacccagccgggccgcgacggggugguccgggugugggacgugaagaaccccgaccuccugaacaaccaguucggcaccaugcccucccugacccucgccugccugacgaagcaggggcaggucgaccugaacgacguggugcucgcccugaccgaccugggccucaucuacaccgccaaguaccccaacagcuccgaccuggaccgccugagccagagccacccgauccucaacauggucgacaccaagaaguccagccugaacaucuccggcuacaacuucagccugggggcggccgugaaggccggcgccugcaugcucgacgggggcaacaugcuggagacgaucaaggugacgccccagaccauggacggcauccugaaguccauccucaaggucaagaagucccuggggauguucgugagcgacacccccggcgagcggaaccccuacgagaacauccuguacaagaucugccucagcggggacggcuggccguacaucgccucccgcaccagcaucguggggcgggcgugggagaacaccaccgucgaccuggaguccgacggcaagccccagaaggugggcaccgccgggagcaacaagucccugcagagcgccggcuuccccacggggcucaccuacucccagcugaugacccugaaggacagcaugaugcagcuggaccccuccgccaagaccuggaucgacaucgagggccgcccggaggaccccgucgagaucgcccucuaccagcccaugagcgggugcuacauccacuucuuccgggagcccacggaccugaagcaguucaagcaggacgcgaaguacucccacggcaucgacgugaccgaccuguucccggcccagcccggccucaccagcgccgugaucgaggcccugccccgcaacaugguccugaccugccaggggagcgacgacaucaagcggcuccuggacucccagggccgccgcgacaucaagcugaucgacaucgcccucagcaaggcggacucccggcgcuucgagaacgccgugugggaccagugcaaggaccugugccacaugcacacggggguggucguggagaagaagaagcggggcgggaaggaggagaucacgccccacugcgcccugauggacugcaucauguacgacgccgccgugagcggcggccucaacaucccgguccugcgcgcggugcugccccgggacaugguguuccgcaccuccagccccaaggucgugcucugaggacuaguaauaaggaaacuguaugaaugucugugggcaggaagugaagagauccuucuguaaagguuuuuggaauuaugucugcugaauaauaaacuuuuuugaaauaauaaaucugguagaaaaaugagaucucaaaggcucuuuucagagccaccaaaaaaaaaaaaaaaaaaaaaaaaaaaaaaaaaaaaaaaaaaaaaaaaaaaaaaaaaaaaaaaaaaaaaaaaaaaaaaaaaaaaaaaaaaaaaaaaaaaaa

SEQ ID NO: 18838 - RNA, 2109 nt, Artificial Sequence
  mRNA product Design b-4 (hSL-A100) comprising derived and/or modified sequence from LASV(LASV254-NIG-2011;Clade II)__AIT17675__SP-HsPLAT_NP(2-569) (opt1)
aggagagucccgcagucggcguccagcggcucugcuuguucgugugugugucguugcaggccuuauucaagcuuaccauggacgccaugaagcgcggccugugcugcgugcuccugcugugcggggccgucuucgugagccccagcgccuccaaggaggugaaguccuuccuguggacccagagccuccgccgggagcugagcggcuacugcuccagcaucaagcugcaggucgugaaggacgcccaggcgcuccugcacgggcuggacuucuccgaggugagcaacguccagcgccucaugcggaagcagaagcgcgacgacuccgaccugaagcggcugcgcgaccucaaccaggccgugaacaaccugguggagcucaagagcacccagcagaaguccguccugcgggugggcacgcugaccagcgacgaccugcucacccuggccgccgaccuggagaagcucaaguccaaggugauccgcaccgagcggccccugagcuccggggucuacaugggcaaccugagcacgcagcagcucgagcagcgccgggcccugcugaacaugaucgggauggugggcggcgcgcaggggacccagccgggccgcgacggggugguccgggugugggacgugaagaaccccgaccuccugaacaaccaguucggcaccaugcccucccugacccucgccugccugacgaagcaggggcaggucgaccugaacgacgccgugcucgcccugaccgaccugggccucaucuacaccgcgaaguaccccaacagcuccgaccuggaccgccugagccagagccacccgauccucaacaugguggacaccaagaaguccagccugaacaucuccggcuacaacuucagccugggggccgccgucaaggccggcgccugcaugcucgacgggggcaacaugcuggagacgaucaaggugacgccccagaccauggacggcauccugaaguccauccucaaggugaagaagucccuggggauguucgucagcgacacccccggcgagcggaaccccuacgagaacauccuguacaagaucugccucagcggggacggcuggccguacaucgcgucccgcaccagcaucguggggcgggccugggagaacaccaucguggaccuggaguccgacggcaagccccagaaggucggcaccgccgggagcaacaagucccugcagagcgccggcuuccccaccgggcucacguacucccagcugaugacccugaaggacagcaugaugcagcuggaccccuccgccaagaccuggaucgacaucgagggccgcccggaggaccccguggagaucgcgcucuaccagcccaugagcgggugcuacauccacuucuuccgggagcccaccgaccugaagcaguucaagcaggacgccaaguacucccacggcaucgacgucgccgaccuguucccggcccagcccggccucacgagcgccgugaucgaggcgcugccccgcaacauggugcugaccugccaggggagcgacgacaucaagcggcuccuggacucccagggccgccgcgacaucaagcugaucgacaucgcccucagcaaggccgacucccggcgcuucgagaacgccgucugggaccagugcaaggaccugugccacaugcacaccggggugguggucgagaagaagaagcggggcgggaaggaggagaucacgccccacugcgcccugauggacugcaucauguacgacgcggccgugagcggcggccucaacaucccggugcugcgcgccguccugccccgggacaugguguuccgcaccuccagccccaaggugguccucugaggacuaguaauaaggaaacuguaugaaugucugugggcaggaagugaagagauccuucuguaaagguuuuuggaauuaugucugcugaauaauaaacuuuuuugaaauaauaaaucugguagaaaaaugagaucucaaaggcucuuuucagagccaccaaaaaaaaaaaaaaaaaaaaaaaaaaaaaaaaaaaaaaaaaaaaaaaaaaaaaaaaaaaaaaaaaaaaaaaaaaaaaaaaaaaaaaaaaaaaaaaaaaaaa

SEQ ID NO: 18839 - RNA, 2109 nt, Artificial Sequence
  mRNA product Design b-4 (hSL-A100) comprising derived and/or modified sequence from LASV(Nig08-04;Clade II)__ADU56611__SP-HsPLAT_NP(2-569) (opt1)
aggagagucccgcagucggcguccagcggcucugcuuguucgugugugugucguugcaggccuuauucaagcuuaccauggacgccaugaagcgcggccugugcugcgugcuccugcugugcggggccgucuucgugagccccagcgccuccaaggaggugaaguccuuccuguggacccagagccuccgccgggagcugagcggcuacugcuccaacaucaagcugcaggucgugaaggacgcccaggcgcuccugcacgggcuggacuucagcgagguguccaacguccagcgccucaugcggaagcagaagcgcgacgacggcgaccugaagcggcugcgcgaccucaaccaggccgugaacaaccugguggagcucaagagcacccagcagaaguccguccugcggguggggacccugaccagcgacgaccugcucacccuggccgccgaccuggagaagcucaaguccaaggugauccgcaccgagcggccccugagcuccggcgucuacauggggaaccugagcacgcagcagcucgagcagcgcaaggcccugcuguccaugaucggcauggugggcggggcgcagggcacccagccggggcgggacggcgugguccgcgugugggacgugaagaaccccgaccuccugaacaaccaguucgggaccaugcccagccugacccucgccugccugacgaagcagggccaggucgaccugaacgacgccgugcucgcccugaccgaccugggccucaucuacaccgcgaaguaccccaacuccagcgaccuggaccggcugucccagagccacccgauccucaacaugguggacaccaagaaguccagccugaacaucagcggguacaacuucucccugggcgccgccgucaaggccggggccugcaugcucgacggcggcaacaugcuggagacgaucaaggugacgccccagaccauggacgggauccucaagagcauccugaaggugaagcgcucccugggcauguucgucagcgacacccccggggagcggaaccccuacgagaacauccuguacaagaucugccucuccggcgacggguggccguacaucgcgagccgcaccuccaucgugggccgggccugggagaacaccaccguggaccuggagagcgacggcaagccccagaaggucgggaccgccggcuccaacaagagccugcaguccgccggguuccccacgggccucaccuacagccagcugaugacccugaaggacuccaugaugcagcuggaccccagcgccaagaccuggaucgacaucgaggggcgcccggaggaccccguggagaucgcgcucuaccagcccauguccggcugcuacauccacuucuuccgggagcccacggaccugaagcaguucaagcaggacgccaaguacagccacggcaucgacgucaccgaccuguucuccgcccagccggggcucaccagcgccgugaucgaggcccugccccgcaacauggugcugaccugccagggcagcgacgacaucaagaagcuccuggacucccaggggcggcgcgacaucaagcugaucgacaucagccucaacaaggcggacucccgccgguucgagaacgccgucugggaccagugcaaggaccugugccacaugcacacgggcgugguggucgagaagaagaagcgcgggggcaaggaggagaucacgccccacugcgcccugauggacugcaucauguucgacgccgccgugagcggcgggcucaacauccccauccugcgggcggugcugccgcgcgacauggucuuccggaccuccagccccaagguggugcucugaggacuaguaauaaggaaacuguaugaaugucugugggcaggaagugaagagauccuucuguaaagguuuuuggaauuaugucugcugaauaauaaacuuuuuugaaauaauaaaucugguagaaaaaugagaucucaaaggcucuuuucagagccaccaaaaaaaaaaaaaaaaaaaaaaaaaaaaaaaaaaaaaaaaaaaaaaaaaaaaaaaaaaaaaaaaaaaaaaaaaaaaaaaaaaaaaaaaaaaaaaaaaaaaa

SEQ ID NO: 18840 - RNA, 2112 nt, Artificial Sequence
  mRNA product Design b-4 (hSL-A100) comprising derived and/or modified sequence from LASV(GA391;Clade III)__AAA46284__SP-HsPLAT_NP(2-570) (opt1)
aggagagucccgcagucggcguccagcggcucugcuuguucgugugugugucguugcaggccuuauucaagcuuaccauggacgccaugaagcgcggccugugcugcgugcuccugcugugcggggccgucuucgugagccccagcgccuccaaggaggugcgcagcugccuguggacccagucccuccggcgcgagcugagcggcuacugcuccaacaucaagcugcaggucgugaaggacgcccaggcgcuccugcacgggcuggacuucagcgagguguccaacguccagcggcucaugcgcaagcagaagcgggacgacggcgaccugaagcgccugcgggaccucaaccaggccgugaacaaccugguggagcugaaguccacccagcagaaguccguccuccgcguggggacgcugagcuccgacgaccugcucauccuggccgccgaccuggagaagcucaagagcaaggugacccggaccgagcgcccccuguccagcggcgucuacauggggaaccuguccagccagcagcucgaccagcggcgcgcccugcugaacaugaucggcaugaccggcguguccgggggcgggaagggcgcgagcaacgggaucgugcgggucugggacgugaagaacgccgagcuccugaacaaccaguucggcacgaugccgucccugacccucgccugccugaccaagcagggccagguggaccugaacgacgccguccaggcgcucaccgaccuggggcugaucuacacggccaaguaccccaacagcagcgaccucgaccgccugucccagagccaccccauccugaacaugaucgacaccaagaaguccagccucaacaucuccggcuacaacuucagccugggggccgccgugaaggccggcgcgugcaugcuggacggcgggaacaugcucgagaccaucaaggugagcccccagaccauggacggcauccucaagagcauccugaaggucaagaagucccuggggauguucgugagcgacacgccgggcgagcggaaccccuacgagaacauccuguacaagaucugccuguccggggacggcuggagcuacaucgccucccgcaccagcaucgugggccgggccugggagaacaccgucguggaccucgagcaggacaacaagccccagaagaucgggaacggcggguccaacaagagccugcaguccgccggcuucgccgcggggcugaucuacagccagcucaugacccugaaggacuucaagugcuucaaccugauccccaacgccaagacguggauggacaucgagggccgcccggaggaccccguggagaucgcccuguaccagcccuccagcggcugcuacguccacuucuuccgggagcccaccgaccucaagcaguucaagcaggacgccaaguacagccacgggcgcgacgugaccgaccuguucgccgcgcagccgggccugaccuccgccgucaucgaggcccucccccggaacauggugaucacgugccaggggagcgaggacauccgcaagcugcuggagucccagggccgccgggacaucaagcucaucgacaucacccugagcaaggccgacucccgcaaguucgagaacgccgugugggaccaguucaaggaccugugccacaugcacaccggggucgugguggagaagaagaagcggggcggcaaggaggagaucacgccccacugcgcgcucauggacugcaucauguucgacgccgccgucagcgggggccuggacgccaaggugcugcgcgugguccucccccgggacaugguguuccgcaccuccaccccgaaggugguccugugaggacuaguaauaaggaaacuguaugaaugucugugggcaggaagugaagagauccuucuguaaagguuuuuggaauuaugucugcugaauaauaaacuuuuuugaaauaauaaaucugguagaaaaaugagaucucaaaggcucuuuucagagccaccaaaaaaaaaaaaaaaaaaaaaaaaaaaaaaaaaaaaaaaaaaaaaaaaaaaaaaaaaaaaaaaaaaaaaaaaaaaaaaaaaaaaaaaaaaaaaaaaaaaaa

SEQ ID NO: 18841 - RNA, 2109 nt, Artificial Sequence
  mRNA product Design b-4 (hSL-A100) comprising derived and/or modified sequence from LASV(Nig08-A19;Clade III)__ADU56619__SP-HsPLAT_NP(2-569) (opt1)
aggagagucccgcagucggcguccagcggcucugcuuguucgugugugugucguugcaggccuuauucaagcuuaccauggacgccaugaagcgcggccugugcugcgugcuccugcugugcggggccgucuucgugagccccagcgccuccaaggaggugaaguccuuccuguggacccagucccuccgccgggagcugagcggcuacugcuccaacaucaagcugcaggucgugaaggacgcccaggcgcuccugcacgggcuggacuucagcgagguguccaacguccagcgccucaugcggaagcagaagcgcgacgacggcgaccugaagcggcugcgcgaccucaaccaggccgugaacaaccugguggagcucaagagcacccagcagaaguccguccugcggguggggacccugagcuccgacgaccugcucgugcuggccgccgaccuggagaagcucaagagcaaggucgugcgcaccgagcggccccuguccagcggcaucuacauggggaaccuguccagccagcagcucgaccagcgcaaggcccugcugaacaugaucggcaugaccggcgggaacggcgggcggaacaccacguccgacggcaucgugcgcgucugggacgugaagaacgcggagcuccugaacaaccaguucgggaccaugccgagccugacccucgccugccugaccaagcagggccagguggaccugaacgacgccguccaggcccucacggaccugggccugaucuacaccgcgaaguaccccaacuccagcgaccucgaccggcuggcccagagccaccccauccugaacaugaucgacaccaagaaguccagccucaacaucuccggguacaacuucagccugggcgccgccgugaaggccggggcgugcaugcuggacggcggcaacaugcucgagaccaucaaggugagcccccagacgauggacgggauccucaagagcauccugaaggucaagcgcucccugggcauguucaucagcgacaccccgggggagcggaaccccuacgagaacauccuguacaagaucugccuguccggcgacggguggcccuacaucgccagccgcaccuccaucgugggccgggccugggagaacaccguggucgaccucgagagcgacaacaagccccagaagacgggcaacgggggcuccaacaagagccugcaguccgccggguucgccgcgggccugaccuacagccagcucaugacccugaaggacuccaugcugcagcuggacccgaacgccaagaccuggauggacaucgaggggcgccccgaggaccccguggagaucgcccucuaccagcccagcuccggcugcuacauccacuucuuccgggagccgacggaccugaagcaguucaagcaggacgccaaguacagccacggcaucgacgugaccgaccuguucgccgcgcagcccgggcucaccagcgccgucaucgaggcccugccccgcaacauggugaucacgugccagggcuccgaggacauccggaagcugcucgagagccaggggcgccgcgacaucaagcugaucgacaucucccugagcaaggucgacucccggaaguucgagaacgccgugugggaccaguucaaggaccucugccacaugcacaccggcaucguggucgagaagaagaagcgcgggggcaaggaggagaucacgccccacugcgcccugauggacugcaucauguucgacgcggccgugagcggcgggguggacgccaagguccugcgggccgugcucccgcgcgacaugguguuccggaccuccacccccaaggucgugcugugaggacuaguaauaaggaaacuguaugaaugucugugggcaggaagugaagagauccuucuguaaagguuuuuggaauuaugucugcugaauaauaaacuuuuuugaaauaauaaaucugguagaaaaaugagaucucaaaggcucuuuucagagccaccaaaaaaaaaaaaaaaaaaaaaaaaaaaaaaaaaaaaaaaaaaaaaaaaaaaaaaaaaaaaaaaaaaaaaaaaaaaaaaaaaaaaaaaaaaaaaaaaaaaaa

SEQ ID NO: 18842 - RNA, 2109 nt, Artificial Sequence
  mRNA product Design b-4 (hSL-A100) comprising derived and/or modified sequence from LASV(G1180-SLE-2010;Clade IV)__AIT17169__SP-HsPLAT_NP(2-569) (opt1)
aggagagucccgcagucggcguccagcggcucugcuuguucgugugugugucguugcaggccuuauucaagcuuaccauggacgccaugaagcgcggccugugcugcgugcuccugcugugcggggccgucuucgugagccccagcgccuccaaggagaucaagagcuuccuguggacccagucccuccgccgggagcugagcggcuacugcuccaacaucaagcuccagguggucaaggacgcccaggcgcugcugcacgggcuggacuucagcgagguguccaacgugcagcgccucaugcggaaggagcgccgggacgacaacgaccugaagcgccugcgggaccucaaccaggccgucaacaaccugguggagcucaagagcacccagcagaaguccauccugcgcgugggcacccugaccagcgacgaccugcucauccuggccgccgaccuggagaagcucaaguccaaggucauccggaccgagcgcccccugagcgccgggguguacaugggcaaccuguccagccagcagcucgaccagcggcgcgcgcugcuguccaugaucgggaugagcuccggcaaccagcgggcccaggccggccgcgacggggugguccgggugugggacgugaagaacgucgagcuccugaacaaccaguucggcaccaugccgagccugacgcucgccugccugaccaagcagggccagguggaccugaacgacgcggugcaggcccucaccgaccuggggcugaucuacaccgccaaguaccccaacacguccgaccucgaccgccugacccagagccaccccauccugaacaugaucgacaccaagaaguccagccucaacaucagcggguacaacuucucccugggcgccgccgucaaggcgggcgccugcaugcuggacgggggcaacaugcucgagaccaucaaggugagcccccagacgauggacgggauccugaaguccauccugaaggugaagaaggcccucggcauguucaucagcgacaccccgggcgagcggaaccccuacgagaacauccuguacaagaucugccuguccggggacggcuggcccuacaucgccagccgcaccuccaucaccgggcgggccugggagaacacggucguggaccucgagagcgacggcaagccccagaaggcgggguccaacaacagcaacaagucccugcagagcgugggcuucaccgccggccugaccuacucccagcucaugacccugaaggacgccaugcugcagcuggacccgaacgccaagacguggauggacaucgaggggcgccccgaggaccccgucgagaucgcccucuaccagcccagcuccggcugcuacauccacuucuuccgggagccgaccgaccugaagcaguucaagcaggacgcgaaguacagccacgggaucgacgugaccgaccuguucgccgcccagcccggccucaccuccgccgugaucgacgcccugccccgcaacauggucaucacgugccaggggagcgacgacauccgcaagcugcucgagagccagggccggaaggacaucaagcugaucgacaucgcgcuguccaagaccgacagccgcaaguacgagaacgccgugugggaccaguacaaggaccucugccacaugcacaccggcgucgugguggagaagaagaagcgcgggggcaaggaggagaucacgccccacugcgcccugauggacugcaucauguucgacgccgcggucuccgggggccugaacaccagcgugcuccgggccgugcugccgcgggacauggucuuccgcaccuccacgccccggguggugcugugaggacuaguaauaaggaaacuguaugaaugucugugggcaggaagugaagagauccuucuguaaagguuuuuggaauuaugucugcugaauaauaaacuuuuuugaaauaauaaaucugguagaaaaaugagaucucaaaggcucuuuucagagccaccaaaaaaaaaaaaaaaaaaaaaaaaaaaaaaaaaaaaaaaaaaaaaaaaaaaaaaaaaaaaaaaaaaaaaaaaaaaaaaaaaaaaaaaaaaaaaaaaaaaaa

SEQ ID NO: 18843 - RNA, 2109 nt, Artificial Sequence
  mRNA product Design b-4 (hSL-A100) comprising derived and/or modified sequence from LASV(G1442-SLE-2011;Clade IV)__AIT17181__SP-HsPLAT_NP(2-569) (opt1)
aggagagucccgcagucggcguccagcggcucugcuuguucgugugugugucguugcaggccuuauucaagcuuaccauggacgccaugaagcgcggccugugcugcgugcuccugcugugcggggccgucuucgugagccccagcgccuccaaggaggugaaguccuuccuguggacccagagccuccgccgggagcugagcggcuacugcuccaacaucaagcugcaggucgugaaggacgcccaggcgcuccugcacgggcuggacuucagcgagguguccaacguccagcgccucaugcggaagcagcgccgggacgacaacgaccugaagcgccugcgggaccucaaccaggccgugaacaaccugguggagcucaagagcacccagcagaaguccguccugcgcgugggcacccugaccagcgacgaccugcucgugcuggccgccgaccuggagaagcucaaguccaaggucauccggaccgagcgcccccugagcgccgggguguacaugggcaaccuguccagccagcagcucgaccagcggcgcgcgcugcugaacaugaucgggauguccggcggcauccaggggacccggacgggccgcgacggggugguccgggugugggacgugaagaacgccgaccuccugaacaaccaguucggcaccaugccgagccugacccucgccugccugaccaagcaggggcaggucgaccugaacgacguggugcaggcccucacggaccugggccugaucuacaccgcgaaguaccccaacgccuccgaccucgaccgccugacccagagccaccccauccugaacaugaucgacaccaagaaguccagccucaacaucagcggcuacaacuucucccugggggccgccgucaaggccggcgcgugcaugcuggacgggggcaacaugcucgagacgaucaaggugagcccccagaccauggacggcauccugaaguccauccugaaggugaagaagacccucgggauguucaucagcgacaccccgggcgagcggaaccccuacgagaacauccuguacaagaucugccuguccggggacggcuggcccuacaucgccagccgcacguccaucaccgggcgggccugggagaacaccgucguggaccucgagagcgacggcaagccccagaaggccggcuccaacaacagcaacaagucccugcagagcgccggguucgcggccggccugaccuacucccagcucaugacgcugaaggacgccaugcugcagcuggacccgaacgccaagaccuggauggacaucgaggggcgccccgaggaccccguggagaucgcccucuaccagcccagcuccggcugcuacauccacuucuuccgggagccgaccgaccugaagcaguucaagcaggacgcgaaguacagccacgggaucgacgucaccgaccuguucgccgcccagcccggccucacguccgccgugaucgaggcccugccccgcaacauggucaucacgugccagggcagcgacgacaucaagaagcugcucgagucccaggggcgcaaggacaucaagcugaucgacaucgcgcugagcaagaccgacagccggaaguacgagaacgccgugugggaccaguacaaggaccucugccacaugcacaccggcguggucguggagaagaagaagcgcgggggcaaggaggagaucaccccgcacugcgcccugauggacugcaucauguucgacgccgcgguguccgggggccugaacacccucguccugcgggccgugcugccccgcgacaugguguuccggaccagcacgccccgcgucgugcucugaggacuaguaauaaggaaacuguaugaaugucugugggcaggaagugaagagauccuucuguaaagguuuuuggaauuaugucugcugaauaauaaacuuuuuugaaauaauaaaucugguagaaaaaugagaucucaaaggcucuuuucagagccaccaaaaaaaaaaaaaaaaaaaaaaaaaaaaaaaaaaaaaaaaaaaaaaaaaaaaaaaaaaaaaaaaaaaaaaaaaaaaaaaaaaaaaaaaaaaaaaaaaaaaa

SEQ ID NO: 18844 - RNA, 2109 nt, Artificial Sequence
  mRNA product Design b-4 (hSL-A100) comprising derived and/or modified sequence from LASV(G3010-SLE-2013;Clade IV)__AIT17345__SP-HsPLAT_NP(2-569) (opt1)
aggagagucccgcagucggcguccagcggcucugcuuguucgugugugugucguugcaggccuuauucaagcuuaccauggacgccaugaagcgcggccugugcugcgugcuccugcugugcggggccgucuucgugagccccagcgccuccaaggagaucaagagcuuccuguggacccagucccuccgccgggagcugagcggcuacugcuccaacaucaagcuccagguggucaaggacgcccaggcgcugcugcacgggcuggacuucagcgagguguccaacgugcagcgccucaugcggaaggagcgccgggacgacaacgaccugaagcgccugcgggaccucaaccaggccgucaacaaccugguggagcucaagagcacccagcagaaguccauccugcgcgugggcacccugaccagcgacgaccugcucauccuggccgccgaccuggagaagcucaaguccaaggucacccggaccgagcgcccccugagcgccgggguguacaugggcaaccuguccagccagcagcucgaccagcggcgcgcgcugcuguccaugaucgggaugagcuccggcgugcagggcgcccgggccgggcgcgacggcgucgugcgggugugggacgucaagaacgccgagcuccugaacaaccaguucgggacgaugccgagccugacccucgcgugccugaccaagcagggccagguggaccugaacgacgugguccaggcccucaccgaccuggggcugaucuacacggccaaguaccccaacaccuccgaccucgaccgccugacccagagccaccccauccugaacaugaucgacaccaagaaguccagccucaacaucagcggcuacaacuucucccugggcgccgccgugaaggcgggggccugcaugcuggacggcgggaacaugcucgagacgaucaaggugagcccccagaccauggacggcauccugaaguccauccugaaggucaagaaggcccucggcauguucaucagcgagaccccgggggagcggaaccccuacgagaacauccuguacaagaucugccuguccggcgacggguggcccuacaucgccagccgcaccuccaucacgggccgggccugggagaacaccgugguggaccucgagagcgacgggaagccccagaaggcgggcuccaacaacagcaacaagucccugcagagcgccggcuucaccgccgggcugaccuacucccagcucaugacgcugaaggacgccaugcugcagcuggacccgaacgccaagaccuggauggacaucgagggccgccccgaggaccccgucgagguggcgcucuaccagcccagcuccgggugcuacauccacuucuuccgggagccgaccgaccugaagcaguucaagcaggacgccaaguacagccacggcaucgacgugaccgaccuguucgccgcccagcccgggcucacguccgccgucaucgacgcgcugccccgcaacauggugaucacgugccagggcagcgacgacaucaagaagcugcucgagagccagggccgcaaggacaucaagcugaucgacaucgcccuguccaagaccgacagccggaaguacgagaacgccgucugggaccaguacaaggaccucugccacaugcacaccggggugguggucgagaagaagaagcgcggcgggaaggaggagaucaccccgcacugcgcccugauggacugcaucauguucgacgcggccguguccggcgggcugaacaccagcgugcuccgggccguccugccccgcgacaugguguuccggaccuccacgccccgcgugguccugugaggacuaguaauaaggaaacuguaugaaugucugugggcaggaagugaagagauccuucuguaaagguuuuuggaauuaugucugcugaauaauaaacuuuuuugaaauaauaaaucugguagaaaaaugagaucucaaaggcucuuuucagagccaccaaaaaaaaaaaaaaaaaaaaaaaaaaaaaaaaaaaaaaaaaaaaaaaaaaaaaaaaaaaaaaaaaaaaaaaaaaaaaaaaaaaaaaaaaaaaaaaaaaaaa

SEQ ID NO: 18845 - RNA, 2109 nt, Artificial Sequence
  mRNA product Design b-4 (hSL-A100) comprising derived and/or modified sequence from LASV(G502-SLE-2009;Clade IV)__AIT17127__SP-HsPLAT_NP(2-569) (opt1)
aggagagucccgcagucggcguccagcggcucugcuuguucgugugugugucguugcaggccuuauucaagcuuaccauggacgccaugaagcgcggccugugcugcgugcuccugcugugcggggccgucuucgugagccccagcgccuccaaggagaucaagagcuuccuguggacccagucccuccgccgggagcugagcggcuacugcuccaacaucaagcuccagguggucaaggacgcccaggcgcugcugcacgggcuggacuucagcgagguguccaacgugcagcgccucaugcggaaggagcgccgggacgacaacgaccugaagcgccugcgggaccucaaccaggccgucaacaaccugguggagcucaagagcacccagcagaaguccauccugcgcgugggcacccugaccagcgacgaccugcucauccuggccgccgaccuggagaagcucaaguccaaggucauccggaccgagcgcccccugagcgccgggguguacaugggcaaccuguccagccagcagcucgaccagcggcgcgcgcugcuguccaugaucgggaugagcggcggcaaccagggggugcgggccggcaaggacggggucgugcgcgugugggacgucaagaacgccgagcuccugaacaaccaguucggcaccaugccgucccugacgcucgccugccugaccaagcagggccagguggaccugaacgacgcggugcaggcccucaccgaccuggggcugaucuacaccgccaaguaccccaacacgagcgaccucgaccggcugacccagucccaccccauccugaacaugaucgacaccaagaaguccagccucaacaucuccggcuacaacuucagccugggggccgccgucaaggcgggcgccugcaugcuggacgggggcaacaugcucgagaccaucaaggugagcccccagacgauggacggcauccucaagagcauccugaaggugaagaaggcccuggggauguucaucuccgacaccccgggcgagcgcaaccccuacgagaacauccuguacaagaucugccugagcggggacggcuggcccuacaucgccucccggaccagcaucaccgggcgcgccugggagaacacggucguggaccucgaguccgacggcaagccccagaaggcgggcagcaacaacuccaacaagagccugcaguccgccggguucaccgccggccugaccuacagccagcucaugacccugaaggacgccaugcugcagcuggacccgaacacgaagaccuggauggacaucgaggggcggcccgaggaccccguggagaucgcccucuaccagcccuccagcggcugcuacauccacuucuuccgcgagccgaccgaccugaagcaguucaagcaggacgcgaaguacucccacgggaucgacgucaccgaccuguucgccgcccagcccggccucacgagcgccgugaucgacgcccugccccggaacauggugaucacgugccagggcuccgacgacauccgcaagcugcucgagagccaggggcgcaaggacaucaagcugaucgacaucgcgcugaacaagaccgacagccggaaguacgagaacgccgucugggaccaguacaaggaccucugccacaugcacaccggcguggucguggagaagaagaagcgcgggggcaaggaggagaucaccccgcacugcgcccugauggacugcaucauguucgacgccgcgguguccgggggccugaacaccagcguccuccgggccgugcugccccgcgacaugguguuccggaccuccacgccccgcgucgugcugugaggacuaguaauaaggaaacuguaugaaugucugugggcaggaagugaagagauccuucuguaaagguuuuuggaauuaugucugcugaauaauaaacuuuuuugaaauaauaaaucugguagaaaaaugagaucucaaaggcucuuuucagagccaccaaaaaaaaaaaaaaaaaaaaaaaaaaaaaaaaaaaaaaaaaaaaaaaaaaaaaaaaaaaaaaaaaaaaaaaaaaaaaaaaaaaaaaaaaaaaaaaaaaaaa

SEQ ID NO: 18846 - RNA, 2109 nt, Artificial Sequence
  mRNA product Design b-4 (hSL-A100) comprising derived and/or modified sequence from LASV(G733-SLE-2010;Clade IV)__AIT17155__SP-HsPLAT_NP(2-569) (opt1)
aggagagucccgcagucggcguccagcggcucugcuuguucgugugugugucguugcaggccuuauucaagcuuaccauggacgccaugaagcgcggccugugcugcgugcuccugcugugcggggccgucuucgugagccccagcgccuccaaggagaucaagagcuuccuguggacccagucccuccgccgggagcugagcggcuacugcuccaacaucaagcuccagguggucaaggacgcccaggcgcugcugcacgggcuggacuucagcgagguguccaacgugcagcgccucaugcggaaggagcgccgggacgacaacgaccugaagcgccugcgggaccucaaccaggccgucaacaaccugguggagcucaagagcacccagcagaaguccgugcugcgcgucggcacccugaccagcgacgagcugcucgugcuggccgccgaccuggagaagcucaaguccaaggugauccggaccgagcgcccccugagcgccggggucuacaugggcaaccuguccagccagcagcucgaccagcggcgcgcgcugcuguccaugaucgggaugagcggcggcaaccagggggcccggaccggccgcgacgggguggugcgggucugggacgugaagaacgccgagcuccugaacaaccaguucggcaccaugccgucccugacccucgccugccugaccaagcagggccagguggaccugaacgacgcgguccaggcccucaccgaccuggggcugaucuacacggccaaguaccccaacaccagcgaccucgaccgccugacccagucccaccccauccugaacaugaucgacaccaagaaguccagccucaacaucuccggcuacaacuucagccugggggccgccgugaaggcgggcgccugcaugcuggacgggggcaacaugcucgagacgaucaaggugagcccccagaccauggacggcauccucaagagcauccugaaggucaagaaggcccuggggauguucaucuccgacaccccgggcgagcggaaccccuacgagaacauccuguacaagaucugccugagcggggacggcuggcccuacaucgccucccgcaccagcaucacggggcgggccugggagaacaccgugguggaccucgaguccgacggcaagccccagaaggcgggcagcaacaacuccaacaagagccugcaguccgccggguucaccgccggccugaccuacagccagcucaugacgcugaaggacgccaugcugcagcuggacccgaacgccaagaccuggauggacaucgaggggcgccccgaggaccccgucgagaucgcgcucuaccagcccuccagcggcugcuacauccacuucuuccgggagccgaccgaccugaagcaguucaagcaggacgccaaguacucccacgggaucgacgugaccgaccuguucgccgcccagcccggccucacgagcgccgugaucgacgcgcugccccgcaacauggucaucacgugccagggcuccgacgacauccgcaagcugcucgagagccaggggcggaaggacaucaagcugaucgacaucgcccugagcaagaucgacucccgcaaguacgagaacgccgugugggaccaguacaaggaccucugccacaugcacaccggcgucgugguggagaagaagaagcgcgggggcaaggaggagaucacgccccacugcgcccugauggacugcaucauguucgacgcggccgucagcgggggccugaacucccucgugcugcgggccgugcugccgcgggacauggucuuccgcaccagcacgccccggguggugcucugaggacuaguaauaaggaaacuguaugaaugucugugggcaggaagugaagagauccuucuguaaagguuuuuggaauuaugucugcugaauaauaaacuuuuuugaaauaauaaaucugguagaaaaaugagaucucaaaggcucuuuucagagccaccaaaaaaaaaaaaaaaaaaaaaaaaaaaaaaaaaaaaaaaaaaaaaaaaaaaaaaaaaaaaaaaaaaaaaaaaaaaaaaaaaaaaaaaaaaaaaaaaaaaaa

SEQ ID NO: 18847 - RNA, 2109 nt, Artificial Sequence
  mRNA product Design b-4 (hSL-A100) comprising derived and/or modified sequence from MOPV/LASV reassortant(IGS-1;Clade IV)__AFY05578__SP-HsPLAT_NP(2-569) (opt1)
aggagagucccgcagucggcguccagcggcucugcuuguucgugugugugucguugcaggccuuauucaagcuuaccauggacgccaugaagcgcggccugugcugcgugcuccugcugugcggggccgucuucgugagccccagcgccuccaaggagaucaagagcuuccuguggacccagucccuccgccgggagcugagcggcuacugcuccaacaucaagcuccagguggucaaggacgcccaggcgcugcugcacgggcuggacuucagcgagguguccaacgugcagcgccucaugcggaaggagcgccgggacgacaacgaccugaagcgccugcgggaccucaaccaggccgucaacaaccugguggagcucaagagcacccagcagaaguccauccugcgcgugggcacccugaccagcgacgaccugcucauccuggccgccgaccuggagaagcuccgguccaaggucauccgcaccgagcggccccugagcgccgggguguacaugggcaaccuguccagccagcagcucgaccagcgccgggcgcugcugaacaugaucgggauguccggcggcaaccagggggcccgcgccggccgggacggggugguccgcgugugggacgugaagaacgccgagcuccugagcaaccaguucggcaccaugccgucccugacgcucgcgugccugaccaagcaggggcaggucgaccugaacgacgccgugcaggcccucaccgaccugggccugaucuacaccgccaaguaccccaacacgagcgaccucgaccggcugacccagucccaccccauccugaacaugaucgacaccaagaaguccagccucaacaucuccggcuacaacuucagccugggggccgcggugaaggccggcgccugcaugcuggacgggggcaacaugcucgagaccaucaaggucagcccccagacgauggacggcauccucaagagcauccugaaggugaagaaggcccuggggauguucaucuccgacaccccgggcgagcgcaaccccuacgagaacauccuguacaagaucugccugagcggggacggcuggcccuacaucgccucccggaccagcaucaccgggcgcgcgugggagaacacgguggucgaccucgaguccgacggcaagccccagaaggccgacagcaacaacuccagcaagucccugcagagcgccggcuucaccgccgggcugaccuacucccagcucaugacccugaaggacgccaugcugcagcuggacccgaacgcgaagacguggauggacaucgagggccggcccgaggaccccguggagaucgcccucuaccagcccagcuccgggugcuacauccacuucuuccgcgagccgaccgaccugaagcaguucaagcaggacgccaaguacagccacggcaucgacgugaccgaccuguucgccacccagcccgggcucacguccgccgucaucgacgcgcugccccgcaacauggugaucacgugccagggcagcgacgacauccggaagcugcucgagagccagggccgcaaggacaucaagcugaucgacaucgaccuguccaagaccgacagccggaaguacgagaacgccgugugggaccaguacaaggaccucugccacaugcacaccggggucguggucgagaagaagaagcgcggcgggaaggaggagaucaccccgcacugcgcccugauggacugcaucauguucgacgccgcgguguccggcgggcugaacaccagcgugcuccgggccguccugccccgcgacaugguguuccggaccuccacgccccgcgugguccugugaggacuaguaauaaggaaacuguaugaaugucugugggcaggaagugaagagauccuucuguaaagguuuuuggaauuaugucugcugaauaauaaacuuuuuugaaauaauaaaucugguagaaaaaugagaucucaaaggcucuuuucagagccaccaaaaaaaaaaaaaaaaaaaaaaaaaaaaaaaaaaaaaaaaaaaaaaaaaaaaaaaaaaaaaaaaaaaaaaaaaaaaaaaaaaaaaaaaaaaaaaaaaaaaa

SEQ ID NO: 18848 - RNA, 2109 nt, Artificial Sequence
  mRNA product Design b-4 (hSL-A100) comprising derived and/or modified sequence from LASV(LM765-SLE-2012;Clade IV)__AIT17815__SP-HsPLAT_NP(2-569) (opt1)
aggagagucccgcagucggcguccagcggcucugcuuguucgugugugugucguugcaggccuuauucaagcuuaccauggacgccaugaagcgcggccugugcugcgugcuccugcugugcggggccgucuucgugagccccagcgccuccaaggagaucaagagcuuccuguggacccagucccuccgccgggagcugagcggcuacugcuccaacaucaagcuccagguggucaaggacgcccaggcgcugcugcacgggcuggacuucagcgagguguccaacgugcagcgccucaugcggaaggagcgccgggacgacaacgaccugaagcgccugcgggaccucaaccaggccgucaacaaccugguggagcucaagagcacccagcagaaguccauccugcgcgugggcacccugaccagcgacgaccugcucauccuggccgccgaccuggagaagcucaaguccaaggucacccggaccgagcgcccccugagcgccgggguguacaugggcaaccuguccagccagcagcucgaccagcggcgcgcgcugcuggacaugaucgggauguccggcagcaaccagggcgcccgggccgggcgcgacggcgugguccgggugugggacgugaagaacgccgagcuccugaacaaccaguucgggacgaugccgucccugacccucgcgugccugaccaagcagggccaggucgaccugaacgacgccgugcaggcccucaccgaccuggggcugaucuacacggccaaguaccccaacaccagcgaccucgaccgccugacccagucccaccccauccugaacaugaucgacaccaagaaguccagccucaacaucuccggcuacaacuucagccugggcgccgcggugaaggccggggccugcaugcuggacggcgggaacaugcucgagacgaucaaggucagcccccagaccauggacggcauccucaagagcauccugaaggugaagaaggcccugggcauguucaucuccgacgccccgggggagcggaaccccuacgagaacauccuguacaagaucugccugagcggcgacggguggcccuacaucgcgucccgcaccagcaucaccggccgggccugggagaacacgguggucgaccucgaguccgacgggaagccccagaaggccggcagcaacggcuccaacaagagccugcaguccgccggguucaccgccggccugaccuacagccagcucaugacccugaaggacgcgaugcugcagcuggacccgaacgccaagacguggauggacaucgaggggcgccccgaggaccccguggagaucgcccucuaccagcccuccagcggcugcuacauccacuucuuccgggagccgaccgaccugaagcaguucaagcaggacgccaaguacucccacgggaucgacgugaccgaccuguucgccgcgcagcccggccucaccagcgccgucaucgacgcccugccccgcaacauggugaucacgugccagggcuccgacgacauccgcaagcuguucgagagccaggggcggaaggacaucaagcucaucgacaucgcccugagcaagaccgacucccgcaaguacgagaacgcggugugggaccaguacaaggaccugugccacaugcacaccggcaucgucguggagaagaagaagcgcgggggcaaggaggagaucacgccccacugcgcccucauggacugcaucauguucgacgccgccgucagcgggggccugaacaccuccgugcugcgggccgugcucccgcgggacauggucuuccgcaccagcacgccccggguggugcugugaggacuaguaauaaggaaacuguaugaaugucugugggcaggaagugaagagauccuucuguaaagguuuuuggaauuaugucugcugaauaauaaacuuuuuugaaauaauaaaucugguagaaaaaugagaucucaaaggcucuuuucagagccaccaaaaaaaaaaaaaaaaaaaaaaaaaaaaaaaaaaaaaaaaaaaaaaaaaaaaaaaaaaaaaaaaaaaaaaaaaaaaaaaaaaaaaaaaaaaaaaaaaaaaa

SEQ ID NO: 18849 - RNA, 2109 nt, Artificial Sequence
  mRNA product Design b-4 (hSL-A100) comprising derived and/or modified sequence from LASV(LM776-SLE-2012;Clade IV)__AIT17825__SP-HsPLAT_NP(2-569) (opt1)
aggagagucccgcagucggcguccagcggcucugcuuguucgugugugugucguugcaggccuuauucaagcuuaccauggacgccaugaagcgcggccugugcugcgugcuccugcugugcggggccgucuucgugagccccagcgccuccaaggagaucaagagcuuccuguggacccagucccuccgccgggagcugagcuccuacugcagcaacaucaagcuccagguggucaaggacgcccaggcgcugcugcacggccuggacuucuccgaggugagcaacgugcagcgccucaugcggaaggagcgccgggacgacaacgaccugaagcgccugcgggaccucaaccaggccgucaacaaccugguggagcugaaguccacccagcagaaguccauccuccgcguggggacccugaccuccgacgaccugcucauccuggccgccgaccuggagaagcucaagagcaaggucacccggaccgagcgcccccuguccgccggcguguacauggggaaccugagcucccagcagcucgaccagcggcgcgcgcugcugagcaugaucggcauguccgggagcaaccagggcgcccgggccggccgcgacggggugguccgggugugggacgugaagaacgccgagcuccugaacaaccaguucggcacgaugccgucccugacccucgcgugccugaccaagcaggggcaggucgaccugaacgacgccgugcaggcccucaccgaccugggccugaucuacacggccaaguaccccaacaccagcgaccucgaccgccugacccagagccaccccauccugaacaugaucgacaccaagaaguccagccucaacaucuccggguacaacuucagccugggcgccgcggugaaggccggcgccugcaugcuggacgggggcaacaugcucgagacgaucaaggucagcccccagaccauggacgggauccucaagagcauccugaaggugaagaaggcccugggcauguucaucuccgacaccccgggcgagcggaaccccuacgagaacauccuguacaagaucugccugagcggggacggcuggcccuacaucgccucccgcaccagcaucacggggcgggcgugggagaacaccguggucgaccucgaguccgacggcaagccccagaaggccgggagcaacaacuccaacaagagccugcaguccgccggcuucaccgccggccugaccuacagccagcucaugacgcugaaggacgccaugcugcagcuggacccgaacgcgaagaccuggauggacaucgaggggcgccccgaggaccccguggagguggcccucuaccagcccuccagcggcugcuacauccacuucuuccgggagccgaccgaccugaagcaguucaagcaggacgccaaguacucccacgggaucgacgucaccgaccuguucgccgcccagcccggccucacgagcgcggugaucgacgcccugccccgcaacauggugaucacgugccaggggagcgacgacauccgcaagcugcucgagucccagggccggaaggacaucaagcugaucgacaucgcccugagcaagaccgacucccgcaaguacgagaacgccgucugggaccaguacaaggaccucugccacaugcacaccggcguggucguggagaagaagaagcgcgggggcaaggaggagaucaccccgcacugcgcgcugauggacugcaucauguucgacgccgccgugagcgggggccugaacaccuccguccuccgggccgugcugccccgggacaugguguuccgcaccagcacgccccgggucgugcugugaggacuaguaauaaggaaacuguaugaaugucugugggcaggaagugaagagauccuucuguaaagguuuuuggaauuaugucugcugaauaauaaacuuuuuugaaauaauaaaucugguagaaaaaugagaucucaaaggcucuuuucagagccaccaaaaaaaaaaaaaaaaaaaaaaaaaaaaaaaaaaaaaaaaaaaaaaaaaaaaaaaaaaaaaaaaaaaaaaaaaaaaaaaaaaaaaaaaaaaaaaaaaaaaa

SEQ ID NO: 18850 - RNA, 2109 nt, Artificial Sequence
  mRNA product Design b-4 (hSL-A100) comprising derived and/or modified sequence from LASV(Mad39;Clade IV)__ANH09723__SP-HsPLAT_NP(2-569) (opt1)
aggagagucccgcagucggcguccagcggcucugcuuguucgugugugugucguugcaggccuuauucaagcuuaccauggacgccaugaagcgcggccugugcugcgugcuccugcugugcggggccgucuucgugagccccagcgccuccaaggagaucaagagcuuccuguggacccagucccuccgccgggagcugagcggcuacugcuccaacaucaagcuccagguggucaaggacgcccaggcgcugcugcacgggcuggacuucagcgagguguccaacgugcagcgccucaugcggaagcagcgccgggacgacaacgaccugaagcgccugcgggaccucaaccaggccgucaacaaccugguggagcugaaguccacccagcagaaguccgugcuccgcgucggcacgcugaccagcgacgaccugcucacccuggccgccgaccuggagaagcucaaguccaaggugacccggacggagcgcccccugaccgccgggguguacaugggcaaccugagcucccagcagcucgaccagcggcgcgcgcugcugaacaugaucgggaugagcggcggcaaccagggggcccggaccggccgcgacggggucgugcgggugugggacgucaagaacgccgagcuccugaacaaccaguucggcaccaugccgucccugacgcucgccugccugaccaagcagggccagguggaccugaacgacgugguccaggcgcucaccgaccuggggcugaucuacaccgccaaguaccccaacacgagcgaccucgaccgccugacccagucccaccccauccugaacaugaucgacaccaacaagagcucccucaacaucagcggcuacaacuucagccugggggccgccgugaaggccggcgcgugcaugcuggacgggggcaacaugcucgagaccaucaaggugagcccccagacgauggacggcauccucaagagcauccugaaggucaagaagucccuggggauguucaucagcgacaccccgggcgagcggaaccccuacgagaacauccuguacaagaucugccuguccggggacggcuggcccuacaucgccagccgcaccuccaucaccgggcgggccugggagaacacggugguggaccucgagagcggcggcaagccccagaaggccggguccaacaacagcaacaagucccugcagagcgccggcuucgcggccgggcugaccuacucccagcucaugacccugaaggacgccaugcugcagcuggacccgaacgccaagaccuggauggacaucgagggccgccccgaggaccccgucgagaucgcccucuaccagcccaucagcgggugcuacauccacuucuuccgggagccgacggaccugaagcaguucaagcaggacgcgaaguacucccacggcaucgacgugaccgaccuguucgccgcccagcccggccucaccagcgccgugaucgaggcccugccccgcaacauggucaucacgugccagggguccgacgacauccgcaagcuguucgagagccagggccggaaggacaucaagcucaucgacaucgcgcuguccaagaccgacagccgcaaguacgagaacgccgugugggaccaguacaaggaccugugccacaugcacaccggggucgugguggagaagaagaagaagggcgggaaggaggagaucacgccccacugcgcccucauggacugcaucauguucgacgccgcggucagcggcggccugaacacccuggugcuccgggccgugcugccgcgcgacauggucuuccggaccuccacccccaagguggugcugugaggacuaguaauaaggaaacuguaugaaugucugugggcaggaagugaagagauccuucuguaaagguuuuuggaauuaugucugcugaauaauaaacuuuuuugaaauaauaaaucugguagaaaaaugagaucucaaaggcucuuuucagagccaccaaaaaaaaaaaaaaaaaaaaaaaaaaaaaaaaaaaaaaaaaaaaaaaaaaaaaaaaaaaaaaaaaaaaaaaaaaaaaaaaaaaaaaaaaaaaaaaaaaaaa

SEQ ID NO: 18851 - RNA, 2109 nt, Artificial Sequence
  mRNA product Design b-4 (hSL-A100) comprising derived and/or modified sequence from LASV(Z0947-SLE-2011;Clade IV)__AIT17841__SP-HsPLAT_NP(2-569) (opt1)
aggagagucccgcagucggcguccagcggcucugcuuguucgugugugugucguugcaggccuuauucaagcuuaccauggacgccaugaagcgcggccugugcugcgugcuccugcugugcggggccgucuucgugagccccagcgccuccaaggagaucaagagcuuccuguggacccagucccuccgccgggagcugagcggcuacugcuccaacaucaagcuccagguggucaaggacgcccaggcgcugcugcacgggcuggacuucagcgagguguccaacgugcagcgccucaugcggaaggagcgccgggacgacaacgaccugaagcgccugcgggaccucaaccaggccgucaacaaccugguggagcucaagagcacccagcagaaguccauccugcgcgugggcacccugaccagcgacgaccugcucauccuggccgccgaccuggagaagcucaaguccaaggucacccggaccgagcgcccccugagcgccgggguguacaugggcaaccuguccagccagcagcucgaccagcggcgcgcgcugcugaacaugaucgggauguccggcagcaaccagggcgcccggacggggcgcgacggcgugguccgggugugggacgugaagaacgccgagcuccugaacaaccaguucgggaccaugccgucccugacccucgccugccugaccaagcagggccaggucgaccugaacgacgcggugcaggcccucacggaccuggggcugaucuacaccgccaaguaccccaacaccagcgaccucgaccgccugacccagucccaccccauccugaacaugaucgacacgaagaaguccagccucaacaucuccggcuacaacuucagccugggcgccgccgugaaggcgggggccugcaugcuggacggcgggaacaugcucgagaccaucaaggucagcccccagaccauggacggcauccucaagagcauccugaaggugaagaaggcccugggcauguucaucuccgacgccccgggggagcggaaccccuacgagaacauccuguacaagaucugccugagcggcgacggguggcccuacaucgccucccgcaccagcaucacgggccgggcgugggagaacaccguggucgaccucgaguccgacgggaagccccagaaggccggcagcaacggcuccaacaagagccugcaguccgccggguucaccgccggccugaccuacagccagcucaugacgcugaaggacgccaugcugcagcuggacccgaacgcgaagaccuggauggacaucgaggggcgccccgaggaccccguggagaucgcccucuaccagcccuccagcggcugcuacauccacuucuuccgggagccgaccgaccugaagcaguucaagcaggacgccaaguacucccacgggaucgacgugaccgaccuguucgccgcccagcccggccucacgagcgcggucaucgacgcccugccccgcaacauggugaucacgugccagggcuccgacgacauccgcaagcuguucgagagccaggggcggaaggacaucaagcucaucgacaucgcccugagcaagaccgacucccgcaaguacgagaacgccgugugggaccaguacaaggaccugugccacaugcacaccggcaucgucguggagaagaagaagcgcgggggcaaggaggagaucaccccgcacugcgcgcucauggacugcaucauguucgacgccgccgucagcgggggccugaacaccuccgugcugcgggccgugcucccccgggacauggucuuccgcaccagcacgccccggguggugcugugaggacuaguaauaaggaaacuguaugaaugucugugggcaggaagugaagagauccuucuguaaagguuuuuggaauuaugucugcugaauaauaaacuuuuuugaaauaauaaaucugguagaaaaaugagaucucaaaggcucuuuucagagccaccaaaaaaaaaaaaaaaaaaaaaaaaaaaaaaaaaaaaaaaaaaaaaaaaaaaaaaaaaaaaaaaaaaaaaaaaaaaaaaaaaaaaaaaaaaaaaaaaaaaaa

SEQ ID NO: 18852 - RNA, 2109 nt, Artificial Sequence
  mRNA product Design b-4 (hSL-A100) comprising derived and/or modified sequence from LASV(Josiah;Clade IV)__NP_694869__SP-HsPLAT_NP(2-569) (opt4)
aggagagucccgcagucggcguccagcggcucugcuuguucgugugugugucguugcaggccuuauucaagcuuaccauggacgccaugaagagaggccugugcugcgugcugcugcugugcggcgccguguucgugagccccagcgccagcaaggagaucaagagcuuccuguggacccagagccugagaagagagcugagcggcuacugcagcaacaucaagcugcagguggugaaggacgcccaggcccugcugcacggccuggacuucagcgaggugagcaacgugcagagacugaugagaaaggagagaagagacgacaacgaccugaagagacugagagaccugaaccaggccgugaacaaccugguggagcugaagagcacccagcagaagagcauccugagagugggcacccugaccagcgacgaccugcugauccuggccgccgaccuggagaagcugaagagcaaggugaucagaaccgagagaccccugagcgccggcguguacaugggcaaccugagcagccagcagcuggaccagagaagagcccugcugaacaugaucggcaugagcggcggcaaccagggcgccagagccggcagagacggcguggugagagugugggacgugaagaacgccgagcugcugaacaaccaguucggcaccaugcccagccugacccuggccugccugaccaagcagggccagguggaccugaacgacgccgugcaggcccugaccgaccugggccugaucuacaccgccaaguaccccaacaccagcgaccuggacagacugacccagagccaccccauccugaacaugaucgacaccaagaagagcagccugaacaucagcggcuacaacuucagccugggcgccgccgugaaggccggcgccugcaugcuggacggcggcaacaugcuggagaccaucaaggugagcccccagaccauggacggcauccugaagagcauccugaaggugaagaaggcccugggcauguucaucagcgacacccccggcgagagaaaccccuacgagaacauccuguacaagaucugccugagcggcgacggcuggcccuacaucgccagcagaaccagcaucaccggcagagccugggagaacaccgugguggaccuggagagcgacggcaagccccagaaggccgacagcaacaacagcagcaagagccugcagagcgccggcuucaccgccggccugaccuacagccagcugaugacccugaaggacgccaugcugcagcuggaccccaacgccaagaccuggauggacaucgagggcagacccgaggaccccguggagaucgcccuguaccagcccagcagcggcugcuacauccacuucuucagagagcccaccgaccugaagcaguucaagcaggacgccaaguacagccacggcaucgacgugaccgaccuguucgccacccagcccggccugaccagcgccgugaucgacgcccugcccagaaacauggugaucaccugccagggcagcgacgacaucagaaagcugcuggagagccagggcagaaaggacaucaagcugaucgacaucgcccugagcaagaccgacagcagaaaguacgagaacgccgugugggaccaguacaaggaccugugccacaugcacaccggcguggugguggagaagaagaagagaggcggcaaggaggagaucaccccccacugcgcccugauggacugcaucauguucgacgccgccgugagcggcggccugaacaccagcgugcugagagccgugcugcccagagacaugguguucagaaccagcacccccagaguggugcugugaggacuaguaauaaggaaacuguaugaaugucugugggcaggaagugaagagauccuucuguaaagguuuuuggaauuaugucugcugaauaauaaacuuuuuugaaauaauaaaucugguagaaaaaugagaucucaaaggcucuuuucagagccaccaaaaaaaaaaaaaaaaaaaaaaaaaaaaaaaaaaaaaaaaaaaaaaaaaaaaaaaaaaaaaaaaaaaaaaaaaaaaaaaaaaaaaaaaaaaaaaaaaaaaa

SEQ ID NO: 18853 - RNA, 2109 nt, Artificial Sequence
  mRNA product Design b-4 (hSL-A100) comprising derived and/or modified sequence from LASV(LP;Clade I)__AAF86702__SP-HsPLAT_NP(2-569) (opt4)
aggagagucccgcagucggcguccagcggcucugcuuguucgugugugugucguugcaggccuuauucaagcuuaccauggacgccaugaagagaggccugugcugcgugcugcugcugugcggcgccguguucgugagccccagcaacagcaaggagaucaagagcuuccuguggacccagagccugagaagagagcugagcggcuacugcagcaacaucaagcugcagguggugaaggacgcccaggcccugcugcacggccuggacuucagcgaggugagcaacgugcagagacugaugagaaagcagaagagagacgacgccgaccugaagagacugagagaccugaaccaggccgugaacaaccugguggagcugaagagcacccagcagaagaacgugcugagagugggcacccugagcagcgacgaccugaucacccuggccgccgaccuggagaagcugaagagcaaggugaucagaaccgagagaccccugagcagcggcguguacaugggcaaccugagcagccagcagcuggaccagagaagagcccugcugagcaugaucggcaugagcggcggcccccagggcaacagaaccggcggcgacggcguggugagagugugggacgugaagaacgccgagcugcugaacaaccaguucggcaccaugcccagccugacccuggccugccugaccaagcagggccagguggaccugaacgacgccgugcaggcccugaccgaccugggccugaucuacaccgccaaguaccccaacagcagcgaccuggacaugcugacccagagccaccccauccugggcaugguggacaccaagaagagcagccugaacaucagcggcuacaacuucagccugggcgccgccgugaaggccggcgccugcaugcuggacggcggcaacaugcuggagaccaucaaggugagcccccagaccauggacggcauccugaagagcauccugaaggugaagagaagccugggcauguucaucagcgacacccccggcgagagaaaccccuacgagaacauccuguacaagaucugccugagcggcgagggcuggcccuacaucgccagcagaaccagcaucaccggcagagccugggagaacacccugguggaccuggagagcgacaacaagccccccaagcugaacagcgccggcagcaacaagagccugcaggccgccggccugaacgccggccugaccuacagccagcugaugacccugaaggacugcaugcugcagcuggaccccagcagcaagaccuggaucgacaucgagggcagacccgaggaccccguggagaucgcccuguuccagcccagcagcggcugcuacauccacuucuucagagagcccaccgaccugaagcaguucaagcaggacgccaaguacagccacggcaucgacgugaccgaccuguucagcacccagcccggccugaccagcgccgugaucgaggcccugcccagaaacauggugcugaccugccagggcagcgacgacaucaagaagcugcuggagagccagggcagaagagacaucaagcugaucgacaucagccugagcaaggccgacagcagaaaguucgagaacgccgugugggaccaguacaaggaccugugccacaugcacaccggcguggugguggagaagaagaagagaggcggcaaggaggagaucaccccccacugcgcccugcuggacugcaucauguucgacgccgccaccaccggcagccugaacaucaccacccugagagccgugcugcccagagacaugguguucagaaccagcacccccaagguggugcugugaggacuaguaauaaggaaacuguaugaaugucugugggcaggaagugaagagauccuucuguaaagguuuuuggaauuaugucugcugaauaauaaacuuuuuugaaauaauaaaucugguagaaaaaugagaucucaaaggcucuuuucagagccaccaaaaaaaaaaaaaaaaaaaaaaaaaaaaaaaaaaaaaaaaaaaaaaaaaaaaaaaaaaaaaaaaaaaaaaaaaaaaaaaaaaaaaaaaaaaaaaaaaaaaa

SEQ ID NO: 18854 - RNA, 2109 nt, Artificial Sequence
  mRNA product Design b-4 (hSL-A100) comprising derived and/or modified sequence from LASV(803213;Clade II)__AAF86704__SP-HsPLAT_NP(2-569) (opt4)
aggagagucccgcagucggcguccagcggcucugcuuguucgugugugugucguugcaggccuuauucaagcuuaccauggacgccaugaagagaggccugugcugcgugcugcugcugugcggcgccguguucgugagccccagcgccagcaaggaggugaagagcuuccuguggacccagagccugagaagagagcugagcggcuacugcagcaacaucaagcugcagguggugaaggacgcccaggcccugcugcacggccuggacuucagcgaggugaacaacgugcagagacugaugagaaagcagaagagagacgacggcgaccugaagagacugagagaccugaaccaggccgugaacaaccugguggagcugaagagcacccagcagaagagcauccugagagugggcacccugaccagcgacgaccugcugacccuggccgccgaccuggagaagcugaagagcaaggugaucagaaccgagagaccccugagcagcggcguguacaugggcaaccugagcacccagcagcuggagcagagaagagcccugcugaacaugaucggcauggugggcggcgcccagggcacccagcccggcagagacggcguggugagagugugggacgugaagaaccccgaccugcugaacaaccaguucggcaccaugcccagccugacccuggccugccugaccaagcagggccagguggaccugaacgacgccgugcuggcccugaccgaccugggccugaucuacaccgccaaguaccccaacagcagcgaccuggacagacugagccagagccaccccauccugaacaugguggacaccaagaagagcagccugaacaucagcggcuacaacuucagccugggcgccgccgugaaggccggcgccugcaugcuggacggcggcaacaugcuggagaccaucaaggugaccccccagaccauggacggcauccugaagagcauccugaaggugaagagaagccugggcauguucgugagcgacacccccggcgagagaaaccccuacgagaacauccuguacaagaucugccugagcggcgacggcuggcccuacaucgccagcagaaccagcaucgugggcagagccugggagaacaccaccguggaccuggagagcgacggcaagccccagaaggugggcaccgccggcagcaacaagagccugcagagcgccggcuuccccaccggccugaccuacagccagcugaugacccugaaggacagcaugaugcagcuggaccccagcgccaagaccuggaucgacaucgagggcagacccgaggaccccguggagaucgcccuguaccagcccaugagcggcugcuacauccacuucuucagagagcccaccgaccugaagcaguucaagcaggacgccaaguacagccacggcaucgacguggccgaccuguuccccgcccagcccggccugaccagcgccgugaucgaggcccugcccagaaacauggugcugaccugccagggcagcgacgacaucaagaagcugcuggacagccagggcagaagagacaucaagcugaucgacaucagccugagcaagguggacagcagaaaguucgagaacgccgugugggaccagugcaaggaccugugccacaugcacaccggcguggugguggagaagaagaagagaggcggcaaggaggagaucaccccccacugcgcccugauggacugcaucauguucgacgccgccgugagcggcggccugaacauccccgugcugagagccgugcugcccagagacaugguguucagaaccagcagccccaagguggugcugugaggacuaguaauaaggaaacuguaugaaugucugugggcaggaagugaagagauccuucuguaaagguuuuuggaauuaugucugcugaauaauaaacuuuuuugaaauaauaaaucugguagaaaaaugagaucucaaaggcucuuuucagagccaccaaaaaaaaaaaaaaaaaaaaaaaaaaaaaaaaaaaaaaaaaaaaaaaaaaaaaaaaaaaaaaaaaaaaaaaaaaaaaaaaaaaaaaaaaaaaaaaaaaaaa

SEQ ID NO: 18855 - RNA, 2112 nt, Artificial Sequence
  mRNA product Design b-4 (hSL-A100) comprising derived and/or modified sequence from LASV(GA391;Clade III)__CAA36646__SP-HsPLAT_NP(2-570) (opt4)
aggagagucccgcagucggcguccagcggcucugcuuguucgugugugugucguugcaggccuuauucaagcuuaccauggacgccaugaagagaggccugugcugcgugcugcugcugugcggcgccguguucgugagccccagcgccagcaaggaggugagaagcuuccuguggacccagagccugagaagagagcugagcggcuacugcagcaacaucaagcugcagguggugaaggacgcccaggcccugcugcacggccuggacuucagcgaggugagcaacgugcagagacugaugagaaagcagaagagagacgacggcgaccugaagagacugagagaccugaaccaggccgugaacaaccugguggagcugaagagcacccagcagaagagcgugcugagagugggcacccugagcagcgacgaccugcugauccuggccgccgaccuggagaagcugaagagcaaggugaccagaaccgagagaccccugagcagcggcguguacaugggcaaccugagcagccagcagcuggaccagagaagagcccugcugaacaugaucggcaugaccggcgugagcggcggcggcaagggcgccagcgacggcaucgugagagugugggacgugaagaacgccgagcugcugaacaaccaguucggcaccaugcccagccugacccuggccugccugaccaagcagggccagguggaccugaacgacgccgugcaggcccugaccgaccugggccugaucuacaccgccaaguaccccaacagcagcgaccuggacagacugagccagagccaccccauccugaacaugaucgacaccaagaagagcagccugaacaucagcggcuacaacuucagccugggcgccgccgugaaggccggcgccugcaugcuggacggcggcaacaugcuggagaccaucaaggugagcccccagaccauggacggcauccugaagagcauccugaaggugaagaagagccugggcauguucgugagcgacacccccggcgagagaaaccccuacgagaacauccuguacaagaucugccugagcggcgacggcuggcccuacaucgccagcagaaccagcaucgugggcagagccugggagaacaccgugguggaccuggagcaggacaacaagccccagaagaucggcaacggcggcagcaacaagagccugcagagcgccggcuucgccgccggccugaccuacagccagcugaugacccugaaggacuucaagugcuucaaccugauccccaacgccaagaccuggauggacaucgagggcagacccgaggaccccguggagaucgcccuguaccagcccagcagcggcugcuacgugcacuucuucagagagcccaccgaccugaagcaguucaagcaggacgccaaguacagccacggcaucgacgugaccgaccuguucgccgcccagcccggccugaccagcgccgugaucgaggcccugcccagaaacauggugaucaccugccagggcagcgaggacaucagaaagcugcuggagagccagggcagaagagacaucaagcugaucgacaucacccugagcaaggccgacagcagaaaguucgagaacgccgugugggaccaguucaaggaccugugccacaugcacaccggcguggugguggagaagaagaagagaggcggcaaggaggagaucaccccccacugcgcccugauggacugcaucauguucgacgccgccgugagcggcggccuggacgccaaggugcugagaguggugcugcccagagacaugguguucagaaccagcacccccaagguggugcugugaggacuaguaauaaggaaacuguaugaaugucugugggcaggaagugaagagauccuucuguaaagguuuuuggaauuaugucugcugaauaauaaacuuuuuugaaauaauaaaucugguagaaaaaugagaucucaaaggcucuuuucagagccaccaaaaaaaaaaaaaaaaaaaaaaaaaaaaaaaaaaaaaaaaaaaaaaaaaaaaaaaaaaaaaaaaaaaaaaaaaaaaaaaaaaaaaaaaaaaaaaaaaaaaa

SEQ ID NO: 18856 - RNA, 2109 nt, Artificial Sequence
  mRNA product Design b-4 (hSL-A100) comprising derived and/or modified sequence from LASV(AV;Clade V)__CCA30315__SP-HsPLAT_NP(2-569) (opt4)
aggagagucccgcagucggcguccagcggcucugcuuguucgugugugugucguugcaggccuuauucaagcuuaccauggacgccaugaagagaggccugugcugcgugcugcugcugugcggcgccguguucgugagccccagcgccagcaaggaggugaagagcuuccuguggacccagagccugagaagagagcugagcggcuacugcagcaacaucaagcugcagguggugaaggacgcccaggcccugcugcacggccuggacuucagcgaggugagcaacgugcagagacugaugagaaagcagagaagagacgacagcgaccugaagagacugagagaccugaaccaggccgugaacaaccugguggagcugaagagcacccagcagaagagcgugcugagagugggcacccugagcagcgacgaccugcugacccuggccgccgaccuggagaagcugaagagcaaggugaccagaaccgagagaccccugagcagcggcguguacaugggcaaccugagcagccagcagcuggaccagagaagagcccugcugaaccugaucggcaugaccaacggcagccagggcagccaggccggcagagacggcguggugagagugugggacgugaagaacgccgagcugcugaacaaccaguucggcaccaugcccagccugacccuggccugccugaccaagcagggccagguggaccugaacgacguggugcaggcccugaccgaccugggccugaucuacaccgccaaguaccccaacaccagcgaccuggacagacugacccagagccaccccauccugaacaugaucgacaccaagaagagcagccugaacaucagcggcuacaacuucagccugggcgccgccgugaaggccggcgccugcaugcuggacggcggcaacaugcuggagaccaucaaggugagcccccagagcauggacggcauccugaagagcauccugaaggugaagagagcccugggcauguucgugagcgacacccccggcgagagaaaccccuacgagaacauccuguacaagaucugccugagcggcgacggcuggcccuacaucgccagcagaaccagcaucgugggcagagccugggagaacaccgugguggaccuggagaccgacggcaagccccagaagaucggcagcggcaacagcaacaagagccugcagagcgccggcuucagcgccggccugaccuacagccagcugaugacccugaaggacgccaugcugcagcuggaccccaacgccaagaccuggauggacaucgagggcagacccgaggaccccguggagguggcccuguaccagcccaucagcggcugcuacauccacuucuucagagagcccaccgaccugaagcaguucaagcaggacgccaaguacagccacggcaucgacaucgccgaccuguucgccgcccagcccggccugaccagcgccgugaucgaggcccugcccagaaacauggugaucaccugccagggcagcgaggacaucaagaagcugcuggagagccagggcagaaaggacaucaagcugaucgacaucgcccugagcaagaucgacagcagaaaguucgagaacgccgugugggaccaguacaaggaccugugccacaugcacaccggcguggugguggagaagaagaagagaggcggcaaggaggagaucaccccccacugcgcccugauggacugcaucauguucgacgccgccgugagcggcggccugaacacccuggugcugagagccgugcugcccagagacaugguguucagaaccagcacccccagaguggugcugugaggacuaguaauaaggaaacuguaugaaugucugugggcaggaagugaagagauccuucuguaaagguuuuuggaauuaugucugcugaauaauaaacuuuuuugaaauaauaaaucugguagaaaaaugagaucucaaaggcucuuuucagagccaccaaaaaaaaaaaaaaaaaaaaaaaaaaaaaaaaaaaaaaaaaaaaaaaaaaaaaaaaaaaaaaaaaaaaaaaaaaaaaaaaaaaaaaaaaaaaaaaaaaaaa

SEQ ID NO: 18857 - RNA, 2109 nt, Artificial Sequence
  mRNA product Design b-4 (hSL-A100) comprising derived and/or modified sequence from LASV(Togo/2016/7082;Clade VI)__AMR44578__SP-HsPLAT_NP(2-569) (opt4)
aggagagucccgcagucggcguccagcggcucugcuuguucgugugugugucguugcaggccuuauucaagcuuaccauggacgccaugaagagaggccugugcugcgugcugcugcugugcggcgccguguucgugagccccagcaacagcaaggaggugaagagcuuccuguggacccagagccugagaagagagcugagcggcuacugcagcaacaucaagcugcagguggugaaggacgcccaggcccugcugcacggccuggacuucagcgaggugagcaacgugcagagacugaugagaaagcagaagagagacgacggcgaccugaagagacugagagaccugaaccaggccgugaacaaccugguggagcugaagagcgugcagcagaagagcauccugagagugggcacccugaccagcgacgaccugcugacccuggccgccgaccuggagaagcugaagagcaaggugaccagaaccgagagaccccugagcagcggcguguacaugggcaaccugagcagccagcagcuggaccagagaagagcccugcugagcaugaucggcaugagcggcggcaaccagaacagccagcccaagggcgacggcguggugagagugugggacgugaagaacgccgaccugcugaacaaccaguucggcaccaugcccagccugacccuggccugccugaccaagcagggccagguggaccugaacgacgccgugcaggcccugaccgaccugggccugaucuacaccgccaaguaccccaacagcagcgaccuggacagacugagccagagccaccccauccugaacaugaucgacaccaagaagagcagccugaacaucagcggcuacaacuucagccugggcgccgccaucaagaccggcgccugcaugcuggacggcggcaacaugcuggagaccaucaaggugaccccccagaccauggacggcauccugaagagcauccugaaggugaagagaagccugggcauguucaucagcgacacccccggcgagagaaaccccuacgagaacauccuguacaagaucugccugagcggcgacggcuggcccuacaucgccagcagaaccgccaucaucggcagagccugggagaacaccgugguggaccuggagagcgacagcaagccccagaagaucggcagcaacggcagcaacaagagccugcagagcgccggcuucgcccccggccugaccuacagccagcugaugacccugaaggacagcaugcugcagcuggaccccaacgccaagaccuggaucgacaucgagggcagacccgaggaccccguggagguggcccuguuccagcccaucagcggcugcuacauccacuucuucagagagcccaccgaccugaagcaguucaagcaggacgccaaguacagccacggcaucgacgugaccgaccuguucgccgcccagcccggccugaccagcgccgugaucgaggcccugcccagaaacauggugcugaccugccagggcagcgacgacaucaagaagcugcuggacagccagggcagaagagacaucaagcugaucgacgugagccugaacaagaucgacagcagaaaguucgagaacgccgugugggaccaguacaaggaccugugccacaugcacaccggcguggugguggagaagaagaagaagggcggcaaggaggagaucaccccccacugcgcccugcuggacugcaucauguucgacgccgccgugagcggcggccugaacgccaccgugcugagagccgugcugcccagagacaugguguucagaaccagcagccccaagguggugcugugaggacuaguaauaaggaaacuguaugaaugucugugggcaggaagugaagagauccuucuguaaagguuuuuggaauuaugucugcugaauaauaaacuuuuuugaaauaauaaaucugguagaaaaaugagaucucaaaggcucuuuucagagccaccaaaaaaaaaaaaaaaaaaaaaaaaaaaaaaaaaaaaaaaaaaaaaaaaaaaaaaaaaaaaaaaaaaaaaaaaaaaaaaaaaaaaaaaaaaaaaaaaaaaaa

SEQ ID NO: 18858 - RNA, 2109 nt, Artificial Sequence
  mRNA product Design b-4 (hSL-A100) comprising derived and/or modified sequence from LASV(KAK-428;Clade n.d. (VII))__ANH09741__SP-HsPLAT_NP(2-569) (opt4)
aggagagucccgcagucggcguccagcggcucugcuuguucgugugugugucguugcaggccuuauucaagcuuaccauggacgccaugaagagaggccugugcugcgugcugcugcugugcggcgccguguucgugagccccagcaacagcaaggaggugaagagcuuccuguggacccagagccugagaagagagcugagcggcuacugcaccaacaucaagcugcagguggugaaggacgcccaggcccugcugcacggccuggacuucagcgaggugagcaacgugcagagacugaugagaaagcagaagagagacgacaacgaccugaagagacugagagaccugaaccaggccgugaacaaccugguggagcugaagagcgugcagcagaagagcgugcugaaggugggcacccugaacagcgacgaccugcugacccuggccgccgaccuggagaagcugaagagcaagguggugagaaccgagagaccccugagcagcggcguguacaugggcaaccugagcagccagcagcuggaccagagaagagcccugcugaacaugaucggcauggccggcggcagccagggcaaccagcccagcagagacggcguggugagagugugggacgugaagaacgccgaccugcugaacaaccaguucggcaccaugcccagccugacccuggccugccugaccaagcagggccagguggaccugaacgacguggugcuggcccugaccgaccugggccugaucuacaccgccaaguaccccaacagcagcgaccuggacagacugagccagaaccaccccgugcugaacaugaucgacgugaacaagagcagccugaacaucagcggcuacaacuucagccugggcgccgccgugaaggccggcgccugcaugcuggacggcggcaacaugcuggagaccaucaagaucagcccccagaccguggacggcauccugaagagcauccugaaggugaagagagcccugggcauguucgugagcgacacccccggcgagagaaaccccuacgagaacauccuguacaaggugugccugagcggcaacggcuggcccuacaucgccagcagaaccagcaucgugggcagagccugggagaacaccgugguggaccuggagagcaacaagaaccagcccaaggugggcaacaacggcagcaacaagaugcugcagagcagcggcuucgccaccggccugaccuacagccagcugaugacccugagagacagcaugcugcagcuggaccccaccgccaagaccuggaucgacaucgagggcagacccgaggaccccguggagcuggcccuguuccagcccagcagcggcugcuacauccacuucuucagagagcccaccgaccugaagcaguucaagcaggacgccaaguacagccacggcaucgacgugaacgaccuguucagcgcccagcccggccugaccagcgccgugcuggaggcccugcccagaaacauggugcugaccugccagggcagcgacgacaucagaaagcugcuggacagccaggacagaaaggacaucaagcugaucgacaucagccugagcaaggccgacgccagaaaguucgagaacgacgugugggaccaguucaaggaccugugccacaugcacaccggcaucgugguggagaagaagaagaagggcggcaagcaggagaugaccccccacugcgcccugcuggacugcaucauguucgacgccgccgugagcggcggccugaacgugcccacccugagagccgugcugcccaccgacaugguguucagaaccaucaccaccaagguggugcugugaggacuaguaauaaggaaacuguaugaaugucugugggcaggaagugaagagauccuucuguaaagguuuuuggaauuaugucugcugaauaauaaacuuuuuugaaauaauaaaucugguagaaaaaugagaucucaaaggcucuuuucagagccaccaaaaaaaaaaaaaaaaaaaaaaaaaaaaaaaaaaaaaaaaaaaaaaaaaaaaaaaaaaaaaaaaaaaaaaaaaaaaaaaaaaaaaaaaaaaaaaaaaaaaa

SEQ ID NO: 18859 - RNA, 2109 nt, Artificial Sequence; identical to SEQ ID NO: 18853
  mRNA product Design b-4 (hSL-A100) comprising derived and/or modified sequence from LASV(Pinneo-NIG-1969;Clade I)__AIT17837__SP-HsPLAT_NP(2-569) (opt4)

SEQ ID NO: 18860 - RNA, 2109 nt, Artificial Sequence
  mRNA product Design b-4 (hSL-A100) comprising derived and/or modified sequence from LASV(ISTH0009-NIG-2011;Clade II)__AIT17405__SP-HsPLAT_NP(2-569) (opt4)
aggagagucccgcagucggcguccagcggcucugcuuguucgugugugugucguugcaggccuuauucaagcuuaccauggacgccaugaagagaggccugugcugcgugcugcugcugugcggcgccguguucgugagccccagcgugagcaaggaggugaagagcuuccuguggacccagagccugagaagagagcugagcggcuacugcagcaacaucaagcugcagguggugaaggacgcccaggcccugcugcacggccuggacuucagcgaggugagcaacgugcagagacugaugagaaagcagaagagagacgacagcgaccugaagagacugagagaccugaaccaggccgugaacaaccugguggagcugaagagcacccagcagaagagcauccugagagugggcacccugaccagcgacgaccugcugacccuggccgccgaccuggagaagcugaagagcaaggugaucagaaccgagagaccccugagcagcggcguguacaugggcaaccugagcacccagcagcuggagcagagaagagcccugcugaacaugaucggcauggugggcggcgcccagggcacccagcccggcagagacggcguggugagagugugggacgugaagaaccccgaccugcugaacaaccaguucggcaccaugcccagccugacccuggccugccugaccaagcagggccagguggaccugaacgacgccgugcuggcccugaccgaccugggccugaucuacaccgccaaguaccccaacagcagcgaccuggacagacugagccagagccaccccauccugaacaugguggacaucaagaagagcagccugaacaucagcggcuacaacuucagccugggcgccgccgugaaggccggcgccugcaugcuggacggcggcaacaugcuggagaccaucaaggugaccccccagaccauggacggcauccugaagagcauccugaaggugaagagaagccugggcauguucgugagcgacacccccggcgagagaaaccccuacgagaacauccuguacaagaucugccugagcggcgacggcuggcccuacaucgccagcagaaccagcaucgugggcagagccugggagaacaccaccguggaccuggagagcgacggcaagccccagaaggugggcagcgccggcagcaacaagagccugcagagcgccggcuuccccaccggccugaccuacagccagcugaugacccugaaggacagcaugaugcagcuggaccccagcgccaagaccuggaucgacaucgagggcagacccgaggaccccguggagaucgcccuguaccagcccaugagcggcugcuacauccacuucuucagagagcccaccgaccugaagcaguucaagcaggacgccaaguacagccacggcaucgacguggccgaccuguuccccgcccagcccggccugaccagcgccgugaucgaggcccugcccagaaacauggugcugaccugccagggcagcgacgacaucaagagacugcuggacagccagggcagaagagacaucaagcugaucgacaucgcccugagcaaggccgacagcagaagauucgagaacgccgugugggaccagugcaaggaccugugccacaugcacaccggcguggugguggagaagaagaagagaggcggcaaggaggagaucaccccccacugcgcccugauggacugcaucauguacgacgccgccgugagcggcggccugaacauccccgugcugagagccgugcugcccagagacaugguguucagaaccagcagccccaagguggugcugugaggacuaguaauaaggaaacuguaugaaugucugugggcaggaagugaagagauccuucuguaaagguuuuuggaauuaugucugcugaauaauaaacuuuuuugaaauaauaaaucugguagaaaaaugagaucucaaaggcucuuuucagagccaccaaaaaaaaaaaaaaaaaaaaaaaaaaaaaaaaaaaaaaaaaaaaaaaaaaaaaaaaaaaaaaaaaaaaaaaaaaaaaaaaaaaaaaaaaaaaaaaaaaaaa

SEQ ID NO: 18861 - RNA, 2109 nt, Artificial Sequence
  mRNA product Design b-4 (hSL-A100) comprising derived and/or modified sequence from LASV(ISTH2010-NIG-2012;Clade II)__AIT17483__SP-HsPLAT_NP(2-569) (opt4)
aggagagucccgcagucggcguccagcggcucugcuuguucgugugugugucguugcaggccuuauucaagcuuaccauggacgccaugaagagaggccugugcugcgugcugcugcugugcggcgccguguucgugagccccagcgccagcaaggaggugaagagcuuccuguggacccagagccugagaagagagcugagcggcuacugcagcaacaucaagcugcagguggugaaggacgcccaggcccugcugcacggccuggacuucagcgaggugagcaacgugcagagacugaugagaaagcagaagagagacgacagcgaccugaagagacugagagaccugaaccaggccgugaacaaccugguggagcugaagagcacccagcagaagagcauccugagagugggcacccugaccagcgacgaccugcugacccuggccgccgaccuggagaagcugaagagcaaggugaucagaaccgagagaccccugagcagcggcguguacaugggcaaccugagcacccagcagcuggagcagagaagagcccugcugaaccugaucggcauggugggcggcgcccagggcacccagcccggcagagacggcguggugagagugugggacgugaagaaccccgaccugcugaacaaccaguucggcaccaugcccagccugacccuggccugccugaccaagcagggccagguggaccugaacgacgccgugcuggcccugaccgaccugggccugaucuacaccgccaaguaccccaacagcagcgaccuggacagacugagccagagccaccccauccugaacaugguggacaccaagaagagcagccugaacaucagcggcuucaacuucagccugggcgccgccgugaaggccggcgccugcaugcuggacggcggcaacaugcuggagaccaucaaggugaccccccagaccauggacggcauccugaagagcauccugaaggugaagaagagccugggcauguucgugagcgacacccccggcgagagaaaccccuacgagaacauccuguacaagaucugccugagcggcgacggcuggcccuacaucgccagcagaaccagcaucgugggcagagccugggagaacaccaccguggaccuggagagcgacggcaagccccacaaggugggcaccgccggcagcaacaagagccugcagagcgccggcuuccccaccggccugaccuacagccagcugaugacccugaaggacagcaugaugcagcuggaccccagcgccaagaccuggaucgacaucgagggcagacccgaggaccccguggagaucgcccuguaccagcccaugagcggcugcuacauccacuucuucagagagcccaccgaccugaagcaguucaagcaggacgccaaguacagccacggcaucgacguggccgaccuguuccccgcccagcccggccugaccagcgccgugaucgaggcccugcccagaaacauggugcugaccugccagggcagcgacgacaucaagagacugcuggacagccagggcagaagagacaucaagcugaucgacaucgcccugagcaaggccgacagcagaagauucgagaacgccgugugggaccagugcaaggaccugugccacaugcacaccggcguggugguggagaagaagaagagaggcggcaaggaggagaucaccccccacugcgcccugauggacugcaucauguacgacgccgccgugagcggcggccugaacauccccgugcugagagccgugcugcccagagacaugguguucagaaccagcagccccaagguggugcugugaggacuaguaauaaggaaacuguaugaaugucugugggcaggaagugaagagauccuucuguaaagguuuuuggaauuaugucugcugaauaauaaacuuuuuugaaauaauaaaucugguagaaaaaugagaucucaaaggcucuuuucagagccaccaaaaaaaaaaaaaaaaaaaaaaaaaaaaaaaaaaaaaaaaaaaaaaaaaaaaaaaaaaaaaaaaaaaaaaaaaaaaaaaaaaaaaaaaaaaaaaaaaaaaa

SEQ ID NO: 18862 - RNA, 2109 nt, Artificial Sequence
  mRNA product Design b-4 (hSL-A100) comprising derived and/or modified sequence from LASV(Lassa virus/H.sapiens-wt/NGA/2015/ISTH_0543;Clade II)__AVO03640__SP-HsPLAT_NP(2-569) (opt4)
aggagagucccgcagucggcguccagcggcucugcuuguucgugugugugucguugcaggccuuauucaagcuuaccauggacgccaugaagagaggccugugcugcgugcugcugcugugcggcgccguguucgugagccccagcgccagcaaggaggugaagagcuuccuguggacccagagccugagaagagagcugagcggcuacugcagcaacaucaagcugcagguggugaaggacgcccaggcccugcugcacggccuggacuucagcgaggugagcaacgugcagagacugaugagaaagcagaagagagacgacagcgaccugaagagacugagagaccugaaccaggccgugaacaaccugguggagcugaagagcacccagcagaagagcauccugagagugggcacccugaccagcgacgaccugcugacccuggccgccgaccuggagaagcugaagagcaaggugaucagaaccgagagaccccugagcagcggcguguacaugggcaaccugagcacccagcagcuggagcagagaagagcccugcugaacaugaucggcauggugggcggcgcccagggcacccagcccggcagagacggcguggugagagugugggacgugaagaaccccgaccugcugaacaaccaguucggcaccaugcccagccugacccuggccugccugaccaagcagggccagguggaccugaacgacgccgugcuggcccugaccgaccugggccugaucuacaccgccaaguaccccaacagcagcgaccuggacagacugagccagagccaccccauccugaacaugguggacaccaagaagagcagccugaacaucagcggcuacaacuucagccugggcgccgccgugaaggccggcgccugcaugcuggacggcggcaacaugcuggagaccaucaaggugaccccccagaccauggacggcauccugaagagcauccugaaggugaagaagagccugggcauguucgugagcgacacccccggcgagagaaaccccuacgagaacauccuguacaagaucugccugagcggcgacggcuggcccuacaucgccagcagaaccagcaucgugggcagagccugggagaacaccaccguggaccuggagagcgacggcaagccccagaaggugggcagcgccggcagcaacaagagccugcagagcgccggcuuccccaccggccugaccuacagccagcugaugacccugaaggacagcaugaugcagcuggaccccagcgccaagaccuggaucgacaucgagggcagacccgaggaccccguggagaucgcccuguaccagcccaugagcggcugcuacauccacuucuucagagagcccaccgaccugaagcaguucaagcaggacgccaaguacagccacggcaucgacguggccgaccuguuccccgcccagcccggccugaccagcgccgugaucgaggcccugcccagaaacauggugcugaccugccagggcagcgacgacaucaagagacugcuggacagccagggcagaaaggacaucaagcugaucgacaucgcccugagcaaggccgacagcagaagauucgagaacgccgugugggaccagugcaaggaccugugccacaugcacaccggcguggugguggagaagaagaagagaggcggcaaggaggagaucaccccccacugcgcccugauggacugcaucauguacgacgccgccgugagcggcggccugaacauccccgugcugagagccgugcugcccagagacaugguguucagaaccagcagccccaagguggugcugugaggacuaguaauaaggaaacuguaugaaugucugugggcaggaagugaagagauccuucuguaaagguuuuuggaauuaugucugcugaauaauaaacuuuuuugaaauaauaaaucugguagaaaaaugagaucucaaaggcucuuuucagagccaccaaaaaaaaaaaaaaaaaaaaaaaaaaaaaaaaaaaaaaaaaaaaaaaaaaaaaaaaaaaaaaaaaaaaaaaaaaaaaaaaaaaaaaaaaaaaaaaaaaaaa

SEQ ID NO: 18863 - RNA, 2109 nt, Artificial Sequence
  mRNA product Design b-4 (hSL-A100) comprising derived and/or modified sequence from LASV(Lassa virus/H.sapiens-wt/NGA/2016/ISTH_0009;Clade II)__AVO03572__SP-HsPLAT_NP(2-569) (opt4)
aggagagucccgcagucggcguccagcggcucugcuuguucgugugugugucguugcaggccuuauucaagcuuaccauggacgccaugaagagaggccugugcugcgugcugcugcugugcggcgccguguucgugagccccagcgccagcaaggaggugaagagcuuccuguggacccagagccugagaagagagcugagcggcuacugcagcaacaucaagcugcagguggugaaggacgcccaggcccugcugcacggccuggacuucagcgaggugagcaacgugcagagacugaugagaaagcagaagagagacgacagcgaccugaagagacugagagaccugaaccaggccgugaacaaccugguggagcugaagagcacccagcagaagagcauccugagagugggcacccugaccagcgacgaccugcugacccuggccgccgaccuggagaagcugaagagcaaggugaucagaaccgagagaccccugagcagcggcguguacaugggcaaccugagcacccagcagcuggagcagagaagagcccugcugaacaugaucggcauggugggcggcgcccagggcacccagcccggcagagacggcguggugagagugugggacgugaagaaccccgaccugcugaacaaccaguucggcaccaugcccagccugacccuggccugccugaccaagcagggccagguggaccugaacgacgccgugcuggcccugaccgaccugggccugaucuacaccgccaaguaccccaacagcagcgaccuggacagacugagccagagccaccccauccugaacaugguggacaccaagaagagcagccugaacaucagcggcuacaacuucagccugggcgccgccgugaaggccggcgccugcaugcuggacggcggcaacaugcuggagaccaucaaggugaccccccagaccauggacggcauccugaagagcauccugaaggugaagaagagccugggcauguucgugagcgacacccccggcgagagaaaccccuacgagaacauccuguacaagaucugccugagcggcgacggcuggcccuacaucgccagcagaaccagcaucgugggcagagccugggagaacaccaccguggaccuggagagcgacggcaagccccagaaggugggcagcgccggcagcaacaagagccugcagagcgccggcuuccccaccggccugaccuacagccagcugaugacccugaaggacagcaugaugcagcuggaccccagcgccaagaccuggaucgacaucgagggcagacccgaggaccccguggagaucgcccuguaccagcccaugagcggcugcuacauccacuucuucagagagcccaccgaccugaagcaguucaagcaggacgccaaguacagccacggcaucgacguggccgaccuguuccccgcccagcccggccugaccagcgccgugaucgaggcccugcccagaaacauggugcugaccugccagggcagcgacgacaucaagagacugcuggacagccagggcagaagagacaucaagcugaucgacaucgcccugagcaaggccgacagcagaagauucgagaacgccgugugggaccagugcaaggaccugugccacaugcacaccggcguggugguggagaagaagaagagaggcggcaaggaggagaucaccccccacugcgcccugauggacugcaucauguacgacgccgccgugagcggcggccugaacauccccgugcugagagccgugcugcccagagacaugguguucagaaccagcagccccaagguggugcugugaggacuaguaauaaggaaacuguaugaaugucugugggcaggaagugaagagauccuucuguaaagguuuuuggaauuaugucugcugaauaauaaacuuuuuugaaauaauaaaucugguagaaaaaugagaucucaaaggcucuuuucagagccaccaaaaaaaaaaaaaaaaaaaaaaaaaaaaaaaaaaaaaaaaaaaaaaaaaaaaaaaaaaaaaaaaaaaaaaaaaaaaaaaaaaaaaaaaaaaaaaaaaaaaa

SEQ ID NO: 18864 - RNA, 2109 nt, Artificial Sequence
  mRNA product Design b-4 (hSL-A100) comprising derived and/or modified sequence from LASV(Lassa virus/H.sapiens-wt/NGA/2016/ISTH_0017;Clade II)__AVO03568__SP-HsPLAT_NP(2-569) (opt4)
aggagagucccgcagucggcguccagcggcucugcuuguucgugugugugucguugcaggccuuauucaagcuuaccauggacgccaugaagagaggccugugcugcgugcugcugcugugcggcgccguguucgugagccccagcgccagcaaggaggugaagagcuuccuguggacccagagccugagaagagagcugagcggcuacugcagcagcaucaagcugcagguggugaaggacgcccaggcccugcugcacggccuggacuucagcgaggugagcaacgugcagagacugaugagaaagcagaagagagacgacagcgaccugaagagacugagagaccugaaccaggccgugaacaaccugguggagcugaagagcacccagcagaagagcauccugagagugggcacccugaccagcgacgaccugcugacccuggccgccgaccuggagaagcugaagagcaaggugaucagaaccgagagaccccugagcagcggcguguacaugggcaaccugagcacccagcagcuggagcagagaagagcccugcugaacaugaucggcauggccggcggcgcccagggcacccagcccggcagagacggcguggugagagugugggacgugaagaaccccgaccugcugaacaaccaguucggcaccaugcccagccugacccuggccugccugaccaagcagggccagguggaccugaacgacgccgugcuggcccugaccgaccugggccugaucuacaccgccaaguaccccaacagcagcgaccuggacagacugagccagagccaccccauccugaacaugguggacaccaagaagagcagccugaacaucagcggcuacaacuucagccugggcgccgccgugaaggccggcgccugcaugcuggacggcggcaacaugcuggagaccaucaaggugaccccccagaccauggacggcauccugaagagcauccugaaggugaagagaagccugggcauguucgugagcgacgcccccggcgagagaaaccccuacgagaacauccuguacaagaucugccugagcggcgacggcuggcccuacaucgccagcagaaccagcaucgugggcagagccugggagaacaccaccguggaccuggagagcgacggcaagccccagaaggugggcgccaccggcagcaacaagagccugcagagcgccggcuuccccaccggccugaccuacagccagcugaugacccugaaggacagcaugaugcagcuggaccccagcgccaagaccuggaucgacaucgagggcagacccgaggaccccguggagguggcccuguaccagcccgugagcggcugcuacauccacuucuucagagagcccaccgaccugaagcaguucaagcaggacgccaaguacagccacggcaucgacguggccgaccuguuccccgcccagcccggccugaccagcgccgugaucgaggcccugcccagaaacauggugcugaccugccagggcagcgacgacaucaagaagcugcuggacagccagggcagaaaggacaucaagcugaucgacaucgcccugagcaaggccgacagcagaagauucgagaacgccgugugggaccagugcaaggaccugugccacaugcacaccggcguggugguggagaagaagaagagaggcggcaaggaggagaucaccccccacugcgcccugauggacugcaucauguacgacgccgccgugagcggcggccugaacauccccgugcugagagccgugcugcccagagacaugguguucagaaccagcagccccaagguggugcugugaggacuaguaauaaggaaacuguaugaaugucugugggcaggaagugaagagauccuucuguaaagguuuuuggaauuaugucugcugaauaauaaacuuuuuugaaauaauaaaucugguagaaaaaugagaucucaaaggcucuuuucagagccaccaaaaaaaaaaaaaaaaaaaaaaaaaaaaaaaaaaaaaaaaaaaaaaaaaaaaaaaaaaaaaaaaaaaaaaaaaaaaaaaaaaaaaaaaaaaaaaaaaaaaa

SEQ ID NO: 18865 - RNA, 2109 nt, Artificial Sequence
  mRNA product Design b-4 (hSL-A100) comprising derived and/or modified sequence from LASV(Lassa virus/H.sapiens-wt/NGA/2018/ISTH_0959;Clade II)__AVV65100__SP-HsPLAT_NP(2-569) (opt4)
aggagagucccgcagucggcguccagcggcucugcuuguucgugugugugucguugcaggccuuauucaagcuuaccauggacgccaugaagagaggccugugcugcgugcugcugcugugcggcgccguguucgugagccccagcgccagcaaggaggugaagagcuuccuguggacccagagccugagaagagagcugagcggcuacugcagcaacaucaagcugcagguggugaaggacgcccaggcccugcugcacggccuggacuucagcgaggugagcaacgugcagagacugaugagaaagcagaagagagacgacagcgaccugaagagacugagagaccugaaccaggccgugaacaaccugguggagcugaagagcacccagcagaagagcauccugagagugggcacccugaccagcgacgaccugcugacccuggccgccgaccuggagaagcugaagagcaaggugaucagaaccgagagaccccugagcagcggcguguacaugggcaaccugagcacccagcagcuggagcagagaagagcccugcugaaccugaucggcauggugggcggcgcccagggcacccagcccggcagagacggcguggugagagugugggacgugaagaaccccgaccugcugaacaaccaguucggcaccaugcccagccugacccuggccugccugaccaagcagggccagguggaccugaacgacguggugcuggcccugaccgaccugggccugaucuacaccgccaaguaccccaacagcagcgaccuggacagacugagccagagccaccccauccugaacaugguggacaccaagaagagcagccugaacaucagcggcuucaacuucagccugggcgccgccgugaaggccggcgccugcaugcuggacggcggcaacaugcuggagaccaucaaggugaccccccagaccauggacggcauccugaagagcauccugaaggugaagaagagccugggcauguucgugagcgacacccccggcgagagaaaccccuacgagaacauccuguacaagaucugccugagcggcgacggcuggcccuacaucgccagcagaaccagcaucgugggcagagccugggagaacaccaccguggaccuggagagcgacggcaagccccacaaggugggcaccgccggcagcaacaagagccugcagagcgccggcuuccccaccggccugaccuacagccagcugaugacccugaaggacagcaugaugcagcuggaccccagcgccaagaccuggaucgacaucgagggcagacccgaggaccccguggagaucgcccuguaccagcccaugagcggcugcuacauccacuucuucagagagcccaccgaccugaagcaguucaagcaggacgccaaguacagccacggcaucgacguggccgaccuguuccccgcccagcccggccugaccagcgccgugaucgaggcccugcccagaaacauggugcugaccugccagggcagcgacgacaucaagagacugcuggacagccagggcagaaaggacaucaagcugaucgacaucgcccugagcaagaccgacagcagaagauucgagaacgccgugugggaccagugcaaggaccugugccacaugcacaccggcguggugguggagaagaagaagagaggcggcaaggaggagaucaccccccacugcgcccugauggacugcaucauguacgacgccgccgugagcggcggccugaacauccccgugcugagagccgugcugcccagagacaugguguucagaaccagcagccccaagguggugcugugaggacuaguaauaaggaaacuguaugaaugucugugggcaggaagugaagagauccuucuguaaagguuuuuggaauuaugucugcugaauaauaaacuuuuuugaaauaauaaaucugguagaaaaaugagaucucaaaggcucuuuucagagccaccaaaaaaaaaaaaaaaaaaaaaaaaaaaaaaaaaaaaaaaaaaaaaaaaaaaaaaaaaaaaaaaaaaaaaaaaaaaaaaaaaaaaaaaaaaaaaaaaaaaaa

SEQ ID NO: 18866 - RNA, 2109 nt, Artificial Sequence
  mRNA product Design b-4 (hSL-A100) comprising derived and/or modified sequence from LASV(LASV003-NIG-2008;Clade II)__AIT17581__SP-HsPLAT_NP(2-569) (opt4)
aggagagucccgcagucggcguccagcggcucugcuuguucgugugugugucguugcaggccuuauucaagcuuaccauggacgccaugaagagaggccugugcugcgugcugcugcugugcggcgccguguucgugagccccagcgccagcaaggaggugaagagcuuccuguggacccagagccugagaagagagcugagcggcuacugcagcagcaucaagcugcagguggugaaggacgcccaggcccugcugcacggccuggacuucagcgaggugagcaacgugcagagacugaugagaaagcagaagagagacgacagcgaccugaagagacugagagaccugaaccaggccgugaacaaccugguggagcugaagagcacccagcagaagagcgugcugagagugggcacccugaccagcgacgaccugcugacccuggccgccgaccuggagaagcugaagagcaaggugaucagaaccgagagaccccugagcagcggcguguacaugggcaaccugagcgcccagcagcuggagcagagaagaacccugcugaacaugaucggcauggugggcggcgcccagggcacccagcccggcagagacggcguggugagagugugggacgugaagaaccccgaccugcugaacaaccaguucggcaccaugcccagccugacccuggccugccugaccaagcagggccagguggaccugaacgacguggugcuggcccugaccgaccugggccugaucuacaccgccaaguaccccaacagcagcgaccuggacagacugagccagagccaccccauccugagcaugguggacaccaagaagagcagccugaacaucagcggcuacaacuucagccugggcgccgccgugaaggccggcgccugcaugcuggacggcggcaacaugcuggagaccaucaaggugaccccccagaccauggacggcauccugaagagcauccugaaggugaagaagagccugggcauguucgugagcgacacccccggcgagagaaaccccuacgagaacauccuguacaagaucugccugagcggcgacggcuggcccuacaucgccagcagaaccagcaucgugggcagagccugggagaacaccaccguggaccuggagagcgacggcaagccccagaaggugggcaccgccggcagcaacaagagccugcagagcgccggcuuccccaccggccugaccuacagccagcugaugacccugaaggacagcaugaugcagcuggaccccagcgccaagaccuggaucgacaucgagggcagacccgaggaccccguggagaucgcccuguaccagcccaugagcggcugcuacauccacuucuucagagagcccaccgaccugaagcaguucaagcaggacgccaaguacagccacggcaucgacgugaccgaccuguuccccgcccagcccggccugaccagcgccgugaucgaggcccugcccagaaacauggugcugaccugccagggcagcgacgacaucaagagacugcuggacagccagggcagaagagacaucaagcugaucgacaucgcccugagcaaggccgacagcagaagauucgagaacgccgugugggaccagugcaaggaccugugccacaugcacaccggcguggugguggagaagaagaagagaggcggcaaggaggagaucaccccccacugcgcccugauggacugcaucauguacgacgccgccgugagcggcggccugaacauccccgugcugagagccgugcugcccagagacaugguguucagaaccagcagccccaagguggugcugugaggacuaguaauaaggaaacuguaugaaugucugugggcaggaagugaagagauccuucuguaaagguuuuuggaauuaugucugcugaauaauaaacuuuuuugaaauaauaaaucugguagaaaaaugagaucucaaaggcucuuuucagagccaccaaaaaaaaaaaaaaaaaaaaaaaaaaaaaaaaaaaaaaaaaaaaaaaaaaaaaaaaaaaaaaaaaaaaaaaaaaaaaaaaaaaaaaaaaaaaaaaaaaaaa

SEQ ID NO: 18867 - RNA, 2109 nt, Artificial Sequence
  mRNA product Design b-4 (hSL-A100) comprising derived and/or modified sequence from LASV(LASV035-NIG-2009;Clade II)__AIT17589__SP-HsPLAT_NP(2-569) (opt4)
aggagagucccgcagucggcguccagcggcucugcuuguucgugugugugucguugcaggccuuauucaagcuuaccauggacgccaugaagagaggccugugcugcgugcugcugcugugcggcgccguguucgugagccccagcgccagcaaggaggugaagagcuuccuguggacccagagccugagaagagagcugagcggcuacugcagcagcaucaagcugcagguggugaaggacgcccaggcccugcugcacggccuggacuucagcgaggugagcaacgugcagagacugaugagaaagcagaagagagacgacagcgaccugaagagacugagagaccugaaccaggccgugaacaaccugguggagcugaagagcacccagcagaagagcauccugagagugggcacccugaccagcgacgaccugcugacccuggccgccgaccuggagaagcugaagagcaaggugaucagaaccgagagaccccugagcagcggcguguacaugggcaaccugagcgcccagcagcuggagcagagaagagcccugcugaacaugaucggcauggugggcggcgcccagggcacccagcccggcagagacggcguggugagagugugggacgugaagaaccccgaccugcugaacaaccaguucggcaccaugcccagccugacccuggccugccugaccaagcagggccagguggaccugaacgacgccgugcuggcccugaccgaccugggccugaucuacaccgccaaguaccccaacagcagcgaccuggacagacugagccagagccaccccauccugaacaugguggacaccaagaagagcagccugaacaucagcggcuacaacuucagccugggcgccgccgugaaggccggcgccugcaugcuggacggcggcaacaugcuggagaccaucaaggugaccccccagaccauggacggcauccugaagagcauccugaaggugaagagaagccugggcauguucgugagcgacacccccggcgagagaaaccccuacgagaacauccuguacaagaucugccugagcggcgacggcuggcccuacaucgccagcagaaccagcaucgugggcagagccugggagaacaccaccguggaccuggagagcgacggcaagccccagaaggugggcaccaccggcagcaacaagagccugcagagcgccggcuuccccaccggccugaccuacagccagcugaugacccugaaggacagcaugaugcagcuggaccccagcgccaagaccuggaucgacaucgagggcagacccgaggaccccguggagaucgcccuguaccagcccaugagcggcugcuacauccacuucuucagagagcccaccgaccugaagcaguucaagcaggacgccaaguacagccacggcaucgacguggccgaccuguuccccgcccagcccggccugaccagcgccgugaucgaggcccugcccagaaacauggugcugaccugccagggcagcgacgacaucaagaagcugcuggacagccagggcagaagagacaucaagcugaucgacaucgcccugagcaaggccgacagcagaaaguucgagaacgccgugugggaccagugcaaggaccugugccacaugcacaccggcguggugguggagaagaagaagagaggcggcaaggaggagaucaccccccacugcgcccugauggacugcaucauguacgacgccgccgugagcggcggccugaacauccccgugcugagagccgugcugcccagagacaugguguucagaaccagcagccccaagguggugcugugaggacuaguaauaaggaaacuguaugaaugucugugggcaggaagugaagagauccuucuguaaagguuuuuggaauuaugucugcugaauaauaaacuuuuuugaaauaauaaaucugguagaaaaaugagaucucaaaggcucuuuucagagccaccaaaaaaaaaaaaaaaaaaaaaaaaaaaaaaaaaaaaaaaaaaaaaaaaaaaaaaaaaaaaaaaaaaaaaaaaaaaaaaaaaaaaaaaaaaaaaaaaaaaaa

SEQ ID NO: 18868 - RNA, 2109 nt, Artificial Sequence
  mRNA product Design b-4 (hSL-A100) comprising derived and/or modified sequence from LASV(LASV1000-NIG-2009;Clade II)__AIT17783__SP-HsPLAT_NP(2-569) (opt4)
aggagagucccgcagucggcguccagcggcucugcuuguucgugugugugucguugcaggccuuauucaagcuuaccauggacgccaugaagagaggccugugcugcgugcugcugcugugcggcgccguguucgugagccccagcgccagcaaggaggugaagagcuuccuguggacccagagccugagaagagagcugagcggcuacugcagcaacaucaagcugcagguggugaaggacgcccaggcccugcugcacggccuggacuucagcgaggugagcaacgugcagagacugaugagaaagcagaagagagacgacagcgaccugaagagacugagagaccugaaccaggccgugaacaaccugguggagcugaagagcacccagcagaagagcauccugagagugggcacccugaccagcgacgaccugcugacccuggccgccgaccuggagaagcugaagagcaaggugaucagaaccgagagaccccugagcagcggcguguacaugggcaaccugagcacccagcagcuggagcagagaagagcccugcugaacaugaucggcauggugggcggcgcccagggcacccagcccggcagagacggcguggugagagugugggacgugaagaaccccgaccugcugaacaaccaguucggcaccaugcccagccugacccuggccugccugaccaagcagggccagguggaccugaacgacguggugcuggcccugaccgaccugggccugaucuacaccgccaaguaccccaacagcagcgaccuggacagacugagccagagccaccccauccugaacaugguggacaccaagaagagcagccugaacaucagcggcuacaacuucagccugggcgccgccgugaaggccggcgccugcaugcuggacggcggcaacaugcuggagaccaucaaggugaccccccagaccauggacggcauccugaagagcauccugaaggugaagaagagccugggcauguucgugagcgacacccccggcgagagaaaccccuacgagaacauccuguacaagaucugccugagcggcgacggcuggcccuacaucgccagcagaaccagcaucgugggcagagccugggagaacaccaccguggaccuggagagcgacggcaagccccagaaggugggcaccgccggcagcaacaagagccugcagagcgccggcuuccccaccggccugaccuacagccagcugaugacccugaaggacagcaugaugcagcuggaccccagcgccaagaccuggaucgacaucgagggcagacccgaggaccccguggagaucgcccuguaccagcccgugagcggcugcuacauccacuucuucagagagcccaccgaccugaagcaguucaagcaggacgccaaguacagccacggcaucgacguggccgaccuguuccccgcccagcccggccugaccagcgccgugaucgaggcccugcccagaaacauggugcugaccugccagggcagcgacgacaucaagagacugcuggacagccagggcagaagagacaucaagcugaucgacaucgcccugagcaaggccgacagcagaagauucgagaacgccgugugggaccagugcaaggaccugugccacaugcacaccggcguggugguggagaagaagaagagaggcggcaaggaggagaucaccccccacugcgcccugauggacugcaucauguacgacgccgccgugagcggcggccugaacauccccgugcugagagccgugcugcccagagacaugguguucagaaccagcagccccaagguggugcugugaggacuaguaauaaggaaacuguaugaaugucugugggcaggaagugaagagauccuucuguaaagguuuuuggaauuaugucugcugaauaauaaacuuuuuugaaauaauaaaucugguagaaaaaugagaucucaaaggcucuuuucagagccaccaaaaaaaaaaaaaaaaaaaaaaaaaaaaaaaaaaaaaaaaaaaaaaaaaaaaaaaaaaaaaaaaaaaaaaaaaaaaaaaaaaaaaaaaaaaaaaaaaaaaa

SEQ ID NO: 18869 - RNA, 2109 nt, Artificial Sequence
  mRNA product Design b-4 (hSL-A100) comprising derived and/or modified sequence from LASV(LASV221-NIG-2010;Clade II)__AIT17625__SP-HsPLAT_NP(2-569) (opt4)
aggagagucccgcagucggcguccagcggcucugcuuguucgugugugugucguugcaggccuuauucaagcuuaccauggacgccaugaagagaggccugugcugcgugcugcugcugugcggcgccguguucgugagccccagcgccagcaaggaggugaagagcuuccuguggacccagagccugagaagagagcugagcggcuacugcagcagcaucaagcugcagguggugaaggacgcccaggcccugcugcacggccuggacuucagcgaggugagcaacgugcagagacugaugagaaagcagagaagagacgacagcgaccugaagagacugagagaccugaaccaggccgugaacaaccugguggagcugaagagcacccagcagaagagcauccugagagugggcacccugaccagcgacgaccugcugacccuggccgccgaccuggagaagcugaagagcaaggugaucagaaccgagagaccccugagcagcggcguguacaugggcaaccugagcacccagcagcuggagcagagaagagcccugcugaacaugaucggcauggugggcggcgcccagggcacccagcccggcagagacggcguggugagagugugggacgugaagaaccccgaccugcugaacaaccaguucggcaccaugcccagccugacccuggccugccugaccaagcagggccagguggaccugaacgacgccgugcuggcccugaccgaccugggccugaucuacaccgccaaguaccccaacagcagcgaccuggacagacugagccagagccaccccauccugaacaugguggacaccaagaagagcagccugaacaucagcggcuacaacuucagccugggcgccgccgugaaggccggcgccugcaugcuggacggcggcaacaugcuggagaccaucaaggugaccccccagaccguggacggcauccugaagagcauccugaaggugaagagaagccugggcauguucgugagcgacacccccggcgagagaaaccccuacgagaacauccuguacaagaucugccugagcggcgacggcuggcccuacaucgccagcagaaccagcaucgugggcagagccugggagaacaccaccguggaccuggagagcgacggcaagccccagaaggugggcaccgccggcagcaacaagagccugcagagcgccggcuuccccaccggccugaccuacagccagcugaugacccugaaggacagcaugaugcagcuggaccccagcgccaagaccuggaucgacaucgagggcagacccgaggaccccguggagaucgcccuguaccagcccaugagcggcugcuacauccacuucuucagagagcccaccgaccugaagcaguucaagcaggacgccaaguacagccacggcaucgacguggccgaccuguuccccgcccagcccggccugaccagcgccgugaucgaggcccugcccagaaacauggugcugaccugccagggcagcgacgacaucaagagacugcuggacagccagggcagaagagacaucaagcugaucgacaucgcccugagcaaggccgacagcagaaaguucgagaacgccgugugggaccagugcaaggaccugugccacaugcacaccggcguggugguggagaagaagaagagaggcggcaaggaggagaucaccccccacugcgcccugauggacugcaucauguacgacgccgccgugagcggcggccugaacauccccgugcugagagccgugcugcccagagacaugguguucagaaccagcagccccaagguggugcugugaggacuaguaauaaggaaacuguaugaaugucugugggcaggaagugaagagauccuucuguaaagguuuuuggaauuaugucugcugaauaauaaacuuuuuugaaauaauaaaucugguagaaaaaugagaucucaaaggcucuuuucagagccaccaaaaaaaaaaaaaaaaaaaaaaaaaaaaaaaaaaaaaaaaaaaaaaaaaaaaaaaaaaaaaaaaaaaaaaaaaaaaaaaaaaaaaaaaaaaaaaaaaaaaa

SEQ ID NO: 18870 - RNA, 2109 nt, Artificial Sequence
  mRNA product Design b-4 (hSL-A100) comprising derived and/or modified sequence from LASV(LASV237-NIG-2010;Clade II)__AIT17639__SP-HsPLAT_NP(2-569) (opt4)
aggagagucccgcagucggcguccagcggcucugcuuguucgugugugugucguugcaggccuuauucaagcuuaccauggacgccaugaagagaggccugugcugcgugcugcugcugugcggcgccguguucgugagccccagcgccagcaaggaggugaagagcuuccuguggacccagagccugagaagagagcugagcggcuacugcagcaacaucaagcugcagguggugaaggacgcccaggcccugcugcacggccuggacuucagcgaggugagcaacgugcagagacugaugagaaagcagaagagagacgacagcgaccugaagagacugagagaccugaaccaggccgugaacaaccugguggagcugaagagcacccagcagaagagcauccugagagugggcacccugaccagcgacgaccugcugacccuggccgccgaccuggagaagcugaagagcaaggugaucagaaccgagagaccccugagcagcggcguguacaugggcaaccugagcacccagcagcuggagcagagaagagcccugcugaacaugaucggcauggugggcggcgcccagggcacccagcccggcagagacggcguggugagagugugggacgugaagaaccccgaccugcugaacaaccaguucggcaccaugcccagccugacccuggccugccugaccaagcagggccagguggaccugaacgacgccgugcuggcccugaccgaccugggccugaucuacaccgccaaguaccccaacagcagcgaccuggacagacugagccagagccaccccauccugaacaugguggacaucaagaagagcagccugaacaucagcggcuacaacuucagccugggcgccgccgugaaggccggcgccugcaugcuggacggcggcaacaugcuggagaccaucaaggugaccccccagaccauggacggcauccugaagagcauccugaaggugaagagaagccugggcauguucgugagcgacacccccggcgagagaaaccccuacgagaacauccuguacaagaucugccugagcggcgacggcuggcccuacaucgccagcagaaccagcaucgugggcagagccugggagaacaccaccguggaccuggagagcgacggcaagccccagaaggugggcagcgccggcagcaacaagagccugcagagcgccggcuuccccaccggccugaccuacagccagcugaugacccugaaggacagcaugaugcagcuggaccccagcgccaagaccuggaucgacaucgagggcagacccgaggaccccguggagaucgcccuguaccagcccaugagcggcugcuacauccacuucuucagagagcccaccgaccugaagcaguucaagcaggacgccaaguacagccacggcaucgacguggccgaccuguuccccgcccagcccggccugaccagcgccgugaucgaggcccugcccagaaacauggugcugaccugccagggcagcgacgacaucaagagacugcuggacagccagggcagaagagacaucaagcugaucgacaucgcccugagcaaggccgacagcagaagauucgagaacgccgugugggaccagugcaaggaccugugccacaugcacaccggcguggugguggagaagaagaagagaggcggcaaggaggagaucaccccccacugcgcccugauggacugcaucauguacgacgccgccgugagcggcggccugaacauccccgugcugagagccgugcugcccagagacaugguguucagaaccagcagccccaagguggugcugugaggacuaguaauaaggaaacuguaugaaugucugugggcaggaagugaagagauccuucuguaaagguuuuuggaauuaugucugcugaauaauaaacuuuuuugaaauaauaaaucugguagaaaaaugagaucucaaaggcucuuuucagagccaccaaaaaaaaaaaaaaaaaaaaaaaaaaaaaaaaaaaaaaaaaaaaaaaaaaaaaaaaaaaaaaaaaaaaaaaaaaaaaaaaaaaaaaaaaaaaaaaaaaaaa

SEQ ID NO: 18871 - RNA, 2109 nt, Artificial Sequence
  mRNA product Design b-4 (hSL-A100) comprising derived and/or modified sequence from LASV(LASV253-NIG-2011;Clade II)__AIT17671__SP-HsPLAT_NP(2-569) (opt4)
aggagagucccgcagucggcguccagcggcucugcuuguucgugugugugucguugcaggccuuauucaagcuuaccauggacgccaugaagagaggccugugcugcgugcugcugcugugcggcgccguguucgugagccccagcgccagcaaggaggugaagagcuuccuguggacccagagccugagaagagagcugagcggcuacugcagcagcaucaagcugcagguggugaaggacgcccaggcccugcugcacggccuggacuucagcgaggugagcaacgugcagagacugaugagaaagcagaagagagacgacagcgaccugaagagacugagagaccugaaccaggccgugaacaaccugguggagcugaagagcacccagcagaagagcgugcugagagugggcacccugaccagcgacgaccugcugacccuggccgccgaccuggagaagcugaagagcaaggugaucagaaccgagagaccccugagcagcggcguguacaugggcaaccugagcacccagcagcuggagcagagaagagcccugcugaacaugaucggcauggugggcggcgcccagggcacccagcccggcagagacggcguggugagagugugggacgugaagaaccccgaccugcugaacaaccaguucggcaccaugcccagccugacccuggccugccugaccaagcagggccagguggaccugaacgacguggugcuggcccugaccgaccugggccugaucuacaccgccaaguaccccaacagcagcgaccuggacagacugagccagagccaccccauccugaacaugguggacaccaagaagagcagccugaacaucagcggcuacaacuucagccugggcgccgccgugaaggccggcgccugcaugcuggacggcggcaacaugcuggagaccaucaaggugaccccccagaccauggacggcauccugaagagcauccugaaggugaagaagagccugggcauguucgugagcgacacccccggcgagagaaaccccuacgagaacauccuguacaagaucugccugagcggcgacggcuggcccuacaucgccagcagaaccagcaucgugggcagagccugggagaacaccaccguggaccuggagagcgacggcaagccccagaaggugggcaccgccggcagcaacaagagccugcagagcgccggcuuccccaccggccugaccuacagccagcugaugacccugaaggacagcaugaugcagcuggaccccagcgccaagaccuggaucgacaucgagggcagacccgaggaccccguggagaucgcccuguaccagcccaugagcggcugcuacauccacuucuucagagagcccaccgaccugaagcaguucaagcaggacgccaaguacagccacggcaucgacgugaccgaccuguuccccgcccagcccggccugaccagcgccgugaucgaggcccugcccagaaacauggugcugaccugccagggcagcgacgacaucaagagacugcuggacagccagggcagaagagacaucaagcugaucgacaucgcccugagcaaggccgacagcagaagauucgagaacgccgugugggaccagugcaaggaccugugccacaugcacaccggcguggugguggagaagaagaagagaggcggcaaggaggagaucaccccccacugcgcccugauggacugcaucauguacgacgccgccgugagcggcggccugaacauccccgugcugagagccgugcugcccagagacaugguguucagaaccagcagccccaagguggugcugugaggacuaguaauaaggaaacuguaugaaugucugugggcaggaagugaagagauccuucuguaaagguuuuuggaauuaugucugcugaauaauaaacuuuuuugaaauaauaaaucugguagaaaaaugagaucucaaaggcucuuuucagagccaccaaaaaaaaaaaaaaaaaaaaaaaaaaaaaaaaaaaaaaaaaaaaaaaaaaaaaaaaaaaaaaaaaaaaaaaaaaaaaaaaaaaaaaaaaaaaaaaaaaaaa

SEQ ID NO: 18872 - RNA, 2109 nt, Artificial Sequence
  mRNA product Design b-4 (hSL-A100) comprising derived and/or modified sequence from LASV(LASV254-NIG-2011;Clade II)__AIT17675__SP-HsPLAT_NP(2-569) (opt4)
aggagagucccgcagucggcguccagcggcucugcuuguucgugugugugucguugcaggccuuauucaagcuuaccauggacgccaugaagagaggccugugcugcgugcugcugcugugcggcgccguguucgugagccccagcgccagcaaggaggugaagagcuuccuguggacccagagccugagaagagagcugagcggcuacugcagcagcaucaagcugcagguggugaaggacgcccaggcccugcugcacggccuggacuucagcgaggugagcaacgugcagagacugaugagaaagcagaagagagacgacagcgaccugaagagacugagagaccugaaccaggccgugaacaaccugguggagcugaagagcacccagcagaagagcgugcugagagugggcacccugaccagcgacgaccugcugacccuggccgccgaccuggagaagcugaagagcaaggugaucagaaccgagagaccccugagcagcggcguguacaugggcaaccugagcacccagcagcuggagcagagaagagcccugcugaacaugaucggcauggugggcggcgcccagggcacccagcccggcagagacggcguggugagagugugggacgugaagaaccccgaccugcugaacaaccaguucggcaccaugcccagccugacccuggccugccugaccaagcagggccagguggaccugaacgacgccgugcuggcccugaccgaccugggccugaucuacaccgccaaguaccccaacagcagcgaccuggacagacugagccagagccaccccauccugaacaugguggacaccaagaagagcagccugaacaucagcggcuacaacuucagccugggcgccgccgugaaggccggcgccugcaugcuggacggcggcaacaugcuggagaccaucaaggugaccccccagaccauggacggcauccugaagagcauccugaaggugaagaagagccugggcauguucgugagcgacacccccggcgagagaaaccccuacgagaacauccuguacaagaucugccugagcggcgacggcuggcccuacaucgccagcagaaccagcaucgugggcagagccugggagaacaccaucguggaccuggagagcgacggcaagccccagaaggugggcaccgccggcagcaacaagagccugcagagcgccggcuuccccaccggccugaccuacagccagcugaugacccugaaggacagcaugaugcagcuggaccccagcgccaagaccuggaucgacaucgagggcagacccgaggaccccguggagaucgcccuguaccagcccaugagcggcugcuacauccacuucuucagagagcccaccgaccugaagcaguucaagcaggacgccaaguacagccacggcaucgacguggccgaccuguuccccgcccagcccggccugaccagcgccgugaucgaggcccugcccagaaacauggugcugaccugccagggcagcgacgacaucaagagacugcuggacagccagggcagaagagacaucaagcugaucgacaucgcccugagcaaggccgacagcagaagauucgagaacgccgugugggaccagugcaaggaccugugccacaugcacaccggcguggugguggagaagaagaagagaggcggcaaggaggagaucaccccccacugcgcccugauggacugcaucauguacgacgccgccgugagcggcggccugaacauccccgugcugagagccgugcugcccagagacaugguguucagaaccagcagccccaagguggugcugugaggacuaguaauaaggaaacuguaugaaugucugugggcaggaagugaagagauccuucuguaaagguuuuuggaauuaugucugcugaauaauaaacuuuuuugaaauaauaaaucugguagaaaaaugagaucucaaaggcucuuuucagagccaccaaaaaaaaaaaaaaaaaaaaaaaaaaaaaaaaaaaaaaaaaaaaaaaaaaaaaaaaaaaaaaaaaaaaaaaaaaaaaaaaaaaaaaaaaaaaaaaaaaaaa

SEQ ID NO: 18873 - RNA, 2109 nt, Artificial Sequence
  mRNA product Design b-4 (hSL-A100) comprising derived and/or modified sequence from LASV(Nig08-04;Clade II)__ADU56611__SP-HsPLAT_NP(2-569) (opt4)
aggagagucccgcagucggcguccagcggcucugcuuguucgugugugugucguugcaggccuuauucaagcuuaccauggacgccaugaagagaggccugugcugcgugcugcugcugugcggcgccguguucgugagccccagcgccagcaaggaggugaagagcuuccuguggacccagagccugagaagagagcugagcggcuacugcagcaacaucaagcugcagguggugaaggacgcccaggcccugcugcacggccuggacuucagcgaggugagcaacgugcagagacugaugagaaagcagaagagagacgacggcgaccugaagagacugagagaccugaaccaggccgugaacaaccugguggagcugaagagcacccagcagaagagcgugcugagagugggcacccugaccagcgacgaccugcugacccuggccgccgaccuggagaagcugaagagcaaggugaucagaaccgagagaccccugagcagcggcguguacaugggcaaccugagcacccagcagcuggagcagagaaaggcccugcugagcaugaucggcauggugggcggcgcccagggcacccagcccggcagagacggcguggugagagugugggacgugaagaaccccgaccugcugaacaaccaguucggcaccaugcccagccugacccuggccugccugaccaagcagggccagguggaccugaacgacgccgugcuggcccugaccgaccugggccugaucuacaccgccaaguaccccaacagcagcgaccuggacagacugagccagagccaccccauccugaacaugguggacaccaagaagagcagccugaacaucagcggcuacaacuucagccugggcgccgccgugaaggccggcgccugcaugcuggacggcggcaacaugcuggagaccaucaaggugaccccccagaccauggacggcauccugaagagcauccugaaggugaagagaagccugggcauguucgugagcgacacccccggcgagagaaaccccuacgagaacauccuguacaagaucugccugagcggcgacggcuggcccuacaucgccagcagaaccagcaucgugggcagagccugggagaacaccaccguggaccuggagagcgacggcaagccccagaaggugggcaccgccggcagcaacaagagccugcagagcgccggcuuccccaccggccugaccuacagccagcugaugacccugaaggacagcaugaugcagcuggaccccagcgccaagaccuggaucgacaucgagggcagacccgaggaccccguggagaucgcccuguaccagcccaugagcggcugcuacauccacuucuucagagagcccaccgaccugaagcaguucaagcaggacgccaaguacagccacggcaucgacgugaccgaccuguucagcgcccagcccggccugaccagcgccgugaucgaggcccugcccagaaacauggugcugaccugccagggcagcgacgacaucaagaagcugcuggacagccagggcagaagagacaucaagcugaucgacaucagccugaacaaggccgacagcagaagauucgagaacgccgugugggaccagugcaaggaccugugccacaugcacaccggcguggugguggagaagaagaagagaggcggcaaggaggagaucaccccccacugcgcccugauggacugcaucauguucgacgccgccgugagcggcggccugaacauccccauccugagagccgugcugcccagagacaugguguucagaaccagcagccccaagguggugcugugaggacuaguaauaaggaaacuguaugaaugucugugggcaggaagugaagagauccuucuguaaagguuuuuggaauuaugucugcugaauaauaaacuuuuuugaaauaauaaaucugguagaaaaaugagaucucaaaggcucuuuucagagccaccaaaaaaaaaaaaaaaaaaaaaaaaaaaaaaaaaaaaaaaaaaaaaaaaaaaaaaaaaaaaaaaaaaaaaaaaaaaaaaaaaaaaaaaaaaaaaaaaaaaaa

SEQ ID NO: 18874 - RNA, 2112 nt, Artificial Sequence
  mRNA product Design b-4 (hSL-A100) comprising derived and/or modified sequence from LASV(GA391;Clade III)__AAA46284__SP-HsPLAT_NP(2-570) (opt4)
aggagagucccgcagucggcguccagcggcucugcuuguucgugugugugucguugcaggccuuauucaagcuuaccauggacgccaugaagagaggccugugcugcgugcugcugcugugcggcgccguguucgugagccccagcgccagcaaggaggugagaagcugccuguggacccagagccugagaagagagcugagcggcuacugcagcaacaucaagcugcagguggugaaggacgcccaggcccugcugcacggccuggacuucagcgaggugagcaacgugcagagacugaugagaaagcagaagagagacgacggcgaccugaagagacugagagaccugaaccaggccgugaacaaccugguggagcugaagagcacccagcagaagagcgugcugagagugggcacccugagcagcgacgaccugcugauccuggccgccgaccuggagaagcugaagagcaaggugaccagaaccgagagaccccugagcagcggcguguacaugggcaaccugagcagccagcagcuggaccagagaagagcccugcugaacaugaucggcaugaccggcgugagcggcggcggcaagggcgccagcaacggcaucgugagagugugggacgugaagaacgccgagcugcugaacaaccaguucggcaccaugcccagccugacccuggccugccugaccaagcagggccagguggaccugaacgacgccgugcaggcccugaccgaccugggccugaucuacaccgccaaguaccccaacagcagcgaccuggacagacugagccagagccaccccauccugaacaugaucgacaccaagaagagcagccugaacaucagcggcuacaacuucagccugggcgccgccgugaaggccggcgccugcaugcuggacggcggcaacaugcuggagaccaucaaggugagcccccagaccauggacggcauccugaagagcauccugaaggugaagaagagccugggcauguucgugagcgacacccccggcgagagaaaccccuacgagaacauccuguacaagaucugccugagcggcgacggcuggagcuacaucgccagcagaaccagcaucgugggcagagccugggagaacaccgugguggaccuggagcaggacaacaagccccagaagaucggcaacggcggcagcaacaagagccugcagagcgccggcuucgccgccggccugaucuacagccagcugaugacccugaaggacuucaagugcuucaaccugauccccaacgccaagaccuggauggacaucgagggcagacccgaggaccccguggagaucgcccuguaccagcccagcagcggcugcuacgugcacuucuucagagagcccaccgaccugaagcaguucaagcaggacgccaaguacagccacggcagagacgugaccgaccuguucgccgcccagcccggccugaccagcgccgugaucgaggcccugcccagaaacauggugaucaccugccagggcagcgaggacaucagaaagcugcuggagagccagggcagaagagacaucaagcugaucgacaucacccugagcaaggccgacagcagaaaguucgagaacgccgugugggaccaguucaaggaccugugccacaugcacaccggcguggugguggagaagaagaagagaggcggcaaggaggagaucaccccccacugcgcccugauggacugcaucauguucgacgccgccgugagcggcggccuggacgccaaggugcugagaguggugcugcccagagacaugguguucagaaccagcacccccaagguggugcugugaggacuaguaauaaggaaacuguaugaaugucugugggcaggaagugaagagauccuucuguaaagguuuuuggaauuaugucugcugaauaauaaacuuuuuugaaauaauaaaucugguagaaaaaugagaucucaaaggcucuuuucagagccaccaaaaaaaaaaaaaaaaaaaaaaaaaaaaaaaaaaaaaaaaaaaaaaaaaaaaaaaaaaaaaaaaaaaaaaaaaaaaaaaaaaaaaaaaaaaaaaaaaaaaa

SEQ ID NO: 18875 - RNA, 2109 nt, Artificial Sequence
  mRNA product Design b-4 (hSL-A100) comprising derived and/or modified sequence from LASV(Nig08-A19;Clade III)__ADU56619__SP-HsPLAT_NP(2-569) (opt4)
aggagagucccgcagucggcguccagcggcucugcuuguucgugugugugucguugcaggccuuauucaagcuuaccauggacgccaugaagagaggccugugcugcgugcugcugcugugcggcgccguguucgugagccccagcgccagcaaggaggugaagagcuuccuguggacccagagccugagaagagagcugagcggcuacugcagcaacaucaagcugcagguggugaaggacgcccaggcccugcugcacggccuggacuucagcgaggugagcaacgugcagagacugaugagaaagcagaagagagacgacggcgaccugaagagacugagagaccugaaccaggccgugaacaaccugguggagcugaagagcacccagcagaagagcgugcugagagugggcacccugagcagcgacgaccugcuggugcuggccgccgaccuggagaagcugaagagcaagguggugagaaccgagagaccccugagcagcggcaucuacaugggcaaccugagcagccagcagcuggaccagagaaaggcccugcugaacaugaucggcaugaccggcggcaacggcggcagaaacaccaccagcgacggcaucgugagagugugggacgugaagaacgccgagcugcugaacaaccaguucggcaccaugcccagccugacccuggccugccugaccaagcagggccagguggaccugaacgacgccgugcaggcccugaccgaccugggccugaucuacaccgccaaguaccccaacagcagcgaccuggacagacuggcccagagccaccccauccugaacaugaucgacaccaagaagagcagccugaacaucagcggcuacaacuucagccugggcgccgccgugaaggccggcgccugcaugcuggacggcggcaacaugcuggagaccaucaaggugagcccccagaccauggacggcauccugaagagcauccugaaggugaagagaagccugggcauguucaucagcgacacccccggcgagagaaaccccuacgagaacauccuguacaagaucugccugagcggcgacggcuggcccuacaucgccagcagaaccagcaucgugggcagagccugggagaacaccgugguggaccuggagagcgacaacaagccccagaagaccggcaacggcggcagcaacaagagccugcagagcgccggcuucgccgccggccugaccuacagccagcugaugacccugaaggacagcaugcugcagcuggaccccaacgccaagaccuggauggacaucgagggcagacccgaggaccccguggagaucgcccuguaccagcccagcagcggcugcuacauccacuucuucagagagcccaccgaccugaagcaguucaagcaggacgccaaguacagccacggcaucgacgugaccgaccuguucgccgcccagcccggccugaccagcgccgugaucgaggcccugcccagaaacauggugaucaccugccagggcagcgaggacaucagaaagcugcuggagagccagggcagaagagacaucaagcugaucgacaucagccugagcaagguggacagcagaaaguucgagaacgccgugugggaccaguucaaggaccugugccacaugcacaccggcaucgugguggagaagaagaagagaggcggcaaggaggagaucaccccccacugcgcccugauggacugcaucauguucgacgccgccgugagcggcggcguggacgccaaggugcugagagccgugcugcccagagacaugguguucagaaccagcacccccaagguggugcugugaggacuaguaauaaggaaacuguaugaaugucugugggcaggaagugaagagauccuucuguaaagguuuuuggaauuaugucugcugaauaauaaacuuuuuugaaauaauaaaucugguagaaaaaugagaucucaaaggcucuuuucagagccaccaaaaaaaaaaaaaaaaaaaaaaaaaaaaaaaaaaaaaaaaaaaaaaaaaaaaaaaaaaaaaaaaaaaaaaaaaaaaaaaaaaaaaaaaaaaaaaaaaaaaa

SEQ ID NO: 18876 - RNA, 2109 nt, Artificial Sequence
  mRNA product Design b-4 (hSL-A100) comprising derived and/or modified sequence from LASV(G1180-SLE-2010;Clade IV)__AIT17169__SP-HsPLAT_NP(2-569) (opt4)
aggagagucccgcagucggcguccagcggcucugcuuguucgugugugugucguugcaggccuuauucaagcuuaccauggacgccaugaagagaggccugugcugcgugcugcugcugugcggcgccguguucgugagccccagcgccagcaaggagaucaagagcuuccuguggacccagagccugagaagagagcugagcggcuacugcagcaacaucaagcugcagguggugaaggacgcccaggcccugcugcacggccuggacuucagcgaggugagcaacgugcagagacugaugagaaaggagagaagagacgacaacgaccugaagagacugagagaccugaaccaggccgugaacaaccugguggagcugaagagcacccagcagaagagcauccugagagugggcacccugaccagcgacgaccugcugauccuggccgccgaccuggagaagcugaagagcaaggugaucagaaccgagagaccccugagcgccggcguguacaugggcaaccugagcagccagcagcuggaccagagaagagcccugcugagcaugaucggcaugagcagcggcaaccagagagcccaggccggcagagacggcguggugagagugugggacgugaagaacguggagcugcugaacaaccaguucggcaccaugcccagccugacccuggccugccugaccaagcagggccagguggaccugaacgacgccgugcaggcccugaccgaccugggccugaucuacaccgccaaguaccccaacaccagcgaccuggacagacugacccagagccaccccauccugaacaugaucgacaccaagaagagcagccugaacaucagcggcuacaacuucagccugggcgccgccgugaaggccggcgccugcaugcuggacggcggcaacaugcuggagaccaucaaggugagcccccagaccauggacggcauccugaagagcauccugaaggugaagaaggcccugggcauguucaucagcgacacccccggcgagagaaaccccuacgagaacauccuguacaagaucugccugagcggcgacggcuggcccuacaucgccagcagaaccagcaucaccggcagagccugggagaacaccgugguggaccuggagagcgacggcaagccccagaaggccggcagcaacaacagcaacaagagccugcagagcgugggcuucaccgccggccugaccuacagccagcugaugacccugaaggacgccaugcugcagcuggaccccaacgccaagaccuggauggacaucgagggcagacccgaggaccccguggagaucgcccuguaccagcccagcagcggcugcuacauccacuucuucagagagcccaccgaccugaagcaguucaagcaggacgccaaguacagccacggcaucgacgugaccgaccuguucgccgcccagcccggccugaccagcgccgugaucgacgcccugcccagaaacauggugaucaccugccagggcagcgacgacaucagaaagcugcuggagagccagggcagaaaggacaucaagcugaucgacaucgcccugagcaagaccgacagcagaaaguacgagaacgccgugugggaccaguacaaggaccugugccacaugcacaccggcguggugguggagaagaagaagagaggcggcaaggaggagaucaccccccacugcgcccugauggacugcaucauguucgacgccgccgugagcggcggccugaacaccagcgugcugagagccgugcugcccagagacaugguguucagaaccagcacccccagaguggugcugugaggacuaguaauaaggaaacuguaugaaugucugugggcaggaagugaagagauccuucuguaaagguuuuuggaauuaugucugcugaauaauaaacuuuuuugaaauaauaaaucugguagaaaaaugagaucucaaaggcucuuuucagagccaccaaaaaaaaaaaaaaaaaaaaaaaaaaaaaaaaaaaaaaaaaaaaaaaaaaaaaaaaaaaaaaaaaaaaaaaaaaaaaaaaaaaaaaaaaaaaaaaaaaaaa

SEQ ID NO: 18877 - RNA, 2109 nt, Artificial Sequence
  mRNA product Design b-4 (hSL-A100) comprising derived and/or modified sequence from LASV(G1442-SLE-2011;Clade IV)__AIT17181__SP-HsPLAT_NP(2-569) (opt4)
aggagagucccgcagucggcguccagcggcucugcuuguucgugugugugucguugcaggccuuauucaagcuuaccauggacgccaugaagagaggccugugcugcgugcugcugcugugcggcgccguguucgugagccccagcgccagcaaggaggugaagagcuuccuguggacccagagccugagaagagagcugagcggcuacugcagcaacaucaagcugcagguggugaaggacgcccaggcccugcugcacggccuggacuucagcgaggugagcaacgugcagagacugaugagaaagcagagaagagacgacaacgaccugaagagacugagagaccugaaccaggccgugaacaaccugguggagcugaagagcacccagcagaagagcgugcugagagugggcacccugaccagcgacgaccugcuggugcuggccgccgaccuggagaagcugaagagcaaggugaucagaaccgagagaccccugagcgccggcguguacaugggcaaccugagcagccagcagcuggaccagagaagagcccugcugaacaugaucggcaugagcggcggcauccagggcaccagaaccggcagagacggcguggugagagugugggacgugaagaacgccgaccugcugaacaaccaguucggcaccaugcccagccugacccuggccugccugaccaagcagggccagguggaccugaacgacguggugcaggcccugaccgaccugggccugaucuacaccgccaaguaccccaacgccagcgaccuggacagacugacccagagccaccccauccugaacaugaucgacaccaagaagagcagccugaacaucagcggcuacaacuucagccugggcgccgccgugaaggccggcgccugcaugcuggacggcggcaacaugcuggagaccaucaaggugagcccccagaccauggacggcauccugaagagcauccugaaggugaagaagacccugggcauguucaucagcgacacccccggcgagagaaaccccuacgagaacauccuguacaagaucugccugagcggcgacggcuggcccuacaucgccagcagaaccagcaucaccggcagagccugggagaacaccgugguggaccuggagagcgacggcaagccccagaaggccggcagcaacaacagcaacaagagccugcagagcgccggcuucgccgccggccugaccuacagccagcugaugacccugaaggacgccaugcugcagcuggaccccaacgccaagaccuggauggacaucgagggcagacccgaggaccccguggagaucgcccuguaccagcccagcagcggcugcuacauccacuucuucagagagcccaccgaccugaagcaguucaagcaggacgccaaguacagccacggcaucgacgugaccgaccuguucgccgcccagcccggccugaccagcgccgugaucgaggcccugcccagaaacauggugaucaccugccagggcagcgacgacaucaagaagcugcuggagagccagggcagaaaggacaucaagcugaucgacaucgcccugagcaagaccgacagcagaaaguacgagaacgccgugugggaccaguacaaggaccugugccacaugcacaccggcguggugguggagaagaagaagagaggcggcaaggaggagaucaccccccacugcgcccugauggacugcaucauguucgacgccgccgugagcggcggccugaacacccuggugcugagagccgugcugcccagagacaugguguucagaaccagcacccccagaguggugcugugaggacuaguaauaaggaaacuguaugaaugucugugggcaggaagugaagagauccuucuguaaagguuuuuggaauuaugucugcugaauaauaaacuuuuuugaaauaauaaaucugguagaaaaaugagaucucaaaggcucuuuucagagccaccaaaaaaaaaaaaaaaaaaaaaaaaaaaaaaaaaaaaaaaaaaaaaaaaaaaaaaaaaaaaaaaaaaaaaaaaaaaaaaaaaaaaaaaaaaaaaaaaaaaaa

SEQ ID NO: 18878 - RNA, 2109 nt, Artificial Sequence
  mRNA product Design b-4 (hSL-A100) comprising derived and/or modified sequence from LASV(G3010-SLE-2013;Clade IV)__AIT17345__SP-HsPLAT_NP(2-569) (opt4)
aggagagucccgcagucggcguccagcggcucugcuuguucgugugugugucguugcaggccuuauucaagcuuaccauggacgccaugaagagaggccugugcugcgugcugcugcugugcggcgccguguucgugagccccagcgccagcaaggagaucaagagcuuccuguggacccagagccugagaagagagcugagcggcuacugcagcaacaucaagcugcagguggugaaggacgcccaggcccugcugcacggccuggacuucagcgaggugagcaacgugcagagacugaugagaaaggagagaagagacgacaacgaccugaagagacugagagaccugaaccaggccgugaacaaccugguggagcugaagagcacccagcagaagagcauccugagagugggcacccugaccagcgacgaccugcugauccuggccgccgaccuggagaagcugaagagcaaggugaccagaaccgagagaccccugagcgccggcguguacaugggcaaccugagcagccagcagcuggaccagagaagagcccugcugagcaugaucggcaugagcagcggcgugcagggcgccagagccggcagagacggcguggugagagugugggacgugaagaacgccgagcugcugaacaaccaguucggcaccaugcccagccugacccuggccugccugaccaagcagggccagguggaccugaacgacguggugcaggcccugaccgaccugggccugaucuacaccgccaaguaccccaacaccagcgaccuggacagacugacccagagccaccccauccugaacaugaucgacaccaagaagagcagccugaacaucagcggcuacaacuucagccugggcgccgccgugaaggccggcgccugcaugcuggacggcggcaacaugcuggagaccaucaaggugagcccccagaccauggacggcauccugaagagcauccugaaggugaagaaggcccugggcauguucaucagcgagacccccggcgagagaaaccccuacgagaacauccuguacaagaucugccugagcggcgacggcuggcccuacaucgccagcagaaccagcaucaccggcagagccugggagaacaccgugguggaccuggagagcgacggcaagccccagaaggccggcagcaacaacagcaacaagagccugcagagcgccggcuucaccgccggccugaccuacagccagcugaugacccugaaggacgccaugcugcagcuggaccccaacgccaagaccuggauggacaucgagggcagacccgaggaccccguggagguggcccuguaccagcccagcagcggcugcuacauccacuucuucagagagcccaccgaccugaagcaguucaagcaggacgccaaguacagccacggcaucgacgugaccgaccuguucgccgcccagcccggccugaccagcgccgugaucgacgcccugcccagaaacauggugaucaccugccagggcagcgacgacaucaagaagcugcuggagagccagggcagaaaggacaucaagcugaucgacaucgcccugagcaagaccgacagcagaaaguacgagaacgccgugugggaccaguacaaggaccugugccacaugcacaccggcguggugguggagaagaagaagagaggcggcaaggaggagaucaccccccacugcgcccugauggacugcaucauguucgacgccgccgugagcggcggccugaacaccagcgugcugagagccgugcugcccagagacaugguguucagaaccagcacccccagaguggugcugugaggacuaguaauaaggaaacuguaugaaugucugugggcaggaagugaagagauccuucuguaaagguuuuuggaauuaugucugcugaauaauaaacuuuuuugaaauaauaaaucugguagaaaaaugagaucucaaaggcucuuuucagagccaccaaaaaaaaaaaaaaaaaaaaaaaaaaaaaaaaaaaaaaaaaaaaaaaaaaaaaaaaaaaaaaaaaaaaaaaaaaaaaaaaaaaaaaaaaaaaaaaaaaaaa

SEQ ID NO: 18879 - RNA, 2109 nt, Artificial Sequence
  mRNA product Design b-4 (hSL-A100) comprising derived and/or modified sequence from LASV(G502-SLE-2009;Clade IV)__AIT17127__SP-HsPLAT_NP(2-569) (opt4)
aggagagucccgcagucggcguccagcggcucugcuuguucgugugugugucguugcaggccuuauucaagcuuaccauggacgccaugaagagaggccugugcugcgugcugcugcugugcggcgccguguucgugagccccagcgccagcaaggagaucaagagcuuccuguggacccagagccugagaagagagcugagcggcuacugcagcaacaucaagcugcagguggugaaggacgcccaggcccugcugcacggccuggacuucagcgaggugagcaacgugcagagacugaugagaaaggagagaagagacgacaacgaccugaagagacugagagaccugaaccaggccgugaacaaccugguggagcugaagagcacccagcagaagagcauccugagagugggcacccugaccagcgacgaccugcugauccuggccgccgaccuggagaagcugaagagcaaggugaucagaaccgagagaccccugagcgccggcguguacaugggcaaccugagcagccagcagcuggaccagagaagagcccugcugagcaugaucggcaugagcggcggcaaccagggcgugagagccggcaaggacggcguggugagagugugggacgugaagaacgccgagcugcugaacaaccaguucggcaccaugcccagccugacccuggccugccugaccaagcagggccagguggaccugaacgacgccgugcaggcccugaccgaccugggccugaucuacaccgccaaguaccccaacaccagcgaccuggacagacugacccagagccaccccauccugaacaugaucgacaccaagaagagcagccugaacaucagcggcuacaacuucagccugggcgccgccgugaaggccggcgccugcaugcuggacggcggcaacaugcuggagaccaucaaggugagcccccagaccauggacggcauccugaagagcauccugaaggugaagaaggcccugggcauguucaucagcgacacccccggcgagagaaaccccuacgagaacauccuguacaagaucugccugagcggcgacggcuggcccuacaucgccagcagaaccagcaucaccggcagagccugggagaacaccgugguggaccuggagagcgacggcaagccccagaaggccggcagcaacaacagcaacaagagccugcagagcgccggcuucaccgccggccugaccuacagccagcugaugacccugaaggacgccaugcugcagcuggaccccaacaccaagaccuggauggacaucgagggcagacccgaggaccccguggagaucgcccuguaccagcccagcagcggcugcuacauccacuucuucagagagcccaccgaccugaagcaguucaagcaggacgccaaguacagccacggcaucgacgugaccgaccuguucgccgcccagcccggccugaccagcgccgugaucgacgcccugcccagaaacauggugaucaccugccagggcagcgacgacaucagaaagcugcuggagagccagggcagaaaggacaucaagcugaucgacaucgcccugaacaagaccgacagcagaaaguacgagaacgccgugugggaccaguacaaggaccugugccacaugcacaccggcguggugguggagaagaagaagagaggcggcaaggaggagaucaccccccacugcgcccugauggacugcaucauguucgacgccgccgugagcggcggccugaacaccagcgugcugagagccgugcugcccagagacaugguguucagaaccagcacccccagaguggugcugugaggacuaguaauaaggaaacuguaugaaugucugugggcaggaagugaagagauccuucuguaaagguuuuuggaauuaugucugcugaauaauaaacuuuuuugaaauaauaaaucugguagaaaaaugagaucucaaaggcucuuuucagagccaccaaaaaaaaaaaaaaaaaaaaaaaaaaaaaaaaaaaaaaaaaaaaaaaaaaaaaaaaaaaaaaaaaaaaaaaaaaaaaaaaaaaaaaaaaaaaaaaaaaaaa

SEQ ID NO: 18880 - RNA, 2109 nt, Artificial Sequence
  mRNA product Design b-4 (hSL-A100) comprising derived and/or modified sequence from LASV(G733-SLE-2010;Clade IV)__AIT17155__SP-HsPLAT_NP(2-569) (opt4)
aggagagucccgcagucggcguccagcggcucugcuuguucgugugugugucguugcaggccuuauucaagcuuaccauggacgccaugaagagaggccugugcugcgugcugcugcugugcggcgccguguucgugagccccagcgccagcaaggagaucaagagcuuccuguggacccagagccugagaagagagcugagcggcuacugcagcaacaucaagcugcagguggugaaggacgcccaggcccugcugcacggccuggacuucagcgaggugagcaacgugcagagacugaugagaaaggagagaagagacgacaacgaccugaagagacugagagaccugaaccaggccgugaacaaccugguggagcugaagagcacccagcagaagagcgugcugagagugggcacccugaccagcgacgagcugcuggugcuggccgccgaccuggagaagcugaagagcaaggugaucagaaccgagagaccccugagcgccggcguguacaugggcaaccugagcagccagcagcuggaccagagaagagcccugcugagcaugaucggcaugagcggcggcaaccagggcgccagaaccggcagagacggcguggugagagugugggacgugaagaacgccgagcugcugaacaaccaguucggcaccaugcccagccugacccuggccugccugaccaagcagggccagguggaccugaacgacgccgugcaggcccugaccgaccugggccugaucuacaccgccaaguaccccaacaccagcgaccuggacagacugacccagagccaccccauccugaacaugaucgacaccaagaagagcagccugaacaucagcggcuacaacuucagccugggcgccgccgugaaggccggcgccugcaugcuggacggcggcaacaugcuggagaccaucaaggugagcccccagaccauggacggcauccugaagagcauccugaaggugaagaaggcccugggcauguucaucagcgacacccccggcgagagaaaccccuacgagaacauccuguacaagaucugccugagcggcgacggcuggcccuacaucgccagcagaaccagcaucaccggcagagccugggagaacaccgugguggaccuggagagcgacggcaagccccagaaggccggcagcaacaacagcaacaagagccugcagagcgccggcuucaccgccggccugaccuacagccagcugaugacccugaaggacgccaugcugcagcuggaccccaacgccaagaccuggauggacaucgagggcagacccgaggaccccguggagaucgcccuguaccagcccagcagcggcugcuacauccacuucuucagagagcccaccgaccugaagcaguucaagcaggacgccaaguacagccacggcaucgacgugaccgaccuguucgccgcccagcccggccugaccagcgccgugaucgacgcccugcccagaaacauggugaucaccugccagggcagcgacgacaucagaaagcugcuggagagccagggcagaaaggacaucaagcugaucgacaucgcccugagcaagaucgacagcagaaaguacgagaacgccgugugggaccaguacaaggaccugugccacaugcacaccggcguggugguggagaagaagaagagaggcggcaaggaggagaucaccccccacugcgcccugauggacugcaucauguucgacgccgccgugagcggcggccugaacagccuggugcugagagccgugcugcccagagacaugguguucagaaccagcacccccagaguggugcugugaggacuaguaauaaggaaacuguaugaaugucugugggcaggaagugaagagauccuucuguaaagguuuuuggaauuaugucugcugaauaauaaacuuuuuugaaauaauaaaucugguagaaaaaugagaucucaaaggcucuuuucagagccaccaaaaaaaaaaaaaaaaaaaaaaaaaaaaaaaaaaaaaaaaaaaaaaaaaaaaaaaaaaaaaaaaaaaaaaaaaaaaaaaaaaaaaaaaaaaaaaaaaaaaa

SEQ ID NO: 18881 - RNA, 2109 nt, Artificial Sequence
  mRNA product Design b-4 (hSL-A100) comprising derived and/or modified sequence from MOPV/LASV reassortant(IGS-1;Clade IV)__AFY05578__SP-HsPLAT_NP(2-569) (opt4)
aggagagucccgcagucggcguccagcggcucugcuuguucgugugugugucguugcaggccuuauucaagcuuaccauggacgccaugaagagaggccugugcugcgugcugcugcugugcggcgccguguucgugagccccagcgccagcaaggagaucaagagcuuccuguggacccagagccugagaagagagcugagcggcuacugcagcaacaucaagcugcagguggugaaggacgcccaggcccugcugcacggccuggacuucagcgaggugagcaacgugcagagacugaugagaaaggagagaagagacgacaacgaccugaagagacugagagaccugaaccaggccgugaacaaccugguggagcugaagagcacccagcagaagagcauccugagagugggcacccugaccagcgacgaccugcugauccuggccgccgaccuggagaagcugagaagcaaggugaucagaaccgagagaccccugagcgccggcguguacaugggcaaccugagcagccagcagcuggaccagagaagagcccugcugaacaugaucggcaugagcggcggcaaccagggcgccagagccggcagagacggcguggugagagugugggacgugaagaacgccgagcugcugagcaaccaguucggcaccaugcccagccugacccuggccugccugaccaagcagggccagguggaccugaacgacgccgugcaggcccugaccgaccugggccugaucuacaccgccaaguaccccaacaccagcgaccuggacagacugacccagagccaccccauccugaacaugaucgacaccaagaagagcagccugaacaucagcggcuacaacuucagccugggcgccgccgugaaggccggcgccugcaugcuggacggcggcaacaugcuggagaccaucaaggugagcccccagaccauggacggcauccugaagagcauccugaaggugaagaaggcccugggcauguucaucagcgacacccccggcgagagaaaccccuacgagaacauccuguacaagaucugccugagcggcgacggcuggcccuacaucgccagcagaaccagcaucaccggcagagccugggagaacaccgugguggaccuggagagcgacggcaagccccagaaggccgacagcaacaacagcagcaagagccugcagagcgccggcuucaccgccggccugaccuacagccagcugaugacccugaaggacgccaugcugcagcuggaccccaacgccaagaccuggauggacaucgagggcagacccgaggaccccguggagaucgcccuguaccagcccagcagcggcugcuacauccacuucuucagagagcccaccgaccugaagcaguucaagcaggacgccaaguacagccacggcaucgacgugaccgaccuguucgccacccagcccggccugaccagcgccgugaucgacgcccugcccagaaacauggugaucaccugccagggcagcgacgacaucagaaagcugcuggagagccagggcagaaaggacaucaagcugaucgacaucgaccugagcaagaccgacagcagaaaguacgagaacgccgugugggaccaguacaaggaccugugccacaugcacaccggcguggugguggagaagaagaagagaggcggcaaggaggagaucaccccccacugcgcccugauggacugcaucauguucgacgccgccgugagcggcggccugaacaccagcgugcugagagccgugcugcccagagacaugguguucagaaccagcacccccagaguggugcugugaggacuaguaauaaggaaacuguaugaaugucugugggcaggaagugaagagauccuucuguaaagguuuuuggaauuaugucugcugaauaauaaacuuuuuugaaauaauaaaucugguagaaaaaugagaucucaaaggcucuuuucagagccaccaaaaaaaaaaaaaaaaaaaaaaaaaaaaaaaaaaaaaaaaaaaaaaaaaaaaaaaaaaaaaaaaaaaaaaaaaaaaaaaaaaaaaaaaaaaaaaaaaaaaa

SEQ ID NO: 18882 - RNA, 2109 nt, Artificial Sequence
  mRNA product Design b-4 (hSL-A100) comprising derived and/or modified sequence from LASV(LM765-SLE-2012;Clade IV)__AIT17815__SP-HsPLAT_NP(2-569) (opt4)
aggagagucccgcagucggcguccagcggcucugcuuguucgugugugugucguugcaggccuuauucaagcuuaccauggacgccaugaagagaggccugugcugcgugcugcugcugugcggcgccguguucgugagccccagcgccagcaaggagaucaagagcuuccuguggacccagagccugagaagagagcugagcggcuacugcagcaacaucaagcugcagguggugaaggacgcccaggcccugcugcacggccuggacuucagcgaggugagcaacgugcagagacugaugagaaaggagagaagagacgacaacgaccugaagagacugagagaccugaaccaggccgugaacaaccugguggagcugaagagcacccagcagaagagcauccugagagugggcacccugaccagcgacgaccugcugauccuggccgccgaccuggagaagcugaagagcaaggugaccagaaccgagagaccccugagcgccggcguguacaugggcaaccugagcagccagcagcuggaccagagaagagcccugcuggacaugaucggcaugagcggcagcaaccagggcgccagagccggcagagacggcguggugagagugugggacgugaagaacgccgagcugcugaacaaccaguucggcaccaugcccagccugacccuggccugccugaccaagcagggccagguggaccugaacgacgccgugcaggcccugaccgaccugggccugaucuacaccgccaaguaccccaacaccagcgaccuggacagacugacccagagccaccccauccugaacaugaucgacaccaagaagagcagccugaacaucagcggcuacaacuucagccugggcgccgccgugaaggccggcgccugcaugcuggacggcggcaacaugcuggagaccaucaaggugagcccccagaccauggacggcauccugaagagcauccugaaggugaagaaggcccugggcauguucaucagcgacgcccccggcgagagaaaccccuacgagaacauccuguacaagaucugccugagcggcgacggcuggcccuacaucgccagcagaaccagcaucaccggcagagccugggagaacaccgugguggaccuggagagcgacggcaagccccagaaggccggcagcaacggcagcaacaagagccugcagagcgccggcuucaccgccggccugaccuacagccagcugaugacccugaaggacgccaugcugcagcuggaccccaacgccaagaccuggauggacaucgagggcagacccgaggaccccguggagaucgcccuguaccagcccagcagcggcugcuacauccacuucuucagagagcccaccgaccugaagcaguucaagcaggacgccaaguacagccacggcaucgacgugaccgaccuguucgccgcccagcccggccugaccagcgccgugaucgacgcccugcccagaaacauggugaucaccugccagggcagcgacgacaucagaaagcuguucgagagccagggcagaaaggacaucaagcugaucgacaucgcccugagcaagaccgacagcagaaaguacgagaacgccgugugggaccaguacaaggaccugugccacaugcacaccggcaucgugguggagaagaagaagagaggcggcaaggaggagaucaccccccacugcgcccugauggacugcaucauguucgacgccgccgugagcggcggccugaacaccagcgugcugagagccgugcugcccagagacaugguguucagaaccagcacccccagaguggugcugugaggacuaguaauaaggaaacuguaugaaugucugugggcaggaagugaagagauccuucuguaaagguuuuuggaauuaugucugcugaauaauaaacuuuuuugaaauaauaaaucugguagaaaaaugagaucucaaaggcucuuuucagagccaccaaaaaaaaaaaaaaaaaaaaaaaaaaaaaaaaaaaaaaaaaaaaaaaaaaaaaaaaaaaaaaaaaaaaaaaaaaaaaaaaaaaaaaaaaaaaaaaaaaaaa

SEQ ID NO: 18883 - RNA, 2109 nt, Artificial Sequence
  mRNA product Design b-4 (hSL-A100) comprising derived and/or modified sequence from LASV(LM776-SLE-2012;Clade IV)__AIT17825__SP-HsPLAT_NP(2-569) (opt4)
aggagagucccgcagucggcguccagcggcucugcuuguucgugugugugucguugcaggccuuauucaagcuuaccauggacgccaugaagagaggccugugcugcgugcugcugcugugcggcgccguguucgugagccccagcgccagcaaggagaucaagagcuuccuguggacccagagccugagaagagagcugagcagcuacugcagcaacaucaagcugcagguggugaaggacgcccaggcccugcugcacggccuggacuucagcgaggugagcaacgugcagagacugaugagaaaggagagaagagacgacaacgaccugaagagacugagagaccugaaccaggccgugaacaaccugguggagcugaagagcacccagcagaagagcauccugagagugggcacccugaccagcgacgaccugcugauccuggccgccgaccuggagaagcugaagagcaaggugaccagaaccgagagaccccugagcgccggcguguacaugggcaaccugagcagccagcagcuggaccagagaagagcccugcugagcaugaucggcaugagcggcagcaaccagggcgccagagccggcagagacggcguggugagagugugggacgugaagaacgccgagcugcugaacaaccaguucggcaccaugcccagccugacccuggccugccugaccaagcagggccagguggaccugaacgacgccgugcaggcccugaccgaccugggccugaucuacaccgccaaguaccccaacaccagcgaccuggacagacugacccagagccaccccauccugaacaugaucgacaccaagaagagcagccugaacaucagcggcuacaacuucagccugggcgccgccgugaaggccggcgccugcaugcuggacggcggcaacaugcuggagaccaucaaggugagcccccagaccauggacggcauccugaagagcauccugaaggugaagaaggcccugggcauguucaucagcgacacccccggcgagagaaaccccuacgagaacauccuguacaagaucugccugagcggcgacggcuggcccuacaucgccagcagaaccagcaucaccggcagagccugggagaacaccgugguggaccuggagagcgacggcaagccccagaaggccggcagcaacaacagcaacaagagccugcagagcgccggcuucaccgccggccugaccuacagccagcugaugacccugaaggacgccaugcugcagcuggaccccaacgccaagaccuggauggacaucgagggcagacccgaggaccccguggagguggcccuguaccagcccagcagcggcugcuacauccacuucuucagagagcccaccgaccugaagcaguucaagcaggacgccaaguacagccacggcaucgacgugaccgaccuguucgccgcccagcccggccugaccagcgccgugaucgacgcccugcccagaaacauggugaucaccugccagggcagcgacgacaucagaaagcugcuggagagccagggcagaaaggacaucaagcugaucgacaucgcccugagcaagaccgacagcagaaaguacgagaacgccgugugggaccaguacaaggaccugugccacaugcacaccggcguggugguggagaagaagaagagaggcggcaaggaggagaucaccccccacugcgcccugauggacugcaucauguucgacgccgccgugagcggcggccugaacaccagcgugcugagagccgugcugcccagagacaugguguucagaaccagcacccccagaguggugcugugaggacuaguaauaaggaaacuguaugaaugucugugggcaggaagugaagagauccuucuguaaagguuuuuggaauuaugucugcugaauaauaaacuuuuuugaaauaauaaaucugguagaaaaaugagaucucaaaggcucuuuucagagccaccaaaaaaaaaaaaaaaaaaaaaaaaaaaaaaaaaaaaaaaaaaaaaaaaaaaaaaaaaaaaaaaaaaaaaaaaaaaaaaaaaaaaaaaaaaaaaaaaaaaaa

SEQ ID NO: 18884 - RNA, 2109 nt, Artificial Sequence
  mRNA product Design b-4 (hSL-A100) comprising derived and/or modified sequence from LASV(Mad39;Clade IV)__ANH09723__SP-HsPLAT_NP(2-569) (opt4)
aggagagucccgcagucggcguccagcggcucugcuuguucgugugugugucguugcaggccuuauucaagcuuaccauggacgccaugaagagaggccugugcugcgugcugcugcugugcggcgccguguucgugagccccagcgccagcaaggagaucaagagcuuccuguggacccagagccugagaagagagcugagcggcuacugcagcaacaucaagcugcagguggugaaggacgcccaggcccugcugcacggccuggacuucagcgaggugagcaacgugcagagacugaugagaaagcagagaagagacgacaacgaccugaagagacugagagaccugaaccaggccgugaacaaccugguggagcugaagagcacccagcagaagagcgugcugagagugggcacccugaccagcgacgaccugcugacccuggccgccgaccuggagaagcugaagagcaaggugaccagaaccgagagaccccugaccgccggcguguacaugggcaaccugagcagccagcagcuggaccagagaagagcccugcugaacaugaucggcaugagcggcggcaaccagggcgccagaaccggcagagacggcguggugagagugugggacgugaagaacgccgagcugcugaacaaccaguucggcaccaugcccagccugacccuggccugccugaccaagcagggccagguggaccugaacgacguggugcaggcccugaccgaccugggccugaucuacaccgccaaguaccccaacaccagcgaccuggacagacugacccagagccaccccauccugaacaugaucgacaccaacaagagcagccugaacaucagcggcuacaacuucagccugggcgccgccgugaaggccggcgccugcaugcuggacggcggcaacaugcuggagaccaucaaggugagcccccagaccauggacggcauccugaagagcauccugaaggugaagaagagccugggcauguucaucagcgacacccccggcgagagaaaccccuacgagaacauccuguacaagaucugccugagcggcgacggcuggcccuacaucgccagcagaaccagcaucaccggcagagccugggagaacaccgugguggaccuggagagcggcggcaagccccagaaggccggcagcaacaacagcaacaagagccugcagagcgccggcuucgccgccggccugaccuacagccagcugaugacccugaaggacgccaugcugcagcuggaccccaacgccaagaccuggauggacaucgagggcagacccgaggaccccguggagaucgcccuguaccagcccaucagcggcugcuacauccacuucuucagagagcccaccgaccugaagcaguucaagcaggacgccaaguacagccacggcaucgacgugaccgaccuguucgccgcccagcccggccugaccagcgccgugaucgaggcccugcccagaaacauggugaucaccugccagggcagcgacgacaucagaaagcuguucgagagccagggcagaaaggacaucaagcugaucgacaucgcccugagcaagaccgacagcagaaaguacgagaacgccgugugggaccaguacaaggaccugugccacaugcacaccggcguggugguggagaagaagaagaagggcggcaaggaggagaucaccccccacugcgcccugauggacugcaucauguucgacgccgccgugagcggcggccugaacacccuggugcugagagccgugcugcccagagacaugguguucagaaccagcacccccaagguggugcugugaggacuaguaauaaggaaacuguaugaaugucugugggcaggaagugaagagauccuucuguaaagguuuuuggaauuaugucugcugaauaauaaacuuuuuugaaauaauaaaucugguagaaaaaugagaucucaaaggcucuuuucagagccaccaaaaaaaaaaaaaaaaaaaaaaaaaaaaaaaaaaaaaaaaaaaaaaaaaaaaaaaaaaaaaaaaaaaaaaaaaaaaaaaaaaaaaaaaaaaaaaaaaaaaa

SEQ ID NO: 18885 - RNA, 2109 nt, Artificial Sequence
  mRNA product Design b-4 (hSL-A100) comprising derived and/or modified sequence from LASV(Z0947-SLE-2011;Clade IV)__AIT17841__SP-HsPLAT_NP(2-569) (opt4)
aggagagucccgcagucggcguccagcggcucugcuuguucgugugugugucguugcaggccuuauucaagcuuaccauggacgccaugaagagaggccugugcugcgugcugcugcugugcggcgccguguucgugagccccagcgccagcaaggagaucaagagcuuccuguggacccagagccugagaagagagcugagcggcuacugcagcaacaucaagcugcagguggugaaggacgcccaggcccugcugcacggccuggacuucagcgaggugagcaacgugcagagacugaugagaaaggagagaagagacgacaacgaccugaagagacugagagaccugaaccaggccgugaacaaccugguggagcugaagagcacccagcagaagagcauccugagagugggcacccugaccagcgacgaccugcugauccuggccgccgaccuggagaagcugaagagcaaggugaccagaaccgagagaccccugagcgccggcguguacaugggcaaccugagcagccagcagcuggaccagagaagagcccugcugaacaugaucggcaugagcggcagcaaccagggcgccagaaccggcagagacggcguggugagagugugggacgugaagaacgccgagcugcugaacaaccaguucggcaccaugcccagccugacccuggccugccugaccaagcagggccagguggaccugaacgacgccgugcaggcccugaccgaccugggccugaucuacaccgccaaguaccccaacaccagcgaccuggacagacugacccagagccaccccauccugaacaugaucgacaccaagaagagcagccugaacaucagcggcuacaacuucagccugggcgccgccgugaaggccggcgccugcaugcuggacggcggcaacaugcuggagaccaucaaggugagcccccagaccauggacggcauccugaagagcauccugaaggugaagaaggcccugggcauguucaucagcgacgcccccggcgagagaaaccccuacgagaacauccuguacaagaucugccugagcggcgacggcuggcccuacaucgccagcagaaccagcaucaccggcagagccugggagaacaccgugguggaccuggagagcgacggcaagccccagaaggccggcagcaacggcagcaacaagagccugcagagcgccggcuucaccgccggccugaccuacagccagcugaugacccugaaggacgccaugcugcagcuggaccccaacgccaagaccuggauggacaucgagggcagacccgaggaccccguggagaucgcccuguaccagcccagcagcggcugcuacauccacuucuucagagagcccaccgaccugaagcaguucaagcaggacgccaaguacagccacggcaucgacgugaccgaccuguucgccgcccagcccggccugaccagcgccgugaucgacgcccugcccagaaacauggugaucaccugccagggcagcgacgacaucagaaagcuguucgagagccagggcagaaaggacaucaagcugaucgacaucgcccugagcaagaccgacagcagaaaguacgagaacgccgugugggaccaguacaaggaccugugccacaugcacaccggcaucgugguggagaagaagaagagaggcggcaaggaggagaucaccccccacugcgcccugauggacugcaucauguucgacgccgccgugagcggcggccugaacaccagcgugcugagagccgugcugcccagagacaugguguucagaaccagcacccccagaguggugcugugaggacuaguaauaaggaaacuguaugaaugucugugggcaggaagugaagagauccuucuguaaagguuuuuggaauuaugucugcugaauaauaaacuuuuuugaaauaauaaaucugguagaaaaaugagaucucaaaggcucuuuucagagccaccaaaaaaaaaaaaaaaaaaaaaaaaaaaaaaaaaaaaaaaaaaaaaaaaaaaaaaaaaaaaaaaaaaaaaaaaaaaaaaaaaaaaaaaaaaaaaaaaaaaaa

SEQ ID NO: 18886 - RNA, 2109 nt, Artificial Sequence
  mRNA product Design b-4 (hSL-A100) comprising derived and/or modified sequence from LASV(Josiah;Clade IV)__NP_694869__SP-HsPLAT_NP(2-569) (opt5)
aggagagucccgcagucggcguccagcggcucugcuuguucgugugugugucguugcaggccuuauucaagcuuaccauggacgccaugaagagaggccugugcugugugcuccugcuuugcggggcugucuucguuagccccagcgccuccaaggagaucaaaucuuuccuguggacccagagccucagacgggaacuguccggcuacugcucuaacauuaagcugcaaguggucaaagacgcucaggcccugcuccacgggcuggauuuuagcgagguuuccaaugugcagcgccuuaugagaaaggaacggcgcgacgauaacgaccugaaaagacuccgggaucugaaucaggcggugaacaaucuggucgagcucaagucuacacaacaaaagagcauccugcgcgugggaacgcuuaccuccgacgaucugcucauucuggcugccgaccuugaaaaacuuaagagcaaaguuaucagaacagagcggccccucucugccggcguguauauggggaaccuguccagccagcagcuggaucagcgcagagcucuccugaauaugauuggaaugucuggcgggaaccagggagcccgggcuggccgcgacggcgucgugagaguuugggaugugaagaaugccgagcuucugaacaaucaguucgggaccaugccuucccucacacuggcgugucuuaccaaacagggacaagucgaccugaacgaugccgugcaggcucucacagaccugggccugaucuacaccgccaaguauccgaauacgagcgaccucgaucggcugacccagucucaucccauccuuaacaugauugacacaaagaaauccagccugaauaucuccggguacaacuuuucucucggagcugccgugaaggcgggcgccugcaugcuggaugggggaaacaugcuugaaaccauuaaagucagcccucaaacaauggacggcauccugaaguccauucucaaaguuaagaaagcucugggcauguucaucagcgauacccccggggagcgcaauccuuaugaaaacauucuguacaagaucugucucucuggagacggcuggcccuauaucgccuccagaacgagcauuacagggcgggcuugggagaauaccgugguggaucuggagucugacggaaagccucagaaagccgauagcaacaauuccucuaagagccuucaguccgccggcuuuacagcugggcugaccuacagccagcucaugacccugaaagacgcgaugcugcaacuugauccgaacgccaagacauggauggacaucgaaggaagacccgaggacccugucgaaauugcucucuaccagcccucuuccggcugcuauauccacuucuuucgcgagccuacggaucugaaacaguucaagcaggacgccaaguacagccauggcauugaugugaccgaccuguuugccacacaacccgggcucaccucugcuguuaucgaugcccugccgcggaauauggugaucacaugucagggauccgacgauauuagaaaacuucuggaaagccagggccgcaaggacaucaaacucauugauaucgcgcuguccaagaccgacucucggaaauaugagaacgcugucugggaucaguacaaggaccugugccacaugcauacgggggugguuguggagaagaaaaagagaggaggcaaagaagagauuacaccucacugugcccuuauggauugcaucauguucgacgccgcugucagcgggggccucaauaccuccgugcugcgcgccguccugccccgggacaugguguuuagaaccucuacaccucgcguugugcucugaggacuaguaauaaggaaacuguaugaaugucugugggcaggaagugaagagauccuucuguaaagguuuuuggaauuaugucugcugaauaauaaacuuuuuugaaauaauaaaucugguagaaaaaugagaucucaaaggcucuuuucagagccaccaaaaaaaaaaaaaaaaaaaaaaaaaaaaaaaaaaaaaaaaaaaaaaaaaaaaaaaaaaaaaaaaaaaaaaaaaaaaaaaaaaaaaaaaaaaaaaaaaaaaa

SEQ ID NO: 18887 - RNA, 2109 nt, Artificial Sequence
  mRNA product Design b-4 (hSL-A100) comprising derived and/or modified sequence from LASV(LP;Clade I)__AAF86702__SP-HsPLAT_NP(2-569) (opt5)
aggagagucccgcagucggcguccagcggcucugcuuguucgugugugugucguugcaggccuuauucaagcuuaccauggacgccaugaagagaggccugugcugugugcuccugcuuugcggggcugucuucguuagccccagcaacuccaaggagaucaaaucuuuccuguggacccagagccucagacgggaacuguccggcuacugcucuaauauuaagcuccaaguggucaaagacgcccaggcucugcuccacgggcuggauuuuagcgagguuuccaacgugcagcgccuuaugagaaagcagaaacgggacgaugccgaccugaagcgccucagagaucugaaucaagcggugaacaaucuggucgaacucaagucuacacagcagaaaaacgugcugcggguuggaacgcuuagcuccgacgaucugaucacccucgcugccgaccuggagaaacuuaaaagcaaggugauucgcacagaaagaccccugucuuccggcgucuauauggggaaucucagcucucagcaacuggaucagcggcgcgcccugcucuccaugaucggaaugagcggcgggccucagggaaacagaaccggcggcgacggggugguucgggugugggaugucaaaaaugcugagcugcuuaacaaucaguucggaacaaugccgucucugacccucgccugucugacaaagcaaggccagguggaccuuaacgaugcugugcaggcccugaccgaccucgggcugauuuacacggcgaaguaucccaauuccagcgaccuggauaugcucacccaaucccauccuauccugggaauggucgacacaaagaagucuagccuuaacaucuccggcuacaauuuuagccugggggccgcuguuaaagccggagcuugcaugcucgauggcggcaacaugcuggagaccauuaaggugucuccccagacaauggacgggauccuuaaauccauucugaaggugaaacgcagccucggaauguucaucucugauaccccuggcgaaagaaaccccuaugagaauauucuguacaagaucugucugagcggggaaggauggccuuauauugccucccggacgucuaucacaggccgcgcgugggagaacacccucgucgaccuggagagcgauaauaagccgcccaaacuuaacuccgccgggagcaauaagucucugcaggcugccggacucaacgcuggccugacauacucccagcugaugacccuuaaagacugcaugcuccaacuggauccuagcucuaagaccuggaucgacauugaaggcagacccgaggauccuguggaaaucgcccuguuucagcccuccagcggguguuacauucacuucuuucgggagccgacagaccucaaacaguucaagcaggacgccaaguauucccauggaaucgauguuacggaccuguuuucuacccaaccuggccuuacaagcgcugugauugaagcgcugcccagaaauaugguccuuaccugccagggguccgaugacaucaaaaagcugcuggagucucagggacgccgggauaucaaacuuauugacaucagccucuccaaggccgauagcagaaaauucgagaacgcugugugggaccaguacaaggaucugugucacaugcauacaggcguuguggucgaaaagaaaaagcgcgggggcaaagaggaaauuaccccucacugcgcccugcucgacuguaucauguuugaugccgcuacgacaggaucucugaauauuaccacccuucgggccgugcugcccagagacauggucuuccgcacauccacccccaaggugguucucugaggacuaguaauaaggaaacuguaugaaugucugugggcaggaagugaagagauccuucuguaaagguuuuuggaauuaugucugcugaauaauaaacuuuuuugaaauaauaaaucugguagaaaaaugagaucucaaaggcucuuuucagagccaccaaaaaaaaaaaaaaaaaaaaaaaaaaaaaaaaaaaaaaaaaaaaaaaaaaaaaaaaaaaaaaaaaaaaaaaaaaaaaaaaaaaaaaaaaaaaaaaaaaaaa

SEQ ID NO: 18888 - RNA, 2109 nt, Artificial Sequence
  mRNA product Design b-4 (hSL-A100) comprising derived and/or modified sequence from LASV(803213;Clade II)__AAF86704__SP-HsPLAT_NP(2-569) (opt5)
aggagagucccgcagucggcguccagcggcucugcuuguucgugugugugucguugcaggccuuauucaagcuuaccauggacgccaugaagagaggccugugcugugugcuccugcuuugcggggcugucuucguuagccccagcgccuccaaggaggugaaaucuuuccuguggacccagagccucagacgggaacuguccggcuacugcucuaacaucaaacuucaagucguuaaggacgcucaggcccugcuccacgggcuggauuuuagcgaggugaauaacgugcagcgccuuaugagaaagcagaaacgggacgauggagaccugaagcgccucagagaucugaaucaagcggucaacaaucugguggaacucaaguccacacagcagaaaucuauucugcggguuggcacgcuuaccagcgacgaucugcucacacuggcugccgaccuugagaagcugaaauccaaggugauccgcaccgaaagaccccucagcucuggggucuauaugggaaaccuguccacacagcaacuggagcagcggcgcgcccuccugaauaugauuggcauggugggaggagcucagggcacccagccuggcagagaugggguugugcgggucugggacgugaaaaacccggaucuucugaauaaccaauucggaacaaugcccagccucacccuggccugucuuacgaagcagggccagguggaccugaaugaugcuguccucgcccugaccgaccuggggcucaucuacacagcgaaguauccuaacucuuccgaccuggaucgccuuagccaaucucaucccauucugaauaugguugacaccaaaaaguccagccucaacaucuccggauacaauuuuucucugggcgccgcugugaaagccggggcuugcaugcuugauggaggcaacaugcuggagacaaucaaggugaccccucagacgauggacggcauucucaaaagcauccugaaggucaaaagaucccuggggauguucgugagcgauacacccggagaacggaacccuuaugagaauauucucuacaagaucugucugucuggcgacggguggccguauauugccucccgcaccagcaucguugggagagcgugggaaaacacaaccguggaucuugagucugacggcaagccccagaaagucgggaccgccggaagcaauaagucccugcagucugcuggcuuuccuacaggccucacguacagccaacugaugacccugaaagauuccaugaugcagcuugaccccagcgccaagacauggauugauaucgaggggcggccugaagaccccguggagaucgcucucuaccagccgaugucuggaugcuauauucacuucuuuagagaaccuaccgaccugaaacaguucaagcaagaugccaaguacucccauggcaucgacguugccgaucuguuucccgcucagccugggcucacaagcgcggugauugaggcccugccccgcaacaugguccuuaccugucagggaucugacgauaucaaaaagcugcucgacucccagggccggagagauauuaaacugaucgacaucagccuguccaagguggauucucgcaaauucgaaaaugcugucugggaccaaugcaaggaucuuugucacaugcauacgggggugguuguggagaagaaaaagcggggcggaaaagaggaaauuacaccccacugcgcccucauggacuguaucauguuugaugccgcugucagcggcgggcugaacauuccugugcugagagccguucucccgcgcgacaugguguuccggaccuccucucccaaggucgugcugugaggacuaguaauaaggaaacuguaugaaugucugugggcaggaagugaagagauccuucuguaaagguuuuuggaauuaugucugcugaauaauaaacuuuuuugaaauaauaaaucugguagaaaaaugagaucucaaaggcucuuuucagagccaccaaaaaaaaaaaaaaaaaaaaaaaaaaaaaaaaaaaaaaaaaaaaaaaaaaaaaaaaaaaaaaaaaaaaaaaaaaaaaaaaaaaaaaaaaaaaaaaaaaaaa

SEQ ID NO: 18889 - RNA, 2112 nt, Artificial Sequence
  mRNA product Design b-4 (hSL-A100) comprising derived and/or modified sequence from LASV(GA391;Clade III)__CAA36646__SP-HsPLAT_NP(2-570) (opt5)
aggagagucccgcagucggcguccagcggcucugcuuguucgugugugugucguugcaggccuuauucaagcuuaccauggacgccaugaagagaggccugugcugugugcuccugcuuugcggggcugucuucguuagccccagcgccuccaaggaggugagaucuuuccuguggacccagagccuccggcgcgaacuguccggcuacugcucuaacaucaaacuucaagucguuaaggacgcucaggcccugcuccacgggcuggauuuuagcgagguguccaaugugcagagacuuaugcggaaacagaagcgcgacgauggagaccugaaaagacuccgggaucugaaccaagcggucaauaaccugguggaacucaagucuacacagcagaaaagcguucugcgcgugggcacgcuuuccagcgacgaucugcucauucuggcugccgaccuugagaaacugaagucuaaagucaccagaacagaacggccccucuccagcgggguguauaugggaaaucugucuucccagcaacuggaucagcgcagagcccuccugaacaugaucggcaugaccgggguuagcggaggcggcaagggggcuucugacggaauugugcgggucugggaugugaaaaaugccgagcuucugaacaaucaguucggcacaaugccuucccucacccuggcuugucuuacaaagcaggggcaaguggaccugaacgaugccguccaggcgcucaccgaccugggacugaucuacacggccaaguauccgaauagcuccgaccucgaucgccugucucagagccaucccauucuuaacaugaucgacaccaaaaaguccagccugaauaucucuggcuacaacuuuucccucggggcugccguuaaagcuggagccugcaugcuggauggcggcaauaugcuugagacaauuaaggugagcccucaaaccauggacgggauccugaaaucuauucucaaggugaaaaagagccugggaauguucgucuccgauacacccggcgaaagaaacccuuaugagaacauccuguacaagauuugucucucuggggacggauggcccuauaucgcgagccggaccuccauugugggccgcgccugggaaaauacgguuguggaucuggagcaggacaacaaaccucagaagaucgggaauggaggcagcaacaaaucucuucaguccgcuggcuuugccgcugggcugacauacagccaacucaugacccugaaggauuucaaaugcuuuaaucugaucccgaacgccaagacauggauggacauugagggaagacccgaagauccugucgagaucgcccuuuaccagcccucuuccggcuguuaugugcacuucuuucgggaaccuaccgaccucaagcaguucaaacaggacgcuaaguacagccaugggauugauguuaccgaccuguuugcggcccaacccggacugacauccgcugugaucgaggcccucccgagaaauauggucauuacgugccagggcucugaagauauccgcaaacugcuugagagccaggggcggagagacaucaagcugauugauaucacccucuccaaagccgacucucgcaaguucgagaacgcugugugggaucaguuuaaggaccugugucacaugcauacaggcgucgugguugaaaagaagaaacggggaggcaaggaggaaauuaccccucacugcgcccugauggauuguaucauguucgacgcggcugugagcgggggacuugaugccaaaguccucagagugguucugccccgcgacaugguguuccggacauccaccccuaaggucgugcugugaggacuaguaauaaggaaacuguaugaaugucugugggcaggaagugaagagauccuucuguaaagguuuuuggaauuaugucugcugaauaauaaacuuuuuugaaauaauaaaucugguagaaaaaugagaucucaaaggcucuuuucagagccaccaaaaaaaaaaaaaaaaaaaaaaaaaaaaaaaaaaaaaaaaaaaaaaaaaaaaaaaaaaaaaaaaaaaaaaaaaaaaaaaaaaaaaaaaaaaaaaaaaaaaa

SEQ ID NO: 18890 - RNA, 2109 nt, Artificial Sequence
  mRNA product Design b-4 (hSL-A100) comprising derived and/or modified sequence from LASV(AV;Clade V)__CCA30315__SP-HsPLAT_NP(2-569) (opt5)
aggagagucccgcagucggcguccagcggcucugcuuguucgugugugugucguugcaggccuuauucaagcuuaccauggacgccaugaagagaggccugugcugugugcuccugcuuugcggggcugucuucguuagccccagcgccuccaaggaggugaaaucuuuccuguggacccagagccucagacgggaacuguccggcuacugcucuaacaucaaacuucaagucguuaaggacgcucaggcccugcuccacgggcuggauuuuagcgagguguccaaugugcagcgccuuaugagaaagcagcggcgcgacgauucugaccugaaaagacuccgggaucugaaccaagcggucaauaaccugguggaacucaagagcacacagcagaaguccguucugcgcgugggaacgcuuagcucugacgaucugcucacccuggcugccgaccuugagaaacugaaguccaaagucacaagaaccgaacggccccucagcucuggcguguauauggggaaucuguccagccagcaacuggaucagcgcagagcccuccugaaccuuauuggaaugacaaauggcucucaggggucccaggcuggacgggacggcguugugcgcgucugggaugugaagaacgccgagcugcucaauaaccaauucggcaccaugccuagccugacacuugcuugucugaccaaacagggacagguggaccucaaugaugucguucaagcccugacggaccuggggcucaucuacaccgcgaaguauccgaacacauccgaccuggauagacuuacccagucucaucccauucugaauaugaucgacacaaagaaaagcucccucaacauuagcggcuacaauuuuucucugggggccgcugugaaggccggagcuugcaugcuugauggcgggaacaugcuggagaccaucaaaguguccccucagagcauggacggaauccucaagucuauucugaaagucaagcgggcccugggcauguucgugagcgauacgcccggcgaacgcaacccuuaugagaauauccucuacaaaauuugucuguccggggacggauggcccuauaucgcgucuagaacaagcauuguuggccgggccugggaaaacaccguggucgaucuugagacagacgggaagccucagaagaucggauccggcaauagcaacaaaucucugcaauccgcuggguuuagcgccggacucaccuacucucagcugaugacccugaaggaugcuaugcuucagcucgacccgaaugccaaaacauggauggauauugagggcagacccgaagacccuguggagguugcccuguaccagcccaucuccggcugcuauauccacuucuuucgcgaaccuacggaccugaagcaauucaaacaggaugcuaaguacagccaugggauugacaucgcggaucucuuugccgcucagcccggacugaccuccgccgugauugaggcccuuccgcggaacauggucaucacaugucagggcucugaagacauuaagaaacugcucgagagccaagggagaaaggauaucaaacugaucgacauugcucuguccaagaucgauucucgcaaauucgagaaugccgugugggaccaguauaaggaucuuugccacaugcauaccggagucgugguugaaaagaaaaagcggggcgggaaagaggaaauuacaccucacugugcgcucauggacugcaucauguuugaugcugccgugagcggcggacugaacacccugguccucagagccgugcugccccgcgacaugguuuuccggacguccacaccuagagugguccuuugaggacuaguaauaaggaaacuguaugaaugucugugggcaggaagugaagagauccuucuguaaagguuuuuggaauuaugucugcugaauaauaaacuuuuuugaaauaauaaaucugguagaaaaaugagaucucaaaggcucuuuucagagccaccaaaaaaaaaaaaaaaaaaaaaaaaaaaaaaaaaaaaaaaaaaaaaaaaaaaaaaaaaaaaaaaaaaaaaaaaaaaaaaaaaaaaaaaaaaaaaaaaaaaaa

SEQ ID NO: 18891 - RNA, 2109 nt, Artificial Sequence
  mRNA product Design b-4 (hSL-A100) comprising derived and/or modified sequence from LASV(Togo/2016/7082;Clade VI)__AMR44578__SP-HsPLAT_NP(2-569) (opt5)
aggagagucccgcagucggcguccagcggcucugcuuguucgugugugugucguugcaggccuuauucaagcuuaccauggacgccaugaagagaggccugugcugugugcuccugcuuugcggggcugucuucguuagccccagcaacuccaaggaggugaaaucuuuccuguggacccagagccucagacgggaacuguccggcuacugcucuaauaucaaacuucaagucguuaaagacgcccaggcucugcuccacgggcuggauuuuagcgagguguccaacgugcagcgccuuaugagaaagcagaaacgggacgauggagaccugaagcgccucagagaucugaaucaagccgucaacaaucugguggaacucaagucuguucagcagaaaagcauucugcgggugggcacacuuacguccgacgaucugcucacccuggcggcugaccuugagaagcugaaaagcaaggucacacgcaccgaaagaccccucucuuccgggguguauaugggaaaccugagcucucagcaacuggaucagcggcgcgcccuccuguccaugaucggcaugagcgggggaaaucagaacucucagccuaaaggcgacggcguugugagagucugggaugugaagaaugccgaccuucugaacaaucaauucgggacaaugccgucccucacccuggcuugucuuacaaagcagggacagguggaucugaacgacgccguccaagcucucaccgaccugggccugauuuacacggccaaauaucccaauagcuccgaucucgaccggcugucucagagccauccuauccuuaacaugauugauaccaagaaauccagccugaauaucucuggguacaacuuuucccucggagcggccaucaagacaggcgcuugcaugcuggacgggggaaacaugcuugagaccauuaaaguuacaccccagaccauggauggcauccucaagagcauucugaaagugaagcgcucucugggcauguucaucagcgacacgccuggggagagaaaucccuaugaaaacauucuguacaagaucugucucuccggagauggcuggccuuauauugccucucggacagcuaucaucgggcgcgccugggagaauaccguggucgaccuggaaagcgauuccaaaccgcagaagauuggaagcaacggcucuaauaaaucccuucaaagcgcgggguuugcccccggacugacauacucucagcucaugacccugaaggacuccaugcugcagcuugauccuaacgcuaaaaccuggaucgacauugagggcagacccgaggacccuguggaaguugcccucuuccagcccaucagcggcugcuacauucacuuuuuccgggagccgacagaucugaagcaauuuaagcaggacgcuaaauauucccaugggaucgaugugacggaccuguucgccgcccagccuggacucaccucugcugucaucgaagcgcugcccagaaauauggugcuuacaugucagggcagcgaugacauuaagaaacugcucgauucccaagggcgccgggacaucaagcugauugauguuucucugaacaaaaucgacagcagaaaguuugagaaugccgugugggaucaguacaaggaccuuugccacaugcauaccggagucguggucgaaaagaagaaaaagggcgggaaagaggagauuacaccucacugugcucuccuggauugcaucauguucgacgccgccguguccggcggacugaacgcuaccguucuccgcgccgugcugccccgggacauggucuuuagaacgagcucucccaaggugguucuuugaggacuaguaauaaggaaacuguaugaaugucugugggcaggaagugaagagauccuucuguaaagguuuuuggaauuaugucugcugaauaauaaacuuuuuugaaauaauaaaucugguagaaaaaugagaucucaaaggcucuuuucagagccaccaaaaaaaaaaaaaaaaaaaaaaaaaaaaaaaaaaaaaaaaaaaaaaaaaaaaaaaaaaaaaaaaaaaaaaaaaaaaaaaaaaaaaaaaaaaaaaaaaaaaa

SEQ ID NO: 18892 - RNA, 2109 nt, Artificial Sequence
  mRNA product Design b-4 (hSL-A100) comprising derived and/or modified sequence from LASV(KAK-428;Clade n.d. (VII))__ANH09741__SP-HsPLAT_NP(2-569) (opt5)
aggagagucccgcagucggcguccagcggcucugcuuguucgugugugugucguugcaggccuuauucaagcuuaccauggacgccaugaagagaggccugugcugugugcuccugcuuugcggggcugucuucguuagccccagcaacuccaaggaggugaaaucuuuccuguggacccagagccucagacgggaacuguccggcuacugcacaaauaucaaacuucaagucguuaaggacgcccaggcucugcuccacgggcuggauuuuucugaggugagcaacgugcagcgccuuaugagaaagcagaaacgggacgauaaugaccugaagcgccucagagaucugaaccaagccgucaauaaccugguggaacucaaguccguucagcagaaaucugugcugaaggucggaacgcuuaauagcgacgaucugcucacccuggcggcugaccuugagaaacugaaguccaaagugguucggacagaacgcccccucagcucuggcguguauauggggaaccuguccagccagcaacuggaucagagacgggcccuccugaauaugauuggaauggccggcgggucucagggaaaccagccuucccgcgacggcgucgugagagugugggaugucaagaaugcugaccuucugaacaaucaauucggcaccaugccgagccucacacuggccugucuuaccaagcaggggcagguugaucugaacgacguggugcucgcucugacagaccugggacucaucuacaccgccaaauaucccaauucuuccgaucuggaccggcuuagccaaaaccauccuguccugaacaugauugaugugaauaaguccucucucaacaucagcggcuacaauuuuucccugggggcggccguuaaagcuggagccugcaugcuugacggcgggaacaugcuggagacgauuaagaucagcccccagaccguggauggaauccucaaaucuauucugaaggucaaacgcgcucugggcauguucguguccgacacaccuggcgagagaaaucccuaugaaaacauccucuacaagguuugucugagcgggaauggauggccuuauauugccucucggaccagcaucgugggccgcgcgugggagaacacagucguggaucuugaauccaauaagaaccagccgaaagucgggaauaacggaucuaauaagaugcugcagagcuccggcuuugccaccgggcucacguacagccaacugaugacacugagagacucuaugcuucagcucgaucccaccgcuaaaacauggauugacaucgagggacggccugaggaucccguggaacuggcccuguuccagccuuccagcggcugcuacauucacuuuuucagagagcccaccgaccucaagcaguuuaaacaagacgcuaaguauucucauggcaucgauguuaacgaccuguucuccgcccagccggggcuuaccagcgccgugcuggaagcucucccucgcaauaugguccugacaugucagggauccgaugacauccggaagcugcuugauucucaggacagaaaagauauuaagcucaucgacauuagccuguccaaagcggaugcccgcaaguuugagaacgacgugugggaucaauucaaagaccugugccacaugcauacgggcaucguuguggaaaagaagaaaaagggagggaaacaggagaugacaccccacugugcucuccuggauugcauuauguuugacgccgccgucucuggcgggcuuaacgugccuacccugcgggcugugcuccccaccgacaugguuuucagaacaaucaccacgaaggucgugcugugaggacuaguaauaaggaaacuguaugaaugucugugggcaggaagugaagagauccuucuguaaagguuuuuggaauuaugucugcugaauaauaaacuuuuuugaaauaauaaaucugguagaaaaaugagaucucaaaggcucuuuucagagccaccaaaaaaaaaaaaaaaaaaaaaaaaaaaaaaaaaaaaaaaaaaaaaaaaaaaaaaaaaaaaaaaaaaaaaaaaaaaaaaaaaaaaaaaaaaaaaaaaaaaaa

SEQ ID NO: 18893 - RNA, 2109 nt, Artificial Sequence; identical to SEQ ID NO: 18887
  mRNA product Design b-4 (hSL-A100) comprising derived and/or modified sequence from LASV(Pinneo-NIG-1969;Clade I)__AIT17837__SP-HsPLAT_NP(2-569) (opt5)

SEQ ID NO: 18894 - RNA, 2109 nt, Artificial Sequence
  mRNA product Design b-4 (hSL-A100) comprising derived and/or modified sequence from LASV(ISTH0009-NIG-2011;Clade II)__AIT17405__SP-HsPLAT_NP(2-569) (opt5)
aggagagucccgcagucggcguccagcggcucugcuuguucgugugugugucguugcaggccuuauucaagcuuaccauggacgccaugaagagaggccugugcugugugcuccugcuuugcggggcugucuucguuagccccagcguguccaaggaggucaaaucuuuccuguggacccagagccucagacgggaacuguccggcuacugcucuaacaucaaacuucaaguugugaaggacgcccaggcucugcuccacgggcuggauuuuagcgagguguccaauguccagcgccuuaugagaaagcagaaacgggacgauucugaccugaagcgccucagagaucugaaccaagccgugaauaaccugguugaacucaagagcacacagcagaaauccauucugcgggugggaacgcuuaccagcgacgaucugcucacacuggcggcugaccuugagaagcugaaaucuaaggucauccgcaccgaaagaccccucuccagcggcguguauauggggaaucugucuacacagcaacuggagcagcggcgcgcccuccugaacaugauuggaaugguuggcggggcccagggaacccagccuggcagagauggcgugguccgggugugggacgugaaaaauccggaucuucugaacaaucaauucgggacaaugcccucccucacccuggcuugucuuacgaagcagggacaggucgaccugaacgaugccguucucgcucugaccgaccugggccucaucuacacagccaaguauccuaauagcucugaccuggaucgccuuucccaaagccaucccauucugaacaugguggacaucaaaaaguccucucucaauaucagcggguacaacuuuucccugggagcggccgugaaagcuggcgccugcaugcuugaugggggaaauaugcuggagaccauuaaggucacaccucagaccauggacggcauccucaaaagcauucugaaggugaaaagaucucugggcauguucguuuccgauacgcccggggaacggaacccuuaugagaacauccucuacaagauuugucugagcggagacggcuggccguauaucgcuucucgcacaagcauuguggggagagccugggaaaauaccacagucgaucuugaguccgacggaaagccccagaaagugggcucugcggggagcaacaagucccugcagagcgccggauuuccuaccggccucaccuacucucaacugaugacacugaaagauuccaugaugcagcuugaccccagcgcuaagacguggaucgauaucgagggccggccugaagaccccguugagauugcccucuaccagccgaugucugggugcuauauccacuucuuuagagaaccuaccgaccugaaacaguucaagcaagaugcuaaguacucccauggaauugacguggccgaucuguuucccgcccagccuggccucacaagcgcugucaucgaggcgcugccccgcaauauggugcuuaccugucagggguccgacgauauuaaacggcugcucgacucucagggaagacgcgauaucaagcugaucgacauugcccugagcaaagcugauucccggagauucgaaaacgccgucugggaccaaugcaaggaucuuugucacaugcauacaggcgugguuguggagaaaaagaagcgcgggggcaaagaggaaaucacgccccacugcgcccucauggacuguauuauguaugaugcugccgucucuggaggccugaauaucccugugcugcgggcgguucucccgagagacaugguguuucgcaccagcucccccaaggucgugcugugaggacuaguaauaaggaaacuguaugaaugucugugggcaggaagugaagagauccuucuguaaagguuuuuggaauuaugucugcugaauaauaaacuuuuuugaaauaauaaaucugguagaaaaaugagaucucaaaggcucuuuucagagccaccaaaaaaaaaaaaaaaaaaaaaaaaaaaaaaaaaaaaaaaaaaaaaaaaaaaaaaaaaaaaaaaaaaaaaaaaaaaaaaaaaaaaaaaaaaaaaaaaaaaaa

SEQ ID NO: 18895 - RNA, 2109 nt, Artificial Sequence
  mRNA product Design b-4 (hSL-A100) comprising derived and/or modified sequence from LASV(ISTH2010-NIG-2012;Clade II)__AIT17483__SP-HsPLAT_NP(2-569) (opt5)
aggagagucccgcagucggcguccagcggcucugcuuguucgugugugugucguugcaggccuuauucaagcuuaccauggacgccaugaagagaggccugugcugugugcuccugcuuugcggggcugucuucguuagccccagcgccuccaaggaggugaaaucuuuccuguggacccagagccucagacgggaacuguccggcuacugcucuaacaucaaacuucaagucguuaaggacgcucaggcccugcuccacgggcuggauuuuagcgagguguccaaugugcagcgccuuaugagaaagcagaaacgggacgauucugaccugaagcgccucagagaucugaaccaagcggucaauaaccugguggaacucaagagcacacagcagaaauccauucugcggguuggaacgcuuaccagcgacgaucugcucacacuggcugccgaccuugagaagcugaaaucuaaggugauccgcaccgaaagaccccucuccagcggcgucuauauggggaaucugucuacacagcaacuggagcagcggcgcgcccuccugaaccuuauuggaauggugggcggggcucagggaacccagccuggcagagauggcguugugcgggucugggacgugaaaaauccggaucugcucaacaaucaauucgggacaaugcccucccugacccuugccugucugacgaagcagggacagguggaccucaacgaugcuguccuggcccugaccgaccucggccugaucuacacagcgaaguauccuaauagcucugaccuugaucgccugucccaaagccaucccauucucaacaugguugacaccaaaaaguccucucugaauaucagcggguuuaacuucucccuuggagccgcugugaaagccggcgcuugcaugcuggaugggggaaauaugcucgagacaaucaaggugaccccucagacgauggacggcauucugaaaagcauccugaaggucaaaaagucucucggcauguuuguguccgauacacccggggaaagaaacccuuacgagaacauucuguauaagaucugucuuagcggagacggcuggccguacauugccucucggaccagcaucguugggcgcgcgugggaaaauacaaccguggaucuggaguccgacggaaaaccccacaaggucggcaccgccgggucuaacaaaagccuccaguccgcuggauucccuacaggccugacguauagccagcugaugacccuuaaggauucuaugaugcaacucgaccccuccgccaaaacauggauugauaucgagggcagaccugaagaccccguggagaucgcucuguaccagccgaugagcgggugcuacauucacuuuuuccgggaaccuaccgaccugaagcaguuuaagcaggaugccaaauauucucauggaaucgacguugccgaucucuuccccgcucaaccuggccugacauccgcggugauugaggcccuucccagaaauaugguccugaccugucaggggagcgacgauaucaagcgccuccuggacucccagggacggagagauauuaaacugaucgacaucgcucuuucuaaggccgauagccgccgguuugaaaacgccgugugggaccagugcaaagaucucugucauaugcacacgggcgucgugguugagaagaagaaaagagggggcaaggaggaaauuacaccccacugcgcucugauggacuguaucauguacgaugccgcgguguccggaggccugaauauuccuguccuccgcgcugugcugccgcgggacaugguuuucagaaccucuagccccaaagugguccuuugaggacuaguaauaaggaaacuguaugaaugucugugggcaggaagugaagagauccuucuguaaagguuuuuggaauuaugucugcugaauaauaaacuuuuuugaaauaauaaaucugguagaaaaaugagaucucaaaggcucuuuucagagccaccaaaaaaaaaaaaaaaaaaaaaaaaaaaaaaaaaaaaaaaaaaaaaaaaaaaaaaaaaaaaaaaaaaaaaaaaaaaaaaaaaaaaaaaaaaaaaaaaaaaaa

SEQ ID NO: 18896 - RNA, 2109 nt, Artificial Sequence
  mRNA product Design b-4 (hSL-A100) comprising derived and/or modified sequence from LASV(Lassa virus/H.sapiens-wt/NGA/2015/ISTH_0543;Clade II)__AVO03640__SP-HsPLAT_NP(2-569) (opt5)
aggagagucccgcagucggcguccagcggcucugcuuguucgugugugugucguugcaggccuuauucaagcuuaccauggacgccaugaagagaggccugugcugugugcuccugcuuugcggggcugucuucguuagccccagcgccuccaaggaggugaaaucuuuccuguggacccagagccucagacgggaacuguccggcuacugcucuaacaucaaacuucaagucguuaaggacgcucaggcccugcuccacgggcuggauuuuagcgagguguccaaugugcagcgccuuaugagaaagcagaaacgggacgauucugaccugaagcgccucagagaucugaaccaagcggucaauaaccugguggaacucaagagcacacagcagaaauccauucugcggguuggaacgcuuaccagcgacgaucugcucacacuggcugccgaccuugagaagcugaaaucuaaggugauccgcaccgaaagaccccucuccagcggcgucuauauggggaaucugucuacacagcaacuggagcagcggcgcgcccuccugaacaugauuggaauggugggcggggcucagggaacccagccuggcagagauggcguugugcgggucugggacgugaaaaauccggaucuucugaacaaucaauucgggacaaugcccucccucacccuggccugucuuacgaagcagggacagguggaccugaacgaugcuguccucgcccugaccgaccugggccucaucuacacagcgaaguauccuaauagcucugaccuggaucgccuuucccaaagccaucccauucugaacaugguugacaccaaaaaguccucucucaauaucagcggguacaacuuuucccugggagccgcugugaaagccggcgcuugcaugcuugaugggggaaauaugcuggagacaaucaaggugaccccucagacgauggacggcauucucaaaagcauccugaaggucaaaaagucucugggcauguucguguccgauacacccggggaaagaaacccuuaugagaacauucucuacaagaucugucugagcggagacggcuggccguauauugccucucggaccagcaucguugggcgcgcgugggaaaauacaaccguggaucuugaguccgacggaaaaccccagaaggucggcucugccgggagcaacaaaucccugcagagcgcuggauuuccuaccggccucacauacucucaacugaugacgcugaaggauuccaugaugcagcuugaccccagcgccaaaaccuggauugauaucgagggcagaccugaagaccccguggagaucgcucucuaccagccgaugucugggugcuauauucacuucuuucgggaaccuacagaccugaagcaguucaagcaagaugccaaauacucccauggaaucgacguugccgaucuguuucccgcucagccuggccucaccagcgcggugauugaggcccugcccagaaauaugguccuuacaugucagggguccgacgauaucaagcgccugcucgacucucagggacggaaagauauuaagcugaucgacaucgcucugagcaaagccgauuccagacgcuucgaaaacgccgugugggaccaaugcaaggaucuuugucacaugcauaccggcgucgugguugagaagaaaaagagagggggcaaagaggaaauuacgccccacugcgcucucauggacuguaucauguaugaugccgcggugucuggaggccugaauauuccuguccugcgggcugugcucccgcgcgacaugguuuuucggacaagcucccccaaggugguccugugaggacuaguaauaaggaaacuguaugaaugucugugggcaggaagugaagagauccuucuguaaagguuuuuggaauuaugucugcugaauaauaaacuuuuuugaaauaauaaaucugguagaaaaaugagaucucaaaggcucuuuucagagccaccaaaaaaaaaaaaaaaaaaaaaaaaaaaaaaaaaaaaaaaaaaaaaaaaaaaaaaaaaaaaaaaaaaaaaaaaaaaaaaaaaaaaaaaaaaaaaaaaaaaaa

SEQ ID NO: 18897 - RNA, 2109 nt, Artificial Sequence
  mRNA product Design b-4 (hSL-A100) comprising derived and/or modified sequence from LASV(Lassa virus/H.sapiens-wt/NGA/2016/ISTH_0009;Clade II)__AVO03572__SP-HsPLAT_NP(2-569) (opt5)
aggagagucccgcagucggcguccagcggcucugcuuguucgugugugugucguugcaggccuuauucaagcuuaccauggacgccaugaagagaggccugugcugugugcuccugcuuugcggggcugucuucguuagccccagcgccuccaaggaggugaaaucuuuccuguggacccagagccucagacgggaacuguccggcuacugcucuaacaucaaacuucaagucguuaaggacgcucaggcccugcuccacgggcuggauuuuagcgagguguccaaugugcagcgccuuaugagaaagcagaaacgggacgauucugaccugaagcgccucagagaucugaaccaagcggucaauaaccugguggaacucaagagcacacagcagaaauccauucugcggguuggaacgcuuaccagcgacgaucugcucacacuggcugccgaccuugagaagcugaaaucuaaggugauccgcaccgaaagaccccucuccagcggcgucuauauggggaaucugucuacacagcaacuggagcagcggcgcgcccuccugaacaugauuggaauggugggcggggcucagggaacccagccuggcagagauggcguugugcgggucugggacgugaaaaauccggaucuucugaacaaucaauucgggacaaugcccucccucacccuggccugucuuacgaagcagggacagguggaccugaacgaugcuguccucgcccugaccgaccugggccucaucuacacagcgaaguauccuaauagcucugaccuggaucgccuuucccaaagccaucccauucugaacaugguugacaccaaaaaguccucucucaauaucagcggguacaacuuuucccugggagccgcugugaaagccggcgcuugcaugcuugaugggggaaauaugcuggagacaaucaaggugaccccucagacgauggacggcauucucaaaagcauccugaaggucaaaaagucucugggcauguucguguccgauacacccggggaaagaaacccuuaugagaacauucucuacaagaucugucugagcggagacggcuggccguauauugccucucggaccagcaucguugggcgcgcgugggaaaauacaaccguggaucuugaguccgacggaaaaccccagaaggucggcucugccgggagcaacaaaucccugcagagcgcuggauuuccuaccggccucacauacucucaacugaugacgcugaaggauuccaugaugcagcuugaccccagcgccaaaaccuggauugauaucgagggcagaccugaagaccccguggagaucgcucucuaccagccgaugucugggugcuauauucacuucuuucgggaaccuacagaccugaagcaguucaagcaagaugccaaauacucccauggaaucgacguugccgaucuguuucccgcucagccuggccucaccagcgcggugauugaggcccugcccagaaauaugguccuuacaugucagggguccgacgauaucaagcgccugcucgacucucagggacggagagauauuaaacugaucgacaucgcucugagcaaggccgauucccgccgguucgaaaacgccgugugggaccaaugcaaagaucuuugucacaugcauaccggcgucgugguugagaagaagaaaagagggggcaaggaggaaauuacgccccacugcgcucucauggacuguaucauguaugaugccgcggugucuggaggccugaauauuccuguccugcgcgcugugcucccgcgggacaugguuuuuagaacaagcucccccaaagugguccugugaggacuaguaauaaggaaacuguaugaaugucugugggcaggaagugaagagauccuucuguaaagguuuuuggaauuaugucugcugaauaauaaacuuuuuugaaauaauaaaucugguagaaaaaugagaucucaaaggcucuuuucagagccaccaaaaaaaaaaaaaaaaaaaaaaaaaaaaaaaaaaaaaaaaaaaaaaaaaaaaaaaaaaaaaaaaaaaaaaaaaaaaaaaaaaaaaaaaaaaaaaaaaaaaa

SEQ ID NO: 18898 - RNA, 2109 nt, Artificial Sequence
  mRNA product Design b-4 (hSL-A100) comprising derived and/or modified sequence from LASV(Lassa virus/H.sapiens-wt/NGA/2016/ISTH_0017;Clade II)__AVO03568__SP-HsPLAT_NP(2-569) (opt5)
aggagagucccgcagucggcguccagcggcucugcuuguucgugugugugucguugcaggccuuauucaagcuuaccauggacgccaugaagagaggccugugcugugugcuccugcuuugcggggcugucuucguuagccccagcgccuccaaggaggugaaaucuuuccuguggacccagagccucagacgggaacuguccggcuacugcucuagcaucaaacuucaagucguuaaggacgcucaggcccugcuccacgggcuggauuuuuccgaggugucuaacgugcagcgccuuaugagaaagcagaaacgggacgauagcgaccugaagcgccucagagaucugaaucaagcggucaacaaucugguggaacucaaguccacacagcagaaaagcauucugcggguuggaacgcuuaccucugacgaucugcucacacuggcugccgaccuugagaagcugaaauccaaggugauccgcaccgaaagaccccucagcucuggcgucuauauggggaaccuguccacacagcaacuggagcagcggcgcgcccuccugaauaugauuggaauggcuggcggggcccagggaacccagccuggcagagauggcgugguucgggugugggacgucaaaaacccggaucuucugaauaaccaauucgggacaaugcccagccucacccuggcuugucuuacgaagcagggacagguggaccugaaugaugccgugcucgcgcugaccgaccugggccucaucuacacagccaaguauccuaacucuuccgaccuggaucgccuuagccaaucccaucccauucugaauauggucgacaccaaaaagucuagccucaacaucuccggguacaauuuuagccugggagcugccguuaaagcuggcgccugcaugcuugaugggggaaacaugcuggagacaaucaaggugaccccucagacgauggacggcauucucaaaucuauccugaaggugaaaagaucccugggcauguucgucagcgaugcgcccggggaacggaauccuuaugagaacauucucuacaagaucugucugucuggagacggcuggccguauauugccagccgcacauccaucguggggagagcuugggaaaacaccacaguugaucuugagucugacggaaagccccagaaagugggcgccaccgggagcaauaagucccugcagagcgcuggauuuccuaccggccucacauacucucaacugaugacgcugaaagauuccaugaugcagcuugaccccagcgccaagaccuggauugauaucgagggccggccugaagaccccgucgagguggcccucuaccagccgguuucugggugcuauauccacuucuuuagagaaccuacagaccugaaacaguucaagcaagaugcuaaguacucccauggaauugacguggcggaucuguuucccgcccagccuggccucaccagcgcugucaucgaggcccugccccgcaacauggugcuuacaugucagggguccgacgauauuaaaaagcugcucgacucucagggacggaaagauaucaagcugauugacaucgcccugagcaaagcugauuccagacgcuucgaaaaugccgucugggaccaaugcaaggaucuuugucacaugcauaccggcgugguuguggagaagaaaaagagagggggcaaagaggaaaucacgccccacugcgcgcucauggacuguauuauguaugaugcugccgucucuggaggccugaacaucccugugcugcgggccguucucccgcgcgacaugguguuucggacaagcucccccaaggucgugcugugaggacuaguaauaaggaaacuguaugaaugucugugggcaggaagugaagagauccuucuguaaagguuuuuggaauuaugucugcugaauaauaaacuuuuuugaaauaauaaaucugguagaaaaaugagaucucaaaggcucuuuucagagccaccaaaaaaaaaaaaaaaaaaaaaaaaaaaaaaaaaaaaaaaaaaaaaaaaaaaaaaaaaaaaaaaaaaaaaaaaaaaaaaaaaaaaaaaaaaaaaaaaaaaaa

SEQ ID NO: 18899 - RNA, 2109 nt, Artificial Sequence
  mRNA product Design b-4 (hSL-A100) comprising derived and/or modified sequence from LASV(Lassa virus/H.sapiens-wt/NGA/2018/ISTH_0959;Clade II)__AVV65100__SP-HsPLAT_NP(2-569) (opt5)
aggagagucccgcagucggcguccagcggcucugcuuguucgugugugugucguugcaggccuuauucaagcuuaccauggacgccaugaagagaggccugugcugugugcuccugcuuugcggggcugucuucguuagccccagcgccuccaaggaggugaaaucuuuccuguggacccagagccucagacgggaacuguccggcuacugcucuaacaucaaacuucaagucguuaaggacgcucaggcccugcuccacgggcuggauuuuagcgagguguccaaugugcagcgccuuaugagaaagcagaaacgggacgauucugaccugaagcgccucagagaucugaaccaagcggucaauaaccugguggaacucaagagcacccagcagaaauccauucugcggguuggaacgcuuaccagcgacgaucugcucacacuggcugccgaccuugagaagcugaaaucuaaggugauccgcaccgaaagaccccucuccagcggcgucuauauggggaaucugucuacacagcaacuggagcagcggcgcgcccuccugaaccuuauuggaauggugggcggggcucagggaacccagccuggcagagauggcguugugcgggucugggacgugaaaaauccggaucugcucaacaaucaauucgggacaaugcccucccugacccuugccugucugacgaagcagggacagguggaccucaacgaugucguucuggcucugaccgaccucggccugaucuacacagccaaguauccuaauagcucugaccuugaucgccugucccaaagccaucccauucucaacaugguggacaccaaaaaguccucucugaauaucagcggguuuaacuucucccuuggagcggccgugaaagcuggcgccugcaugcuggaugggggaaauaugcucgagacaaucaaggucaccccucagacgauggacggcauucugaaaagcauccugaaggugaaaaagucucucggcauguuuguuuccgauacacccggggaaagaaacccuuacgagaacauucuguauaagaucugucuuagcggagacggcuggccguacauugcuucucggaccagcaucguggggcgcgccugggaaaauacaaccgucgaucuggaguccgacggaaaaccccacaaggugggcaccgcggggucuaacaaaagccuccaguccgccggauucccuacaggccugacguauagccagcugaugacccuuaaggauucuaugaugcaacucgaccccuccgcuaaaacauggauugauaucgagggcagaccugaagaccccguugagaucgcccuguaccagccgaugagcgggugcuacauucacuuuuuccgggaaccuaccgaccugaagcaguuuaagcaggaugcuaaauauucucauggaaucgacguggccgaucucuuccccgcccaaccuggccugacauccgcugucauugaggcgcuucccagaaauauggugcugaccugucaggggagcgacgauaucaagcgccuccuggacucccagggacggaaagauauuaagcugaucgacaucgcccuuucuaaaacggauagcagacgcuuugaaaacgcugucugggaccagugcaaggaucucugucauaugcacacaggcgugguuguggagaagaaaaagagagggggcaaagaggaaauuacaccccacugcgcccugauggacuguaucauguacgaugccgcugucuccggaggccugaauauuccugugcuccgggccguucugccgcgcgacaugguguuccggaccucuagccccaaggucgugcuuugaggacuaguaauaaggaaacuguaugaaugucugugggcaggaagugaagagauccuucuguaaagguuuuuggaauuaugucugcugaauaauaaacuuuuuugaaauaauaaaucugguagaaaaaugagaucucaaaggcucuuuucagagccaccaaaaaaaaaaaaaaaaaaaaaaaaaaaaaaaaaaaaaaaaaaaaaaaaaaaaaaaaaaaaaaaaaaaaaaaaaaaaaaaaaaaaaaaaaaaaaaaaaaaaa

SEQ ID NO: 18900 - RNA, 2109 nt, Artificial Sequence
  mRNA product Design b-4 (hSL-A100) comprising derived and/or modified sequence from LASV(LASV003-NIG-2008;Clade II)__AIT17581__SP-HsPLAT_NP(2-569) (opt5)
aggagagucccgcagucggcguccagcggcucugcuuguucgugugugugucguugcaggccuuauucaagcuuaccauggacgccaugaagagaggccugugcugugugcuccugcuuugcggggcugucuucguuagccccagcgccuccaaggaggugaaaucuuuccuguggacccagagccucagacgggaacuguccggcuacugcucuagcaucaaacuucaagucguuaaggacgcucaggcccugcuccacgggcuggauuuuuccgaggugucuaacgugcagcgccuuaugagaaagcagaaacgggacgauagcgaccugaagcgccucagagaucugaaucaagcggucaacaaucugguggaacucaaguccacccagcagaaaagcguucugcgggugggaacgcuuaccucugacgaucugcucacacuggcugccgaccuugagaagcugaaauccaaggucauucgcaccgaaagaccccucagcucuggcguguauauggggaaccuguccgcccagcaacuggagcagcggcgcacacuccugaauaugaucggaaugguuggcggggcucagggaacccagccuggcagagauggcgugguccgggugugggacgugaaaaacccggaucuucugaauaaccaauucgggacaaugcccagccucacccuggccugucuuacgaagcagggacaggucgaccugaaugauguugugcucgcucugaccgaccugggccucauuuacacagccaaguauccuaacucuuccgaccuggaucgccuuagccaaucccaucccauccugucuaugguggacaccaaaaagagcucccucaauauuagcggguacaacuuuucucugggagcggccgucaaagcuggcgccugcaugcuugaugggggaaauaugcuggagacaaucaaggugaccccucagacgauggacggcauccucaaauccauucugaagguuaaaaagagccugggcauguucgugucugauacacccggggaaagaaacccuuaugagaauauccucuacaagauuugucugagcggagacggcuggccguauaucgcuucccggaccucuauugucgggcgcgccugggaaaacacaaccguggaucuugagagcgacggaaaaccccagaagguuggcaccgcgggguccaacaaaagccugcagucugccggauuuccuacaggccucacguacucccaacugaugacccugaaggauagcaugaugcagcuugaccccucugcuaaaacauggaucgauauugagggcagaccugaagaccccguggagaucgcccucuaccagccgauguccgggugcuauauccacuucuuucgggaaccuaccgaccugaagcaguucaagcaagaugcuaaauacagccauggaauugacgucacagaucuguuucccgcccagccuggccucaccuccgccgugaucgaggcucugcccagaaauaugguccuuacgugucaggggucugacgauauuaagcgccugcucgacagccagggacggagagauaucaaacugauugacaucgcgcuguccaaggccgauucucgccgguucgaaaacgcugugugggaccaaugcaaagaucuuugucacaugcauacaggcguuguggucgagaagaagaaaagagggggcaaggaggaaaucacaccccacugcgcccucauggacuguauuauguaugaugccgcugugagcggaggccugaauaucccuguucugcgcgccgugcucccgcgggacauggucuuuagaaccuccagccccaaaguggugcugugaggacuaguaauaaggaaacuguaugaaugucugugggcaggaagugaagagauccuucuguaaagguuuuuggaauuaugucugcugaauaauaaacuuuuuugaaauaauaaaucugguagaaaaaugagaucucaaaggcucuuuucagagccaccaaaaaaaaaaaaaaaaaaaaaaaaaaaaaaaaaaaaaaaaaaaaaaaaaaaaaaaaaaaaaaaaaaaaaaaaaaaaaaaaaaaaaaaaaaaaaaaaaaaaa

SEQ ID NO: 18901 - RNA, 2109 nt, Artificial Sequence
  mRNA product Design b-4 (hSL-A100) comprising derived and/or modified sequence from LASV(LASV035-NIG-2009;Clade II)__AIT17589__SP-HsPLAT_NP(2-569) (opt5)
aggagagucccgcagucggcguccagcggcucugcuuguucgugugugugucguugcaggccuuauucaagcuuaccauggacgccaugaagagaggccugugcugugugcuccugcuuugcggggcugucuucguuagccccagcgccuccaaggaggugaaaucuuuccuguggacccagagccucagacgggaacuguccggcuacugcucuagcaucaaacuucaagucguuaaagacgcucaggcccugcuccacgggcuggauuuuuccgaggugucuaacgugcagcgccuuaugagaaagcagaaacgggacgauagcgaccugaagcgccucagagaucugaaucaagcggucaacaaucugguggaacucaaguccacacagcagaaaagcauucugcggguuggaacgcuuaccucugacgaucugcucacacuggcugccgaccuugagaagcugaaauccaaggugauccgcaccgaaagaccccucagcucuggcgucuauauggggaaccuguccgcccagcaacuggagcagcggcgcgcucuccugaauaugauuggaauggugggcggggcccagggaacacagccuggcagagauggcguugugcgggucugggacgugaaaaacccggaucuucugaauaaccaauucgggaccaugcccagccucacacuggcuugucuuaccaagcagggacagguggaccugaaugaugccguccucgcgcugacggaccugggccucaucuacaccgccaaguauccuaacucuuccgaccuggaucgccuuagccaaucccaucccauucugaauaugguugacacaaagaagucuagccucaacaucuccggguacaauuuuagccugggagcugccgugaaagcuggcgccugcaugcuugaugggggaaacaugcuggagaccaucaaggugacaccucagaccauggacggcauucucaaaucuauccugaaggucaaaagaucccugggcauguucgugagcgauacgcccggggaacggaauccuuaugagaacauucucuacaagaucugucugucuggagacggcuggccguauauugcgagccgcacauccaucguugggagagccugggaaaacaccacaguggaucuugagucugacggaaagccccagaaagucggcaccaccgggagcaauaagucccugcagagcgcuggauuuccuacaggccucacguacucucaacugaugacccugaaagauuccaugaugcagcuugaccccagcgccaagacauggauugauaucgagggccggccugaagaccccguggagaucgcucucuaccagccgaugucugggugcuauauucacuucuuuagagaaccuaccgaccugaaacaguucaagcaagaugccaaguacucccauggaaucgacguugccgaucuguuucccgcucagccuggccucacaagcgcggugauugaggcccugccccgcaacaugguccuuaccugucagggguccgacgauaucaaaaagcugcucgacucucagggacggagagauauuaaacugaucgacaucgcucugagcaaggccgauucccgcaaauucgaaaaugccgugugggaccaaugcaaggaucuuugucacaugcauacgggcgucgugguugagaagaaaaagagagggggcaaagaggaaauuacaccccacugcgcucucauggacuguaucauguaugaugccgcggugucuggaggccugaacauuccuguccugcgggcugugcucccgcgcgacaugguuuuucggaccagcucccccaaggugguccugugaggacuaguaauaaggaaacuguaugaaugucugugggcaggaagugaagagauccuucuguaaagguuuuuggaauuaugucugcugaauaauaaacuuuuuugaaauaauaaaucugguagaaaaaugagaucucaaaggcucuuuucagagccaccaaaaaaaaaaaaaaaaaaaaaaaaaaaaaaaaaaaaaaaaaaaaaaaaaaaaaaaaaaaaaaaaaaaaaaaaaaaaaaaaaaaaaaaaaaaaaaaaaaaaa

SEQ ID NO: 18902 - RNA, 2109 nt, Artificial Sequence
  mRNA product Design b-4 (hSL-A100) comprising derived and/or modified sequence from LASV(LASV1000-NIG-2009;Clade II)__AIT17783__SP-HsPLAT_NP(2-569) (opt5)
aggagagucccgcagucggcguccagcggcucugcuuguucgugugugugucguugcaggccuuauucaagcuuaccauggacgccaugaagagaggccugugcugugugcuccugcuuugcggggcugucuucguuagccccagcgccuccaaggaggugaaaucuuuccuguggacccagagccucagacgggaacuguccggcuacugcucuaacaucaaacuucaagucguuaaggacgcucaggcccugcuccacgggcuggauuuuagcgagguguccaaugugcagcgccuuaugagaaagcagaaacgggacgauucugaccugaagcgccucagagaucugaaccaagcggucaauaaccugguggaacucaagagcacacagcagaaauccauucugcggguuggaacgcuuaccagcgacgaucugcucacacuggcugccgaccuugagaagcugaaaucuaaggugauccgcaccgaaagaccccucuccagcggcgucuauauggggaaucugucuacacagcaacuggagcagcggcgcgcccuccugaacaugauuggaauggugggcggggcucagggaacccagccuggcagagauggcguugugcgggucugggacgugaaaaauccggaucuucugaacaaucaauucgggacaaugcccucccucacccuggccugucuuacgaagcagggacagguggaccugaacgaugucguucucgcucugaccgaccugggccucaucuacacagccaaguauccuaauagcucugaccuggaucgccuuucccaaagccaucccauucugaacaugguggacaccaaaaaguccucucucaauaucagcggguacaacuuuucccugggagcggccgugaaagcuggcgccugcaugcuugaugggggaaauaugcuggagacaaucaaggucaccccucagacgauggacggcauucucaaaagcauccugaaggugaaaaagucucugggcauguucguuuccgauacacccggggaaagaaacccuuaugagaacauucucuacaagaucugucugagcggagacggcuggccguauauugcuucucggaccagcaucguggggcgcgccugggaaaauacaaccgucgaucuugaguccgacggaaaaccccagaaggugggcaccgcggggucuaacaaaagccugcaguccgccggauuuccuacaggccucacguacagccaacugaugacccugaaggauucuaugaugcagcuugaccccuccgcuaaaacauggauugauaucgagggcagaccugaagaccccguugagaucgcccucuaccagccggugagcgggugcuauauucacuucuuucgggaaccuaccgaccugaagcaguucaagcaagaugcuaaauacucucauggaaucgacgucgccgaucuguuucccgcccagccuggccucacauccgcugugauugaggcgcugcccagaaauaugguccuuaccugucaggggagcgacgauaucaagcgccugcucgacucccagggacggagagauauuaaacugaucgacaucgcccugucuaaggcugauagccgccgguucgaaaacgccgugugggaccaaugcaaagaucuuugucacaugcauacgggcguuguggucgagaagaagaaaagagggggcaaggaggaaauuacaccccacugcgcccucauggacuguaucauguaugaugcugccguguccggaggccugaauauuccuguucugcgcgcggugcucccgcgggacauggucuuuagaaccucuagccccaaaguggugcugugaggacuaguaauaaggaaacuguaugaaugucugugggcaggaagugaagagauccuucuguaaagguuuuuggaauuaugucugcugaauaauaaacuuuuuugaaauaauaaaucugguagaaaaaugagaucucaaaggcucuuuucagagccaccaaaaaaaaaaaaaaaaaaaaaaaaaaaaaaaaaaaaaaaaaaaaaaaaaaaaaaaaaaaaaaaaaaaaaaaaaaaaaaaaaaaaaaaaaaaaaaaaaaaaa

SEQ ID NO: 18903 - RNA, 2109 nt, Artificial Sequence
  mRNA product Design b-4 (hSL-A100) comprising derived and/or modified sequence from LASV(LASV221-NIG-2010;Clade II)__AIT17625__SP-HsPLAT_NP(2-569) (opt5)
aggagagucccgcagucggcguccagcggcucugcuuguucgugugugugucguugcaggccuuauucaagcuuaccauggacgccaugaagagaggccugugcugugugcuccugcuuugcggggcugucuucguuagccccagcgccuccaaggaggugaaaucuuuccuguggacccagagccucagacgggaacuguccggcuacugcucuagcaucaaacuucaagucguuaaggacgcucaggcccugcuccacgggcuggauuuuuccgaggugucuaacgugcagcgccuuaugagaaagcagcggcgcgacgauagcgaccugaaaagacuccgggaucugaaucaagcggucaacaaucugguggaacucaaguccacacagcaaaagagcauucugcgcguuggaacgcuuaccucugacgaucugcucacacuggcugccgaccuugagaaacugaaguccaaagugaucagaaccgaacggccccucagcucuggcgucuauauggggaaccuguccacacagcagcuggagcagcgcagagcccuccugaauaugauuggaauggugggcggggcucagggaacccagccuggccgggauggcguugugcgcgucugggacgugaagaacccggaucuucugaauaaccaauucgggacaaugcccagccucacccuggccugucuuacgaaacagggacagguggaccugaaugaugcuguccucgcccugaccgaccugggccucaucuacacagcgaaguauccuaacucuuccgaccuggauagacuuagccaaucccaucccauucugaauaugguugacaccaagaaaucuagccucaacaucuccggguacaauuuuagccugggagccgcugugaaggccggcgcuugcaugcuugaugggggaaacaugcuggagacaaucaaagugaccccucagacggucgacggcauucucaagucuauccugaaagugaagcggucccugggcauguucguuagcgauacacccggggaacgcaauccuuaugagaacauucucuacaaaaucugucugucuggagacggcuggccguauauugccagcagaaccuccaucguggggcgggcgugggaaaacacaaccgucgaucuugagucugacggaaagccccagaaggugggcaccgccgggagcaauaaaucccugcagagcgcuggauuuccuacaggccucacguacucucaacugaugacccugaaggauuccaugaugcagcuugaccccagcgccaaaacauggauugauaucgagggcagaccugaagaccccguugagaucgcucucuaccagccgaugucugggugcuauauucacuucuuucgcgaaccuaccgaccugaagcaguucaaacaagaugccaaguacucccauggaaucgacguggccgaucuguuucccgcucagccuggccucacaagcgcggucauugaggcccugccccggaacauggugcuuaccugucagggguccgacgauaucaagagacugcucgacucucagggacgccgggauauuaaacugaucgacaucgcucugagcaaggccgauuccagaaaauucgaaaaugccgucugggaccaaugcaaggaucuuugucacaugcauacgggcgugguuguggagaaaaagaagcgcgggggcaaagaggaaauuacaccccacugcgcucucauggacuguaucauguaugaugccgcggucucuggaggccugaacauuccugugcugcgggcuguucucccgagagacaugguguuucgcaccagcucccccaaggucgugcugugaggacuaguaauaaggaaacuguaugaaugucugugggcaggaagugaagagauccuucuguaaagguuuuuggaauuaugucugcugaauaauaaacuuuuuugaaauaauaaaucugguagaaaaaugagaucucaaaggcucuuuucagagccaccaaaaaaaaaaaaaaaaaaaaaaaaaaaaaaaaaaaaaaaaaaaaaaaaaaaaaaaaaaaaaaaaaaaaaaaaaaaaaaaaaaaaaaaaaaaaaaaaaaaaa

SEQ ID NO: 18904 - RNA, 2109 nt, Artificial Sequence
  mRNA product Design b-4 (hSL-A100) comprising derived and/or modified sequence from LASV(LASV237-NIG-2010;Clade II)__AIT17639__SP-HsPLAT_NP(2-569) (opt5)
aggagagucccgcagucggcguccagcggcucugcuuguucgugugugugucguugcaggccuuauucaagcuuaccauggacgccaugaagagaggccugugcugugugcuccugcuuugcggggcugucuucguuagccccagcgccuccaaggaggugaaaucuuuccuguggacccagagccucagacgggaacuguccggcuacugcucuaacaucaaacuucaagucguuaaggacgcucaggcccugcuccacgggcuggauuuuagcgagguguccaaugugcagcgccuuaugagaaagcagaaacgggacgauucugaccugaagcgccucagagaucugaaccaagcggucaauaaccugguggaacucaagagcacacagcagaaauccauucugcggguuggaacgcuuaccagcgacgaucugcucacacuggcugccgaccuugagaagcugaaaucuaaggugauccgcaccgaaagaccccucuccagcggcgucuauauggggaaucugucuacacagcaacuggagcagcggcgcgcccuccugaacaugauuggaauggugggcggggcucagggaacccagccuggcagagauggcguugugcgggucugggacgugaaaaauccggaucuucugaacaaucaauucgggacaaugcccucccucacccuggccugucuuacgaagcagggacagguggaccugaacgaugcuguccucgcccugaccgaccugggccucaucuacacagcgaaguauccuaauagcucugaccuggaucgccuuucccaaagccaucccauucugaacaugguugacaucaaaaaguccucucucaauaucagcggguacaacuuuucccugggagccgcugugaaagccggcgcuugcaugcuugaugggggaaauaugcuggagaccauuaaggugacaccucagaccauggacggcauccucaaaagcauucugaaggucaaaagaucucugggcauguucguguccgauacgcccggggaacggaacccuuaugagaacauccucuacaagauuugucugagcggagacggcuggccguauaucgccucucgcacaagcauuguugggagagcgugggaaaauaccacaguggaucuugaguccgacggaaagccccagaaagucggcucugccgggagcaacaagucccugcagagcgcuggauuuccuaccggccucaccuacucucaacugaugacacugaaagauuccaugaugcagcuugaccccagcgccaagacguggaucgauaucgagggccggccugaagaccccguggagauugcucucuaccagccgaugucugggugcuauauccacuucuuuagagaaccuaccgaccugaaacaguucaagcaagaugccaaguacucccauggaauugacguugccgaucuguuucccgcucagccuggccucacaagcgcggugaucgaggcccugccccgcaauaugguccuuaccugucagggguccgacgauauuaaacggcugcucgacucucagggaagacgcgauaucaagcugaucgacauugcucugagcaaagccgauucccggagauucgaaaacgccgugugggaccaaugcaaggaucuuugucacaugcauacaggcgucgugguugagaaaaagaagcgcgggggcaaagaggaaaucacgccccacugcgcucucauggacuguauuauguaugaugccgcggugucuggaggccugaauaucccuguccugcgggcugugcucccgagagacaugguuuuucgcaccagcucccccaaggugguccugugaggacuaguaauaaggaaacuguaugaaugucugugggcaggaagugaagagauccuucuguaaagguuuuuggaauuaugucugcugaauaauaaacuuuuuugaaauaauaaaucugguagaaaaaugagaucucaaaggcucuuuucagagccaccaaaaaaaaaaaaaaaaaaaaaaaaaaaaaaaaaaaaaaaaaaaaaaaaaaaaaaaaaaaaaaaaaaaaaaaaaaaaaaaaaaaaaaaaaaaaaaaaaaaaa

SEQ ID NO: 18905 - RNA, 2109 nt, Artificial Sequence
  mRNA product Design b-4 (hSL-A100) comprising derived and/or modified sequence from LASV(LASV253-NIG-2011;Clade II)__AIT17671__SP-HsPLAT_NP(2-569) (opt5)
aggagagucccgcagucggcguccagcggcucugcuuguucgugugugugucguugcaggccuuauucaagcuuaccauggacgccaugaagagaggccugugcugugugcuccugcuuugcggggcugucuucguuagccccagcgccuccaaggaggugaaaucuuuccuguggacccagagccucagacgggaacuguccggcuacugcucuagcaucaaacuucaagucguuaaggacgcucaggcccugcuccacgggcuggauuuuuccgaggugucuaacgugcagcgccuuaugagaaagcagaaacgggacgauagcgaccugaagcgccucagagaucugaaucaagcggucaacaaucugguggaacucaaguccacccagcagaaaagcguucugcgggugggaacgcuuaccucugacgaucugcucacacuggcugccgaccuugagaagcugaaauccaaggucauucgcaccgaaagaccccucagcucuggcguguauauggggaaccuguccacacagcaacuggagcagcggcgcgcccuccugaauaugaucggaaugguuggcggggcucagggaacccagccuggcagagauggcgugguccgggugugggacgugaaaaacccggaucuucugaauaaccaauucgggacaaugcccagccucacccuggccugucuuacgaagcagggacaggucgaccugaaugauguugugcucgcucugaccgaccugggccucauuuacacagccaaguauccuaacucuuccgaccuggaucgccuuagccaaucccaucccauccugaauaugguggacaccaaaaagucuagccucaacauuuccggguacaauuuuagccugggagcggccgucaaagcuggcgccugcaugcuugaugggggaaacaugcuggagacaaucaaggugaccccucagacgauggacggcauccucaaaucuauucugaagguuaaaaagucccugggcauguucgugagcgauacacccggggaaagaaauccuuaugagaacauccucuacaagauuugucugucuggagacggcuggccguauaucgcuagccggaccuccauugucgggcgcgccugggaaaacacaaccguggaucuugagucugacggaaaaccccagaagguuggcaccgcggggagcaauaaaucccugcagagcgccggauuuccuacaggccucacguacucucaacugaugacccugaaggauuccaugaugcagcuugaccccagcgcuaaaacauggaucgauauugagggcagaccugaagaccccguggagaucgcccucuaccagccgaugucugggugcuauauccacuucuuucgggaaccuaccgaccugaagcaguucaagcaagaugcuaaauacucccauggaauugacgucacagaucuguuucccgcccagccuggccucaccagcgccgugaucgaggcucugcccagaaacaugguccuuacgugucagggguccgacgauauuaagcgccugcucgacucucagggacggagagauaucaaacugauugacaucgcgcugagcaaggccgauucccgccgguucgaaaaugcugugugggaccaaugcaaagaucuuugucacaugcauacaggcguuguggucgagaagaagaaaagagggggcaaggaggaaaucacaccccacugcgcccucauggacuguauuauguaugaugccgcugugucuggaggccugaacaucccuguucugcgcgccgugcucccgcgggacauggucuuuagaaccagcucccccaaaguggugcugugaggacuaguaauaaggaaacuguaugaaugucugugggcaggaagugaagagauccuucuguaaagguuuuuggaauuaugucugcugaauaauaaacuuuuuugaaauaauaaaucugguagaaaaaugagaucucaaaggcucuuuucagagccaccaaaaaaaaaaaaaaaaaaaaaaaaaaaaaaaaaaaaaaaaaaaaaaaaaaaaaaaaaaaaaaaaaaaaaaaaaaaaaaaaaaaaaaaaaaaaaaaaaaaaa

SEQ ID NO: 18906 - RNA, 2109 nt, Artificial Sequence
  mRNA product Design b-4 (hSL-A100) comprising derived and/or modified sequence from LASV(LASV254-NIG-2011;Clade II)__AIT17675__SP-HsPLAT_NP(2-569) (opt5)
aggagagucccgcagucggcguccagcggcucugcuuguucgugugugugucguugcaggccuuauucaagcuuaccauggacgccaugaagagaggccugugcugugugcuccugcuuugcggggcugucuucguuagccccagcgccuccaaggaggugaaaucuuuccuguggacccagagccucagacgggaacuguccggcuacugcucuagcaucaaacuucaagucguuaaggacgcucaggcccugcuccacgggcuggauuuuuccgaggugucuaacgugcagcgccuuaugagaaagcagaaacgggacgauagcgaccugaagcgccucagagaucugaaucaagcggucaacaaucugguggaacucaaguccacacagcagaaaagcguucugcgggugggaacgcuuaccucugacgaucugcucacacuggcugccgaccuugagaagcugaaauccaaggucauucgcaccgaaagaccccucagcucuggcguguauauggggaaccuguccacacagcaacuggagcagcggcgcgcccuccugaauaugaucggaaugguuggcggggcucagggaacccagccuggcagagauggcgugguccgggugugggacgugaaaaacccggaucuucugaauaaccaauucgggacaaugcccagccucacccuggccugucuuacgaagcagggacaggucgaccugaaugaugcuguucucgcccugaccgaccugggccucauuuacacagcgaaguauccuaacucuuccgaccuggaucgccuuagccaaucccaucccauccugaauaugguggacaccaaaaagucuagccucaacauuuccggguacaauuuuagccugggagccgcugugaaagccggcgcuugcaugcuugaugggggaaacaugcuggagacaaucaaggucaccccucagacgauggacggcauccucaaaucuauucugaaggugaaaaagucccugggcauguucguuagcgauacacccggggaaagaaauccuuaugagaacauccucuacaagauuugucugucuggagacggcuggccguauaucgccagccggaccuccauuguggggcgcgcgugggaaaacacaaucgucgaucuugagucugacggaaaaccccagaaggugggcaccgccgggagcaauaaaucccugcagagcgcuggauuuccuaccggccucacauacucucaacugaugacgcugaaggauuccaugaugcagcuugaccccagcgccaaaaccuggauugauaucgagggcagaccugaagaccccguugagaucgcucucuaccagccgaugucugggugcuauauucacuucuuucgggaaccuacagaccugaagcaguucaagcaagaugccaaauacucccauggaaucgacguggccgaucuguuucccgcucagccuggccucaccagcgcggucauugaggcccugcccagaaacauggugcuuacaugucagggguccgacgauaucaagcgccugcucgacucucagggacggagagauauuaaacugaucgacaucgcucugagcaaggccgauucccgccgguucgaaaaugccgucugggaccaaugcaaagaucuuugucacaugcauaccggcgugguuguggagaagaagaaaagagggggcaaggaggaaauuacgccccacugcgcucucauggacuguaucauguaugaugccgcggucucuggaggccugaacauuccugugcugcgcgcuguucucccgcgggacaugguguuuagaacaagcucccccaaagucgugcugugaggacuaguaauaaggaaacuguaugaaugucugugggcaggaagugaagagauccuucuguaaagguuuuuggaauuaugucugcugaauaauaaacuuuuuugaaauaauaaaucugguagaaaaaugagaucucaaaggcucuuuucagagccaccaaaaaaaaaaaaaaaaaaaaaaaaaaaaaaaaaaaaaaaaaaaaaaaaaaaaaaaaaaaaaaaaaaaaaaaaaaaaaaaaaaaaaaaaaaaaaaaaaaaaa

SEQ ID NO: 18907 - RNA, 2109 nt, Artificial Sequence
  mRNA product Design b-4 (hSL-A100) comprising derived and/or modified sequence from LASV(Nig08-04;Clade II)__ADU56611__SP-HsPLAT_NP(2-569) (opt5)
aggagagucccgcagucggcguccagcggcucugcuuguucgugugugugucguugcaggccuuauucaagcuuaccauggacgccaugaagagaggccugugcugugugcuccugcuuugcggggcugucuucguuagccccagcgccuccaaggaggugaaaucuuuccuguggacccagagccucagacgggaacuguccggcuacugcucuaacaucaaacuucaagucguuaaggacgcucaggcccugcuccacgggcuggauuuuagcgagguguccaaugugcagcgccuuaugagaaagcagaaacgggacgauggagaccugaagcgccucagagaucugaaccaagcggucaauaaccugguggaacucaagucuacccagcagaaaagcguucugcgggugggcacgcuuaccuccgacgaucugcucacacuggcugccgaccuugagaagcugaaaagcaaggucauucgcaccgaaagaccccucucuuccgggguguauaugggaaaucugagcacacagcaacuggagcagcggaaagcccuccugucuaugaucggcaugguugggggagcucagggcacccagccuggccgcgaugggguggucagagugugggacgugaagaacccggaucuucugaauaaccaauucggaacaaugcccucccucacccuggccugucuuacgaagcagggccaggucgaccugaaugaugcuguucucgcccugaccgaccuggggcucauuuacacagcgaaauauccuaacagcucugaccuggaucggcuuucccaaagccaucccauccugaauaugguggacaccaagaaauccucucucaacauuagcggauacaauuuuucccugggcgccgcugugaaggccggggcuugcaugcuugauggaggcaacaugcuggagacaaucaaagucaccccucagacgauggacggcauccucaagagcauucugaaagugaagcgcucucuggggauguucguuuccgauacacccggagaaagaaauccuuaugagaacauccucuacaagauuugucugagcggcgacggguggccguauaucgccucucggaccagcauugugggacgcgcgugggaaaacacaaccgucgaucuugaguccgacggcaaaccccagaagguggggaccgccggaucuaauaaaagccugcaguccgcuggcuuuccuacaggccucacguacagccaacugaugacccugaaggauucuaugaugcagcuugaccccuccgccaaaacauggaucgauauugaggggagaccugaagaccccguugagaucgcucucuaccagccgaugagcggaugcuauauccacuucuuucgggaaccuaccgaccugaagcaguucaagcaagaugccaaauacucucauggcauugacgugacagaucuguuuuccgcccagcccgggcucaccagcgcugucaucgaggcgcugccuagaaacauggugcuuacgugucagggauccgacgauauuaagaaacugcucgacucucagggccgccgggauaucaagcugauugacaucagccugaauaaagccgauuccagacgcuucgaaaacgcugucugggaccaaugcaaggaucuuugucacaugcauacaggggugguuguggagaagaaaaagcggggcggaaaagaggaaaucacaccccacugcgcccucauggacuguauuauguuugaugccgcugucucuggcgggcugaauauccccauucugagagccgugcucccucgcgacaugguuuuccggaccagcuccccgaaggugguccugugaggacuaguaauaaggaaacuguaugaaugucugugggcaggaagugaagagauccuucuguaaagguuuuuggaauuaugucugcugaauaauaaacuuuuuugaaauaauaaaucugguagaaaaaugagaucucaaaggcucuuuucagagccaccaaaaaaaaaaaaaaaaaaaaaaaaaaaaaaaaaaaaaaaaaaaaaaaaaaaaaaaaaaaaaaaaaaaaaaaaaaaaaaaaaaaaaaaaaaaaaaaaaaaaa

SEQ ID NO: 18908 - RNA, 2112 nt, Artificial Sequence
  mRNA product Design b-4 (hSL-A100) comprising derived and/or modified sequence from LASV(GA391;Clade III)__AAA46284__SP-HsPLAT_NP(2-570) (opt5)
aggagagucccgcagucggcguccagcggcucugcuuguucgugugugugucguugcaggccuuauucaagcuuaccauggacgccaugaagagaggccugugcugugugcuccugcuuugcggggcugucuucguuagccccagcgccuccaaggaggugagaucuugccuguggacccagagccuccggcgcgaacuguccggcuacuguucuaacaucaaacuucaagucguuaaggacgcucaggcccugcuccacgggcuggauuucagcgagguguccaaugugcagagacuuaugcggaaacagaagcgcgacgauggagaccugaaaagacuccgggaucugaaccaagcggucaauaaccugguggaacucaagucuacacagcagaaaagcguucugcgcgugggcacgcuuuccagcgacgaucugcucauucuggcugccgaccuugagaaacugaagucuaaagucaccagaacagaacggccccucuccagcgggguguauaugggaaaucugucuucccagcaacuggaucagcgcagagcccuccugaacaugaucggcaugaccgggguuagcggaggcggcaagggggcuucuaauggaauugugcgggucugggacgugaaaaacgccgagcuucugaauaaccaguuuggcacaaugccuucccucacccuggcuugccuuacaaagcaggggcaaguggaucugaaugacgccguccaggcgcucaccgaucugggacugaucuacacggccaaguauccgaacagcuccgaccucgaccgccugucucagagccaucccauucuuaauaugaucgauaccaaaaaguccagccugaacaucucuggcuacaauuucucccucggggcugccguuaaagcuggagccuguaugcuggacggcggcaacaugcuugagacaauuaaggugagcccucaaaccauggaugggauccugaaaucuauucucaaggugaaaaagagccugggaauguuugucuccgacacacccggcgaaagaaacccuuaugagaauauccuguacaagauuugccucucuggggauggauggagcuauaucgcgucccggaccagcauugugggccgcgccugggaaaacacgguuguggaccuggagcaggauaauaaaccccagaagaucgggaacggaggcucuaauaaaucccuucagagcgcuggcuucgccgcugggcugaucuacucucaacucaugacacugaaggacuuuaaauguuucaaccugauuccuaaugccaagaccuggauggauaucgagggaagaccggaagaccccgucgagauugcccuuuaccagccuuccagcggcugcuaugugcacuuuuuccgggaacccacagaucucaagcaguuuaaacaggacgcuaaguacucccaugggagagacguuaccgaucuguucgcggcccaaccuggacugaccucugcugugaucgaggcccucccccgcaacauggucauuacaugucagggcagcgaagacauccggaaacugcuugagucccaggggagacgcgauaucaagcugauugacaucacgcucucuaaagccgauagccggaaguuugagaaugcugugugggaccaguucaaggaucugugccacaugcauaccggcgucgugguugaaaagaagaaaagaggaggcaaggaggaaauuacaccgcacugugcccugauggacugcaucauguuugaugcggcuguguccgggggacuugacgccaaaguccuccgcgugguucugccucgggauaugguguucagaaccagcacacccaaggucgugcugugaggacuaguaauaaggaaacuguaugaaugucugugggcaggaagugaagagauccuucuguaaagguuuuuggaauuaugucugcugaauaauaaacuuuuuugaaauaauaaaucugguagaaaaaugagaucucaaaggcucuuuucagagccaccaaaaaaaaaaaaaaaaaaaaaaaaaaaaaaaaaaaaaaaaaaaaaaaaaaaaaaaaaaaaaaaaaaaaaaaaaaaaaaaaaaaaaaaaaaaaaaaaaaaaa

SEQ ID NO: 18909 - RNA, 2109 nt, Artificial Sequence
  mRNA product Design b-4 (hSL-A100) comprising derived and/or modified sequence from LASV(Nig08-A19;Clade III)__ADU56619__SP-HsPLAT_NP(2-569) (opt5)
aggagagucccgcagucggcguccagcggcucugcuuguucgugugugugucguugcaggccuuauucaagcuuaccauggacgccaugaagagaggccugugcugugugcuccugcuuugcggggcugucuucguuagccccagcgccuccaaggaggugaaaucuuuccuguggacccagagccucagacgggaacuguccggcuacugcucuaacaucaaacuucaagucguuaaggacgcucaggcccugcuccacgggcuggauuuuagcgagguguccaaugugcagcgccuuaugagaaagcagaaacgggacgauggagaccugaagcgccucagagaucugaaccaagcggucaauaaccugguggaacucaagucuacacagcagaaaagcguucugcgggugggcacgcuuuccagcgacgaucugcucguccuggcugccgaccuugagaagcugaaaucuaaggugguucgcaccgaaagaccccucuccagcgggauuuauaugggaaaucugucuucccagcaacuggaucagcggaaagcccuccugaacaugaucggcaugacagggggaaauggcggccgcaacaccacaagcgacgggauugugagagucugggaugugaagaaugcugagcuucugaacaaucaguucggaaccaugccuucucucacacuggccugucuuaccaagcagggccaaguggaccugaacgaugcuguccaggcccucacggaccuggggcugaucuacaccgcgaaauaucccaauuccagcgaccucgaucggcuggcccagucccauccgauucuuaacaugaucgacacaaagaaaucuagccugaauaucuccggauacaacuuuagccucggcgcugccguuaaggcuggggccugcaugcuggauggaggcaacaugcuugagaccauuaaagugucuccucaaacaauggacggcauccugaaguccauucucaaagugaagcgcagccuggggauguucaucucugauacccccggagaaagaaauccuuaugagaacauucuguacaagaucugucucagcggcgacggguggcccuauauugcgucccggacgucuaucgucggacgcgccugggaaaauacagugguugaucuggagagcgacaacaaaccucagaagaccggcaaugggggauccaacaaaagccuucagucugcuggcuuugccgcuggccugacauacucccagcucaugacccugaaggauagcaugcugcaacuugacccgaaugccaaaaccuggauggauaucgaggggagacccgaagacccuguggagauugcccucuaccagcccucuuccggaugcuauauccacuucuuucgggaaccuacagaccugaagcaguucaagcaggaugcuaaauacagccauggcauugacgucacggaucuguuugcggcccaacccgggcucaccuccgcugugaucgaggcccugccgagaaacaugguuauuacaugucagggaucugaagacauccgcaaacuucuggagagccagggccggagagauaucaagcucauugacaucucccugucuaagguggauagccgcaaauucgagaaugccgucugggaccaguuuaaggaucugugccacaugcauaccgggauuguggucgaaaagaaaaagcggggcggaaaagaggaaaucacaccucacugugcucuuauggacugcauuauguucgaugccgcgguguccggcgggguugacgcuaaggugcucagagccguccugccccgcgauaugguguuucggaccagcacgccuaaaguugugcugugaggacuaguaauaaggaaacuguaugaaugucugugggcaggaagugaagagauccuucuguaaagguuuuuggaauuaugucugcugaauaauaaacuuuuuugaaauaauaaaucugguagaaaaaugagaucucaaaggcucuuuucagagccaccaaaaaaaaaaaaaaaaaaaaaaaaaaaaaaaaaaaaaaaaaaaaaaaaaaaaaaaaaaaaaaaaaaaaaaaaaaaaaaaaaaaaaaaaaaaaaaaaaaaaa

SEQ ID NO: 18910 - RNA, 2109 nt, Artificial Sequence
  mRNA product Design b-4 (hSL-A100) comprising derived and/or modified sequence from LASV(G1180-SLE-2010;Clade IV)__AIT17169__SP-HsPLAT_NP(2-569) (opt5)
aggagagucccgcagucggcguccagcggcucugcuuguucgugugugugucguugcaggccuuauucaagcuuaccauggacgccaugaagagaggccugugcugugugcuccugcuuugcggggcugucuucguuagccccagcgccuccaaggagaucaaaucuuuccuguggacccagagccucagacgggaacuguccggcuacugcucuaacauuaagcugcaaguggucaaagacgcucaggcccugcuccacgggcuggauuuuagcgagguuuccaaugugcagcgccuuaugagaaaggaacggcgcgacgauaacgaccugaaaagacuccgggaucugaaucaggcggugaacaaucuggucgagcucaagucuacacaacaaaagagcauccugcgcgugggaacgcuuaccuccgacgaucugcucauucuggcugccgaccuugaaaaacuuaagagcaaaguuaucagaacagagcggccccucucugccggcguguauauggggaaccuguccagccagcagcuggaucagcgcagagcucuccugucuaugauuggaauguccagcggcaaucagcgggcccaggcugggcgcgacggagucgugagaguuugggaugugaagaacgucgagcuucugaauaaccaguucggcaccaugccuucucucacacuggccugucuuaccaaacaaggccagguggaccugaaugaugcggugcaggcccucacagaccuggggcugaucuacaccgcuaaguauccgaacacguccgaccucgaucggcugacccaaagccaucccauccuuaauaugauugacacaaagaaauccucucugaacaucagcggauacaauuuuucccucggcgccgcugucaaggccggggcgugcaugcuggauggaggcaacaugcuugaaaccauuaaaguuagcccucagacaauggacgggauccugaagucuauucucaaagugaagaaagcccugggaauguucaucuccgauacccccggcgagcgcaacccuuaugaaaauauucuguacaagaucugucucagcggcgacggguggcccuauaucgcuucuagaacgagcauuacaggacgggccugggagaacaccguggucgaucuggaguccgacggcaagccucagaaagcugggucuaauaacagcaauaagucccuucagagcgugggauuuacagccggccugaccuacucucaacucaugacccugaaagaugccaugcugcagcuugacccgaacgcuaagacauggauggauaucgaagggagacccgaggacccuguugaaauugcgcucuaccagcccuccagcggaugcuauauccacuucuuucgcgagccuacggaccugaaacaguucaagcaagaugccaaguacucucauggcauugacgugaccgaucuguuugcugcccagcccggccucacauccgccgucaucgacgcucugccgcggaauauggugaucaccugucaggggagcgaugacauuagaaaacuucuggaaucccagggacgcaaggauaucaaacucauugacaucgcccugucuaagacagauagccggaaauaugagaacgcgguuugggaccaauacaaggaucugugccacaugcauaccggcguggucguggagaagaaaaagagagggggaaaagaagagauuacgccucacugugcucuuauggacugcaucauguucgaugccgccgucuccggcgggcucaauacaucugugcugcgcgcuguucugccccgggacaugguguuuagaaccagcaccccucgcgucgugcucugaggacuaguaauaaggaaacuguaugaaugucugugggcaggaagugaagagauccuucuguaaagguuuuuggaauuaugucugcugaauaauaaacuuuuuugaaauaauaaaucugguagaaaaaugagaucucaaaggcucuuuucagagccaccaaaaaaaaaaaaaaaaaaaaaaaaaaaaaaaaaaaaaaaaaaaaaaaaaaaaaaaaaaaaaaaaaaaaaaaaaaaaaaaaaaaaaaaaaaaaaaaaaaaaa

SEQ ID NO: 18911 - RNA, 2109 nt, Artificial Sequence
  mRNA product Design b-4 (hSL-A100) comprising derived and/or modified sequence from LASV(G1442-SLE-2011;Clade IV)__AIT17181__SP-HsPLAT_NP(2-569) (opt5)
aggagagucccgcagucggcguccagcggcucugcuuguucgugugugugucguugcaggccuuauucaagcuuaccauggacgccaugaagagaggccugugcugugugcuccugcuuugcggggcugucuucguuagccccagcgccuccaaggaggugaaaucuuuccuguggacccagagccucagacgggaacuguccggcuacugcucuaacaucaaacuucaagucguuaaggacgcucaggcccugcuccacgggcuggauuuuagcgagguguccaaugugcagcgccuuaugagaaagcagcggcgcgacgauaacgaccugaaaagacuccgggaucugaaucaagcggucaacaaucugguggaacucaagucuacacagcaaaagagcguucugcgcgugggaacgcuuaccuccgacgaucugcucguccuggcugccgaccuugagaaacuuaagagcaaagugauuagaacagaacggccccucucugccggcguuuauauggggaaccuguccagccagcagcuggaucagcgcagagcucuccugaauaugaucggaaugucuggcgggauucagggaacccggacaggccgcgacggcguggucagagugugggaugugaagaacgccgaccuucugaauaaccaguucgggaccaugccuucccucacacuggcuugucuuaccaaacaaggacaggucgaucugaaugacguugugcaggcccucacggaccugggccugaucuacaccgcgaaguauccgaacgccagcgaucucgaccggcugacacaaucucaucccauucuuaauaugaucgauaccaagaaauccagccugaacaucuccggguacaauuuuucucucggagcugccgugaaggcuggcgccugcaugcuggacgggggaaacaugcuugagacaauuaaagucagcccucagaccauggauggcauccugaaguccauucucaaagugaagaaaacgcugggcauguucaucagcgacacacccggggagcgcaacccuuaugaaaauauucuguacaagaucugucucucuggagauggcuggcccuauauugcguccagaaccagcaucacagggcgggccugggagaacaccguuguggaccuggaaucugauggaaagccucagaaagcuggcagcaauaacuccaauaagucucuucagagcgccggguuugcugccggacugaccuacucccaacucaugacacugaaagacgccaugcugcagcuugauccgaacgcuaagacguggauggacaucgagggcagacccgaggacccugucgaaauugcgcucuaccagcccagcucuggcugcuauauccacuucuuucgcgagccuaccgaucugaaacaguucaagcaagacgccaaguacucccaugggauugaugugacagaccuguuugcugcccagcccggacucaccagcgccguuaucgaagcucugccgcggaauauggugauuacaugucagggcucugaugacaucaaaaagcugcuggagucccaggggagaaaagauaucaagcucauugacaucgcccugagcaaaaccgauucccgcaaguaugaaaacgcggucugggaccaauacaaggaucugugccacaugcauacgggaguggucguggagaaaaagaaacggggcgggaaggaggaaauuacaccucacugugcucuuauggacugcaucauguucgaugccgccguuucuggcggacucaauacccuggugcugagagcuguccucccccgcgacaugguguuucggaccagcacaccuagaguugugcugugaggacuaguaauaaggaaacuguaugaaugucugugggcaggaagugaagagauccuucuguaaagguuuuuggaauuaugucugcugaauaauaaacuuuuuugaaauaauaaaucugguagaaaaaugagaucucaaaggcucuuuucagagccaccaaaaaaaaaaaaaaaaaaaaaaaaaaaaaaaaaaaaaaaaaaaaaaaaaaaaaaaaaaaaaaaaaaaaaaaaaaaaaaaaaaaaaaaaaaaaaaaaaaaaa

SEQ ID NO: 18912 - RNA, 2109 nt, Artificial Sequence
  mRNA product Design b-4 (hSL-A100) comprising derived and/or modified sequence from LASV(G3010-SLE-2013;Clade IV)__AIT17345__SP-HsPLAT_NP(2-569) (opt5)
aggagagucccgcagucggcguccagcggcucugcuuguucgugugugugucguugcaggccuuauucaagcuuaccauggacgccaugaagagaggccugugcugugugcuccugcuuugcggggcugucuucguuagccccagcgccuccaaggagaucaaaucuuuccuguggacccagagccucagacgggaacuguccggcuacugcucuaacauuaaacuucaaguggucaaagacgcucaggcccugcuccacgggcuggauuuuagcgagguuuccaaugugcagcgccuuaugagaaaggaacggcgcgacgauaacgaccugaaaagacuccgggaucugaaucaggcggugaacaaucuggucgagcucaagucuacacaacaaaagagcauccugcgcgugggaacgcuuaccuccgacgaucugcucauucuggcugccgaccuugaaaaacuuaagagcaaaguuacaagaaccgagcggccccucucugccggcguguauauggggaaccuguccagccagcagcuggaucagcgcagagcucuccugucuaugaucggaauguccagcggcguccagggggcccgggcuggacgcgacggcgugguuagagugugggaugucaagaaugccgagcuucugaacaaucaguucggcacaaugccuucucucacccuggcgugucuuacaaaacaggggcaaguggaccugaacgaugugguccaggcccucaccgaccugggacugauuuacacggcuaaguauccgaauaccuccgaccucgaucggcugacacagagccaucccauccuuaacaugaucgacaccaagaaauccucucugaauauuagcggcuacaacuuuucccucggggccgcuguuaaggccggagcgugcaugcuggauggcgggaauaugcuugaaacaaucaaagugagcccucaaaccauggacggcauucugaagucuauccucaaagugaagaaagcccugggaauguucauuuccgagacgcccggcgaacgcaacccuuaugagaacauccuguacaagauuugucucagcggggauggauggcccuauaucgcuucuagaacaagcaucaccggccgggccugggagaauacagucguggaccuggaauccgaugggaagccucagaaagcuggaucuaacaauagcaacaagucccuucagagcgccggcuuuaccgccgggcugaccuacucucagcucaugacacugaaagacgcuaugcugcaacuugauccgaaugcgaagacguggauggacauugagggaagacccgaagauccuguugagguggcccucuaccagcccuccagcggcugcuauauccacuucuuucgcgaaccuaccgaccugaaacaguucaagcaggacgcuaaguacucucauggcauugaugucacagaccuguuugccgcccaacccgggcucaccuccgcugugaucgaugcccugccgcggaacaugguuauuacaugucagggaagcgacgauaucaaaaagcugcuggagucccagggcagaaaagacaucaagcucauugauaucgcgcugucuaaaaccgacagccgcaaguaugagaaugcugugugggaucaguacaaggaccugugccacaugcauacgggggucguggucgaaaagaagaaacggggaggcaaggaggaaauuacaccucacugugcccuuauggauugcaucauguucgacgccgcuguguccgggggccucaacaccucuguucugagagccgugcugccccgcgauauggucuuucggaccagcacaccuagagugguucucugaggacuaguaauaaggaaacuguaugaaugucugugggcaggaagugaagagauccuucuguaaagguuuuuggaauuaugucugcugaauaauaaacuuuuuugaaauaauaaaucugguagaaaaaugagaucucaaaggcucuuuucagagccaccaaaaaaaaaaaaaaaaaaaaaaaaaaaaaaaaaaaaaaaaaaaaaaaaaaaaaaaaaaaaaaaaaaaaaaaaaaaaaaaaaaaaaaaaaaaaaaaaaaaaa

SEQ ID NO: 18913 - RNA, 2109 nt, Artificial Sequence
  mRNA product Design b-4 (hSL-A100) comprising derived and/or modified sequence from LASV(G502-SLE-2009;Clade IV)__AIT17127__SP-HsPLAT_NP(2-569) (opt5)
aggagagucccgcagucggcguccagcggcucugcuuguucgugugugugucguugcaggccuuauucaagcuuaccauggacgccaugaagagaggccugugcugugugcuccugcuuugcggggcugucuucguuagccccagcgccuccaaggagaucaaaucuuuccuguggacccagagccucagacgggaacuguccggcuacugcucuaacauuaagcugcaaguggucaaagacgcucaggcccugcuccacgggcuggauuuuagcgagguuuccaaugugcagcgccuuaugagaaaggaacggcgcgacgauaacgaccugaaaagacuccgggaucugaaucaggcggugaacaaucuggucgagcucaagucuacacaacaaaagagcauccugcgcgugggaacgcuuaccuccgacgaucugcucauucuggcugccgaccuugaaaaacuuaagagcaaaguuaucagaacagagcggccccucucugccggcguguauauggggaaccuguccagccagcagcuggaucagcgcagagcucuccugucuaugauuggaauguccggcgggaaucagggaguccgggccggcaaggacggcgugguucgcgugugggaugucaaaaacgcugagcuucugaauaaccaguucgggaccaugccuagccucacacuggccugucuuaccaagcagggacaaguggaccugaaugaugcggugcaggcccucacagaccugggccugaucuacaccgcuaaguauccgaacacgucugaccucgauagacugacccagucccaucccauccuuaauaugauugacaccaaaaagagcucccugaacaucucuggguacaauuuuagccucggagccgcugucaaagccggcgcgugcaugcuggaugggggaaacaugcuugaaacaauuaagguuuccccucaaacaauggacggcauccugaaaagcauucucaaggugaaaaaggcccugggcauguucaucucugauacccccggggagcggaacccuuaugaaaauauucuguacaagaucugucucuccggagacggcuggcccuauaucgcuagccgcacgucuauuacagggagagccugggagaacaccguggucgaucuggagagcgacggaaaaccucagaaggcuggcuccaauaacucuaauaaaagccuucaguccgccggguuuacagccggacugaccuacagccagcucaugacccugaaggaugcuaugcugcaacuugacccgaacacaaaaacguggauggauaucgaaggccggcccgaggacccuguggaaauugcgcucuaccagcccucuuccggcugcuauauccacuucuuuagagagccuaccgaccugaagcaguucaagcaggaugccaaauacagccaugggauugacguuacagaucuguuugcugcccaacccggacucaccucugccgugaucgacgcucugccgcgcaauauggucaucacaugucagggcuccgaugacauucggaaacuucuggaaagccaggggagaaaggauaucaagcucauugacaucgcccugaacaaaaccgauucccgcaaguaugagaaugcggugugggaccaguacaaggaucugugccacaugcauacgggaguuguggucgagaaaaagaaacggggcgggaaggaagagauuacaccucacugugcucuuauggacugcaucauguucgaugccgccgugucuggcggacucaacaccagcguccugagagcugugcugccccgcgacaugguuuuucggaccuccacaccuagagugguccucugaggacuaguaauaaggaaacuguaugaaugucugugggcaggaagugaagagauccuucuguaaagguuuuuggaauuaugucugcugaauaauaaacuuuuuugaaauaauaaaucugguagaaaaaugagaucucaaaggcucuuuucagagccaccaaaaaaaaaaaaaaaaaaaaaaaaaaaaaaaaaaaaaaaaaaaaaaaaaaaaaaaaaaaaaaaaaaaaaaaaaaaaaaaaaaaaaaaaaaaaaaaaaaaaa

SEQ ID NO: 18914 - RNA, 2109 nt, Artificial Sequence
  mRNA product Design b-4 (hSL-A100) comprising derived and/or modified sequence from LASV(G733-SLE-2010;Clade IV)__AIT17155__SP-HsPLAT_NP(2-569) (opt5)
aggagagucccgcagucggcguccagcggcucugcuuguucgugugugugucguugcaggccuuauucaagcuuaccauggacgccaugaagagaggccugugcugugugcuccugcuuugcggggcugucuucguuagccccagcgccuccaaggagaucaaaucuuuccuguggacccagagccucagacgggaacuguccggcuacugcucuaacauuaagcugcaaguggucaaagacgcucaggcccugcuccacgggcuggauuuuagcgagguuuccaaugugcagcgccuuaugagaaaggaacggcgcgacgauaacgaccugaaaagacuccgggaucugaaucaggcggugaacaaucuggucgagcucaagucuacacaacaaaagagcgugcugcgcguuggaacgcuuaccuccgacgaacugcucgugcuggcugccgaucuugagaaacuuaagagcaaagucaucagaacagagcggccccucucugccggcguguauauggggaaccuguccagccagcagcuggaccagcgcagagcucuccugucuaugauuggaauguccggcgggaaucagggagcccggaccggccgcgauggcguugugagagucugggacgugaagaacgcugaacuucugaauaaccaguucgggacaaugccuagccucacccuggccugucuuacaaaacagggacaaguggaucugaaugacgcgguccaggcccucaccgaucugggccugaucuacacggcuaaguauccgaacaccucugaccucgaccggcugacacagucccaucccauucuuaauaugaucgauaccaagaaaagcucccugaacaucucuggguacaauuuuagccucggagccgcuguuaaggccggcgcgugcaugcuggacgggggaaacaugcuugagacaauuaaaguguccccucaaaccauggauggcauccucaagagcauucugaaagugaagaaagcccugggcauguucaucucugacacgcccggggaacgcaacccuuaugagaauauucuguacaagaucugucucuccggagauggcuggcccuauauugcuagcagaacaucuaucaccgggcgggccugggagaacacagucguggaccuggaaagcgauggaaagccucagaaagcuggcuccaauaacucuaauaagagccuucaguccgccggguuuaccgccggacugaccuacagccagcucaugacacugaaagacgcuaugcugcaacuugauccgaacgcgaagacguggauggacaucgagggcagacccgaagauccuguugagauugcccucuaccagcccucuuccggcugcuauauccacuucuuucgcgaaccuaccgaccugaaacaguucaagcaggacgcuaaguacagccaugggauugaugugacagaccuguuugccgcccaacccggacucaccucugcugucaucgaugcccugccgcggaauauggugauuacaugucagggcuccgacgauaucagaaaacuucuggagagccaggggcgcaaggacaucaaacucauugauaucgcgcuguccaagauugacucucggaaauaugagaacgcuguuugggaucaguacaaggaccugugccacaugcauaccggaguggucguggaaaagaaaaagagaggcgggaaagaggaaaucacgccucacugugcccuuauggauugcauuauguucgacgccgcugucagcggcggacucaauucccuggugcugcgcgccguucucccccgggauaugguguuuagaacaucuaccccucgcgucgugcugugaggacuaguaauaaggaaacuguaugaaugucugugggcaggaagugaagagauccuucuguaaagguuuuuggaauuaugucugcugaauaauaaacuuuuuugaaauaauaaaucugguagaaaaaugagaucucaaaggcucuuuucagagccaccaaaaaaaaaaaaaaaaaaaaaaaaaaaaaaaaaaaaaaaaaaaaaaaaaaaaaaaaaaaaaaaaaaaaaaaaaaaaaaaaaaaaaaaaaaaaaaaaaaaaa

SEQ ID NO: 18915 - RNA, 2109 nt, Artificial Sequence
  mRNA product Design b-4 (hSL-A100) comprising derived and/or modified sequence from MOPV/LASV reassortant(IGS-1;Clade IV)__AFY05578__SP-HsPLAT_NP(2-569) (opt5)
aggagagucccgcagucggcguccagcggcucugcuuguucgugugugugucguugcaggccuuauucaagcuuaccauggacgccaugaagagaggccugugcugugugcuccugcuuugcggggcugucuucguuagccccagcgccuccaaggagaucaaaucuuuccuguggacccagagccucagacgggaacuguccggcuacugcucuaacauuaaacuucaaguggucaaggacgcucaggcccugcuccacgggcuggauuuuagcgagguuuccaaugugcagcgccuuaugagaaaggaacggcgcgacgauaacgaccugaaaagacuccgggaucugaaucaggcggugaacaaucuggucgagcucaagucuacacaacaaaagagcauccugcgcgugggaacgcuuaccuccgacgaucugcucauucuggcugccgaccuugaaaaacugagaagcaagguuauccggacagagcgcccccucucugccggcguguauauggggaaccuguccagccagcagcuggaucagagacgggcucuccugaauaugauuggaaugucuggcgggaaccagggagcccgcgcuggcagagacggcgucgugcggguuugggaugugaaaaaugccgagcuucuguccaaccaguucgggaccaugccuagccucacacuggcgugucuuaccaagcagggacaagucgaccugaaugaugccgugcaggcucucacagaccugggccugaucuacaccgccaaauauccgaacacgucugaccucgaucgccugacccagucccaucccauccuuaauaugauugacacaaagaaaagcucccugaacaucucuggguacaauuuuagccucggagcugccgugaaggcgggcgccugcaugcuggaugggggaaacaugcuugaaaccauuaaggucuccccucaaacaauggacggcauccugaaaagcauucucaagguuaaaaaggcucugggcauguucaucucugauacccccggggagagaaacccuuaugaaaauauucuguacaaaaucugucucuccggagacggcuggcccuauaucgccagccggacgucuauuacagggagagcuugggagaacaccgugguggaucuggagagcgacggaaagccucagaaggccgauuccaauaacucuagcaaaucccuucagagcgccggcuuuacagcugggcugaccuacucucagcucaugacccugaaggacgcgaugcugcaacuugauccgaaugccaaaacauggauggacaucgaaggacgccccgaggacccugucgaaauugcucucuaccagcccuccagcggcugcuauauccacuucuuucgggagccuacggaucugaagcaguucaaacaggacgccaaguacucucauggcauugaugugaccgaccuguuugccacacaacccgggcucaccuccgcuguuaucgaugcccugccgagaaacauggugaucacaugucagggaagcgacgauauucgcaaacuucuggaaucccagggccggaaggacaucaagcucauugauaucgaccugucuaaaaccgauagcagaaaguaugagaaugcggucugggaccaguacaaagaucugugccacaugcauacgggggugguuguggagaagaagaaacgcggaggcaaggaagagauuacaccucacugugcucuuauggacugcaucauguucgacgccgccgucuccgggggccucaacaccucugugcugcgggcuguccugcccagagauaugguguuucgcaccagcacaccucggguugugcucugaggacuaguaauaaggaaacuguaugaaugucugugggcaggaagugaagagauccuucuguaaagguuuuuggaauuaugucugcugaauaauaaacuuuuuugaaauaauaaaucugguagaaaaaugagaucucaaaggcucuuuucagagccaccaaaaaaaaaaaaaaaaaaaaaaaaaaaaaaaaaaaaaaaaaaaaaaaaaaaaaaaaaaaaaaaaaaaaaaaaaaaaaaaaaaaaaaaaaaaaaaaaaaaaa

SEQ ID NO: 18916 - RNA, 2109 nt, Artificial Sequence
  mRNA product Design b-4 (hSL-A100) comprising derived and/or modified sequence from LASV(LM765-SLE-2012;Clade IV)__AIT17815__SP-HsPLAT_NP(2-569) (opt5)
aggagagucccgcagucggcguccagcggcucugcuuguucgugugugugucguugcaggccuuauucaagcuuaccauggacgccaugaagagaggccugugcugugugcuccugcuuugcggggcugucuucguuagccccagcgccuccaaggagaucaaaucuuuccuguggacccagagccucagacgggaacuguccggcuacugcucuaacauuaagcugcaaguggucaaagacgcucaggcccugcuccacgggcuggauuuuagcgagguuuccaaugugcagcgccuuaugagaaaggaacggcgcgacgauaacgaccugaaaagacuccgggaucugaaucaggcggugaacaaucuggucgagcucaagucuacacaacaaaagagcauccugcgcgugggaacgcuuaccuccgacgaucugcucauucuggcugccgaccuugaaaaacuuaagagcaaaguuacaagaaccgagcggccccucucugccggcguguauauggggaaccuguccagccagcagcuggaucagcgcagagcucuccuggacaugaucggaaugucuggcuccaaucagggggcccgggcuggacgcgauggcgucgugagaguuugggacgugaagaacgccgagcuucugaauaaccaguucggcacaaugccuagccucacccuggcgugucuuacaaaacaggggcaagucgaucugaaugacgccgugcaggcucucaccgaccugggacugauuuacacggccaaguauccgaacaccucugaucucgaccggcugacacagucccaucccauccuuaauaugaucgauaccaagaaaagcucccugaacauuucuggcuacaauuuuagccucggggcugccgugaaggcgggagccugcaugcuggacggcgggaacaugcuugaaacaaucaaagucuccccucaaaccauggauggcauucucaagagcauccugaaaguuaagaaagcucugggaauguucauuucugacgcccccggcgagcgcaacccuuaugaaaauauccuguacaagauuugucucuccggggauggauggcccuauaucgcuagcagaacgucuaucacaggccgggccugggagaacaccgugguggaccuggagagcgaugggaagccucagaaagccggauccaauggcucuaacaagagccuucaguccgcuggguuuacagcgggacugaccuacagccagcucaugacccugaaagacgccaugcugcaacuugauccgaaugcuaagacauggauggacauugaaggcagacccgaggacccugucgaaaucgcccucuaccagcccucuuccggcugcuauauucacuucuuucgcgagccuacggaucugaaacaguucaagcaggacgccaaguacagccaugggaucgaugugaccgaccuguuugcugcccaacccggacucacaucugcgguuauugaugcucugccgcggaacauggugaucaccugucagggcuccgacgauaucagaaaacuuuucgaaagccaggggcgcaaggacauuaaacugaucgauauugcccucuccaagacagacucucggaaauaugagaaugccgucugggaucaguacaaggaccugugccacaugcauaccggaaucgugguugagaagaaaaagagaggcgggaaagaagagauuacgccucacugugcucugauggauugcaucauguuugacgccgcugugagcggcggacuuaacacauccguccuccgcgccgugcugccccgggacauggucuucagaaccucuaccccucgcgugguucugugaggacuaguaauaaggaaacuguaugaaugucugugggcaggaagugaagagauccuucuguaaagguuuuuggaauuaugucugcugaauaauaaacuuuuuugaaauaauaaaucugguagaaaaaugagaucucaaaggcucuuuucagagccaccaaaaaaaaaaaaaaaaaaaaaaaaaaaaaaaaaaaaaaaaaaaaaaaaaaaaaaaaaaaaaaaaaaaaaaaaaaaaaaaaaaaaaaaaaaaaaaaaaaaaa

SEQ ID NO: 18917 - RNA, 2109 nt, Artificial Sequence
  mRNA product Design b-4 (hSL-A100) comprising derived and/or modified sequence from LASV(LM776-SLE-2012;Clade IV)__AIT17825__SP-HsPLAT_NP(2-569) (opt5)
aggagagucccgcagucggcguccagcggcucugcuuguucgugugugugucguugcaggccuuauucaagcuuaccauggacgccaugaagagaggccugugcugugugcuccugcuuugcggggcugucuucguuagccccagcgccuccaaggagaucaaaucuuuccuguggacccagagccucagacgggaacuguccucuuacugcagcaacauuaaacuucaaguggucaaggacgcucaggcccugcuccacggccuggauuuuuccgagguuucuaaugugcagcgccuuaugagaaaggaacggcgcgacgauaacgaccugaaaagacuccgggaucugaaucaggcggugaacaaucuggucgagcucaagagcacacaacagaaguccauccugcgcguggggacgcuuaccagcgacgaucugcucauucuggcugccgaccuugaaaaacugaagucuaaaguuacaagaaccgagcggccccucuccgccggaguguauaugggcaaccugagcucucagcagcuggaucaacgcagagcucuccuguccaugaucgggaugagcggaucuaaucagggcgcccgggcugggcgcgacggagucgugagaguuugggaugugaagaacgccgagcuucugaauaaccaguucggcacaaugccuucccucacccuggcgugucuuacaaaacagggccaagucgaccugaaugaugccgugcaggcucucaccgaccuggggcugauuuacacggccaaguauccgaacaccagcgaccucgaucggcugacacagucccaucccauccuuaauaugaucgacaccaagaaaucuagccugaacauuuccggauacaauuuuagccucggcgcugccgugaaggcgggggccugcaugcuggauggaggcaacaugcuugaaacaaucaaagucucuccucaaaccauggacgggauucugaaguccauccucaaaguuaagaaagcucugggaauguucauuagcgauacgcccggcgagcgcaacccuuaugaaaauauccuguacaagauuugucucucuggcgacggguggcccuauaucgccagcagaacauccaucaccggacgggcuugggagaacacagugguggaucuggagucugacggcaagccucagaaagccgggagcaauaacuccaauaagagccuucagucugccggauuuaccgcuggccugaccuacucccagcucaugacacugaaagaugcgaugcugcaacuugacccgaacgccaagacguggauggauauugaagggagacccgaggacccugucgaaguggcucucuaccagcccagcucuggaugcuauauccacuucuuucgcgagccuaccgaccugaaacaguucaagcaggaugccaaguacucccauggcauugacguuacagaucuguuugccgcucaacccggccucaccagcgccgugaucgacgcgcugccgcggaauauggucauuacaugucagggguccgaugacaucagaaaacuucuggaaucucagggacgcaaggauaucaaacucauugacaucgcucugagcaagaccgauucccggaaauaugagaacgccgugugggaccaguacaaggaucugugccacaugcauacgggcguuguggucgagaagaaaaagagagggggaaaagaagagauuacaccucacugugcccuuauggacugcaucauguucgaugcugccgugucuggcgggcucaauaccagcguccugcgcgcugugcugccccgggacaugguuuuuagaaccuccacaccucgcgugguccucugaggacuaguaauaaggaaacuguaugaaugucugugggcaggaagugaagagauccuucuguaaagguuuuuggaauuaugucugcugaauaauaaacuuuuuugaaauaauaaaucugguagaaaaaugagaucucaaaggcucuuuucagagccaccaaaaaaaaaaaaaaaaaaaaaaaaaaaaaaaaaaaaaaaaaaaaaaaaaaaaaaaaaaaaaaaaaaaaaaaaaaaaaaaaaaaaaaaaaaaaaaaaaaaaa

SEQ ID NO: 18918 - RNA, 2109 nt, Artificial Sequence
  mRNA product Design b-4 (hSL-A100) comprising derived and/or modified sequence from LASV(Mad39;Clade IV)__ANH09723__SP-HsPLAT_NP(2-569) (opt5)
aggagagucccgcagucggcguccagcggcucugcuuguucgugugugugucguugcaggccuuauucaagcuuaccauggacgccaugaagagaggccugugcugugugcuccugcuuugcggggcugucuucguuagccccagcgccuccaaggagaucaaaucuuuccuguggacccagagccucagacgggaacuguccggcuacugcucuaacauuaagcugcaaguggucaaagacgcucaggcccugcuccacgggcuggauuuuagcgagguuuccaaugugcagcgccuuaugagaaagcagcggcgcgacgauaacgaccugaaaagacuccgggaucugaaucaagcggugaacaaucuggucgaacucaagucuacacagcaaaagagcgugcugcgcguuggaacgcuuaccuccgacgaucugcucacacuggcugccgaccuugagaaacuuaagagcaaagugaccagaacagaacggccccucaccgccggcgucuauauggggaaccugucuucccagcagcuggaucagcgcagagcucuccugaauaugaucggaaugagcggcgggaaccagggagcccggacaggccgcgacggcgugguuagagugugggaugucaagaaugcugagcuucugaacaaucaguucgggaccaugccuucucucacgcuggccugucuuaccaaacaaggacagguggaccugaacgaugugguccaggcgcucacagaccugggccugauuuacaccgccaaguauccgaauacauccgaccucgaucggcugacccaaagccaucccauccuuaacaugauugacacgaauaagucuucccugaacaucagcggguacaacuuuucccucggagcugccguuaaagcuggcgccugcaugcuggaugggggaaauaugcuugagacaaucaaggugucuccucagaccauggacggcauucugaaaagcauccucaaggugaaaaagucccugggcauguucauuagcgauacacccggggaacgcaacccuuaugagaauauccuguacaaaauuugucucucuggagacggcuggcccuauaucgcguccagaaccagcauuaccgggcgggccugggaaaacacagucguggaucuggagucuggaggcaagccucagaaggcugggagcaauaacuccaauaaaucucuucagagcgccggauuugcugccggccugacguacucccaacucaugacccugaaggacgccaugcugcagcuugauccgaacgcuaaaacauggauggacaucgagggcagacccgaagauccuguugagaucgcgcucuaccagcccauuagcgggugcuauauccacuucuuucgcgaaccuaccgaccugaagcaguucaaacaagacgccaaguacucucauggaauugaugugacagaccuguuugcugcccagcccggccucaccuccgccgucaucgaggcucugccgcggaauauggugauuacgugucaggggagcgaugacaucagaaaacuuuucgaaucucagggacgcaaggauaucaagcugauugacaucgcccucuccaaaacagauagccggaaguaugagaacgcgguuugggaccaauacaaagaucugugccacaugcauaccggcguggucguggagaagaagaaaaagggcgggaaagaagagauuaccccucacugugcucugauggacugcaucauguuugaugccgccgucuccggaggccuuaauacacucgugcugagagcuguucugccccgcgacaugguguuccggaccucuacaccuaaggucgugcucugaggacuaguaauaaggaaacuguaugaaugucugugggcaggaagugaagagauccuucuguaaagguuuuuggaauuaugucugcugaauaauaaacuuuuuugaaauaauaaaucugguagaaaaaugagaucucaaaggcucuuuucagagccaccaaaaaaaaaaaaaaaaaaaaaaaaaaaaaaaaaaaaaaaaaaaaaaaaaaaaaaaaaaaaaaaaaaaaaaaaaaaaaaaaaaaaaaaaaaaaaaaaaaaaa

SEQ ID NO: 18919 - RNA, 2109 nt, Artificial Sequence
  mRNA product Design b-4 (hSL-A100) comprising derived and/or modified sequence from LASV(Z0947-SLE-2011;Clade IV)__AIT17841__SP-HsPLAT_NP(2-569) (opt5)
aggagagucccgcagucggcguccagcggcucugcuuguucgugugugugucguugcaggccuuauucaagcuuaccauggacgccaugaagagaggccugugcugugugcuccugcuuugcggggcugucuucguuagccccagcgccuccaaggagaucaaaucuuuccuguggacccagagccucagacgggaacuguccggcuacugcucuaacauuaagcugcaaguggucaaagacgcucaggcccugcuccacgggcuggauuuuagcgagguuuccaaugugcagcgccuuaugagaaaggaacggcgcgacgauaacgaccugaaaagacuccgggaucugaaucaggcggugaacaaucuggucgagcucaagucuacacaacaaaagagcauccugcgcgugggaacgcuuaccuccgacgaucugcucauucuggcugccgaccuugaaaaacuuaagagcaaaguuacaagaaccgagcggccccucucugccggcguguauauggggaaccuguccagccagcagcuggaucagcgcagagcucuccugaauaugaucggaaugucuggcuccaaccagggggcccggacaggacgcgacggcgucgugagaguuugggaugugaagaaugcugagcuucugaacaaucaguucggcaccaugccuagccucacacuggccugucuuaccaaacaggggcaagucgaccugaacgaugcggugcaggcccucacggaccugggacugauuuacaccgcuaaguauccgaauacaucugaccucgaucggcugacccagucccaucccauccuuaacaugaucgacacaaagaaaagcucccugaauauuucuggcuacaacuuuagccucggggccgcugugaaggccggagcgugcaugcuggauggcgggaacaugcuugaaaccaucaaagucuccccucaaacgauggacggcauucucaagagcauccugaaaguuaagaaagcccugggaauguucauuucugaugcucccggcgagcgcaauccuuaugaaaacauccuguacaagauuugucucuccggggacggauggcccuauaucgccagcagaacaucuaucaccggccgggcuugggagaauacagugguggaucuggagagcgacgggaagccucagaaagccggauccaacggcucuaauaagagccuucaguccgccggguuuaccgcuggacugaccuacagccagcucaugacacugaaagaugcgaugcugcaacuugacccgaacgccaagacguggauggauauugaaggcagacccgaggacccugucgaaaucgcucucuaccagcccucuuccggcugcuauauucacuucuuucgcgagccuaccgaccugaaacaguucaagcaggaugccaaguacagccaugggaucgacgugacagaucuguuugccgcucaacccggacucaccucugccguuauugacgcgcugccgcggaauauggugaucacaugucagggcuccgaugacaucagaaaacuuuucgaaagccaggggcgcaaggauauuaaacugaucgacauugcucucuccaagaccgauucucggaaauaugagaacgccgucugggaccaguacaaggaucugugccacaugcauacgggaaucgugguugagaagaaaaagagaggcgggaaagaagagauuacaccucacugugcccugauggacugcaucauguuugaugcugccgugagcggcggacuuaauaccuccguccuccgcgcugugcugccccgggacauggucuucagaaccucuacaccucgcgugguucugugaggacuaguaauaaggaaacuguaugaaugucugugggcaggaagugaagagauccuucuguaaagguuuuuggaauuaugucugcugaauaauaaacuuuuuugaaauaauaaaucugguagaaaaaugagaucucaaaggcucuuuucagagccaccaaaaaaaaaaaaaaaaaaaaaaaaaaaaaaaaaaaaaaaaaaaaaaaaaaaaaaaaaaaaaaaaaaaaaaaaaaaaaaaaaaaaaaaaaaaaaaaaaaaaa

SEQ ID NO: 18920 - RNA, 2085 nt, Artificial Sequence
  mRNA product Design b-4 (A100) comprising derived and/or modified sequence from LASV(Josiah;Clade IV)__NP_694869__SP-HsPLAT_NP(2-569) (opt1)
aggagagucccgcagucggcguccagcggcucugcuuguucgugugugugucguugcaggccuuauucaagcuuaccauggacgccaugaagcgcggccugugcugcgugcuccugcugugcggggccgucuucgugagccccagcgccuccaaggagaucaagagcuuccuguggacccagucccuccgccgggagcugagcggcuacugcuccaacaucaagcuccagguggucaaggacgcccaggcgcugcugcacgggcuggacuucagcgagguguccaacgugcagcgccucaugcggaaggagcgccgggacgacaacgaccugaagcgccugcgggaccucaaccaggccgucaacaaccugguggagcucaagagcacccagcagaaguccauccugcgcgugggcacccugaccagcgacgaccugcucauccuggccgccgaccuggagaagcucaaguccaaggucauccggaccgagcgcccccugagcgccgggguguacaugggcaaccuguccagccagcagcucgaccagcggcgcgcgcugcugaacaugaucgggauguccggcggcaaccagggggcccgggccggccgcgacggggugguccgggugugggacgugaagaacgccgagcuccugaacaaccaguucggcaccaugccgagccugacgcucgcgugccugaccaagcaggggcaggucgaccugaacgacgccgugcaggcccucaccgaccugggccugaucuacaccgccaaguaccccaacacguccgaccucgaccgccugacccagagccaccccauccugaacaugaucgacaccaagaaguccagccucaacaucagcggcuacaacuucucccugggggccgcggugaaggccggcgccugcaugcuggacgggggcaacaugcucgagaccaucaaggucagcccccagacgauggacggcauccugaaguccauccugaaggugaagaaggcccucgggauguucaucagcgacaccccgggcgagcggaaccccuacgagaacauccuguacaagaucugccuguccggggacggcuggcccuacaucgccagccgcaccuccaucaccgggcgggcgugggagaacacgguggucgaccucgagagcgacggcaagccccagaaggccgacuccaacaacagcuccaagagccugcaguccgccggcuucaccgccgggcugaccuacagccagcucaugacccugaaggacgccaugcugcagcuggacccgaacgcgaagacguggauggacaucgagggccgccccgaggaccccguggagaucgcccucuaccagcccuccagcgggugcuacauccacuucuuccgggagccgaccgaccugaagcaguucaagcaggacgccaaguacucccacggcaucgacgugaccgaccuguucgccacccagcccgggcucacgagcgccgucaucgacgcgcugccccgcaacauggugaucacgugccagggcuccgacgacauccgcaagcugcucgagagccagggccggaaggacaucaagcugaucgacaucgcccugagcaagaccgacucccgcaaguacgagaacgccgugugggaccaguacaaggaccucugccacaugcacaccggggucguggucgagaagaagaagcggggcgggaaggaggagaucaccccgcacugcgcccugauggacugcaucauguucgacgcggccgugagcggcgggcugaacaccuccgugcuccgcgccguccugccccgggacaugguguuccgcaccagcacgccccgggugguccugugaggacuaguaauaaggaaacuguaugaaugucugugggcaggaagugaagagauccuucuguaaagguuuuuggaauuaugucugcugaauaauaaacuuuuuugaaauaauaaaucugguagaaaaaugagaucuaaaaaaaaaaaaaaaaaaaaaaaaaaaaaaaaaaaaaaaaaaaaaaaaaaaaaaaaaaaaaaaaaaaaaaaaaaaaaaaaaaaaaaaaaaaaaaaaaaaa

SEQ ID NO: 18921 - RNA, 2085 nt, Artificial Sequence
  mRNA product Design b-4 (A100) comprising derived and/or modified sequence from LASV(LP;Clade I)__AAF86702__SP-HsPLAT_NP(2-569) (opt1)
aggagagucccgcagucggcguccagcggcucugcuuguucgugugugugucguugcaggccuuauucaagcuuaccauggacgccaugaagcgcggccugugcugcgugcuccugcugugcggggccgucuucgugagccccagcaacuccaaggagaucaagagcuuccuguggacccagucccuccgccgggagcugagcggcuacugcuccaacaucaagcuccagguggucaaggacgcccaggcccugcugcacgggcuggacuucagcgagguguccaacgugcagcgccucaugcggaagcagaagcgcgacgacgcggaccugaagcggcugcgcgaccucaaccaggccgucaacaaccugguggagcucaagagcacccagcagaagaacgugcugcgggucggcacgcuguccagcgacgaccugaucacccucgccgccgaccuggagaagcugaaguccaaggugauccgcaccgagcggccccucagcuccgggguguacaugggcaaccugagcucccagcagcuggaccagcgccgggcccuccugagcaugaucgggauguccggcggcccgcaggggaaccgcaccggcggggacggcgucgugcgggugugggacgucaagaacgcggagcugcucaacaaccaguucgggacgaugcccagccugacccuggccugccucaccaagcagggccagguggaccugaacgacgccgugcaggcccugaccgaccucggccugaucuacacggcgaaguaccccaacuccagcgaccuggacaugcucacccagagccaccccauccuggggauggucgacaccaagaaguccagccugaacaucuccggcuacaacuucagccucggggccgccgugaaggccggcgccugcaugcuggacggcgggaacaugcuggagaccaucaagguguccccgcagacgauggacggcauccucaagagcauccugaaggucaagcgcucccuggggauguucaucagcgacacccccggcgagcggaaccccuacgagaacauccucuacaagaucugccuguccggggagggcuggcccuacaucgcgagccgcaccuccaucaccggccgggccugggagaacacgcugguggaccucgagagcgacaacaagccgcccaagcugaacuccgccgggagcaacaagucccugcaggccgccggccucaacgcggggcugaccuacagccagcugaugacccugaaggacugcaugcuccagcuggaccccuccagcaagaccuggaucgacaucgagggccgccccgaggacccgguggagaucgcccuguuccagcccuccagcgggugcuacauccacuucuuccgggagcccacggaccucaagcaguucaagcaggacgccaaguacagccacggcaucgacgucaccgaccuguucuccacccagcccggccugaccagcgccgugaucgaggcccucccgcgcaacauggugcugacgugccagggguccgacgacaucaagaagcugcucgagagccagggccggcgcgacaucaagcugaucgacaucucccugagcaaggcggacucccgcaaguucgagaacgccgucugggaccaguacaaggaccucugccacaugcacaccgggguggucguggagaagaagaagcggggcgggaaggaggagaucacgccccacugcgcccugcuggacugcaucauguucgacgccgccaccaccggcagccucaacaucaccacccugcgcgcggugcugccccgggacauggucuuccgcaccuccacgcccaagguggugcucugaggacuaguaauaaggaaacuguaugaaugucugugggcaggaagugaagagauccuucuguaaagguuuuuggaauuaugucugcugaauaauaaacuuuuuugaaauaauaaaucugguagaaaaaugagaucuaaaaaaaaaaaaaaaaaaaaaaaaaaaaaaaaaaaaaaaaaaaaaaaaaaaaaaaaaaaaaaaaaaaaaaaaaaaaaaaaaaaaaaaaaaaaaaaaaaaa

SEQ ID NO: 18922 - RNA, 2085 nt, Artificial Sequence
  mRNA product Design b-4 (A100) comprising derived and/or modified sequence from LASV(803213;Clade II)__AAF86704__SP-HsPLAT_NP(2-569) (opt1)
aggagagucccgcagucggcguccagcggcucugcuuguucgugugugugucguugcaggccuuauucaagcuuaccauggacgccaugaagcgcggccugugcugcgugcuccugcugugcggggccgucuucgugagccccagcgccuccaaggaggugaaguccuuccuguggacccagagccuccgccgggagcugagcggcuacugcuccaacaucaagcugcaggucgugaaggacgcccaggcgcuccugcacgggcuggacuucagcgaggugaacaacguccagcgccucaugcggaagcagaagcgcgacgacggcgaccugaagcggcugcgcgaccucaaccaggccgugaacaaccugguggagcugaaguccacccagcagaaguccauccuccgggucgggacgcugaccagcgacgaccugcucacccuggccgccgaccuggagaagcucaagagcaaggugauccgcaccgagcggccccuguccagcggcguguacauggggaaccuguccacgcagcagcucgagcagcgccgggcccugcugaacaugaucggcauggucggcggggcgcagggcacccagccggggcgcgacggcguggugcgggucugggacgugaagaaccccgaccuccugaacaaccaguucgggaccaugcccagccugacccucgccugccugacgaagcagggccagguggaccugaacgacgccguccucgcccugaccgaccugggccucaucuacaccgcgaaguaccccaacuccagcgaccuggaccgccugucccagagccacccgauccucaacaugguggacaccaagaaguccagccugaacaucagcggguacaacuucucccugggcgccgccgugaaggccggggccugcaugcucgacggcggcaacaugcuggagacgaucaaggucacgccccagaccauggacgggauccucaagagcauccugaaggugaagcggucccugggcauguucgugagcgacacccccggggagcgcaaccccuacgagaacauccuguacaagaucugccucuccggcgacggguggccguacaucgcgagccggaccuccaucgucggccgcgccugggagaacaccaccguggaccuggagagcgacggcaagccccagaagguggggaccgccggcuccaacaagagccugcaguccgccggguuccccacgggccucaccuacagccagcugaugacccugaaggacuccaugaugcagcuggaccccagcgccaagaccuggaucgacaucgaggggcggccggaggaccccgucgagaucgcgcucuaccagcccauguccggcugcuacauccacuucuuccgcgagcccacggaccugaagcaguucaagcaggacgccaaguacagccacggcaucgacguggccgaccuguucccggcccagcccgggcucaccuccgccgucaucgaggcgcugccccggaacauggugcugaccugccagggcagcgacgacaucaagaagcuccuggacucccaggggcgccgcgacaucaagcugaucgacaucagccucagcaagguggacucccggaaguucgagaacgccgucugggaccagugcaaggaccugugccacaugcacaccggcgugguggucgagaagaagaagcgcgggggcaaggaggagaucacgccccacugcgcccugauggacugcaucauguucgacgccgccgugagcggcgggcucaacaucccggugcugcgggcgguccugccccgcgacaugguguuccggaccuccagccccaaggugguccucugaggacuaguaauaaggaaacuguaugaaugucugugggcaggaagugaagagauccuucuguaaagguuuuuggaauuaugucugcugaauaauaaacuuuuuugaaauaauaaaucugguagaaaaaugagaucuaaaaaaaaaaaaaaaaaaaaaaaaaaaaaaaaaaaaaaaaaaaaaaaaaaaaaaaaaaaaaaaaaaaaaaaaaaaaaaaaaaaaaaaaaaaaaaaaaaaa

SEQ ID NO: 18923 - RNA, 2088 nt, Artificial Sequence
  mRNA product Design b-4 (A100) comprising derived and/or modified sequence from LASV(GA391;Clade III)__CAA36646__SP-HsPLAT_NP(2-570) (opt1)
aggagagucccgcagucggcguccagcggcucugcuuguucgugugugugucguugcaggccuuauucaagcuuaccauggacgccaugaagcgcggccugugcugcgugcuccugcugugcggggccgucuucgugagccccagcgccuccaaggaggugcgcagcuuccuguggacccagucccuccggcgcgagcugagcggcuacugcuccaacaucaagcugcaggucgugaaggacgcccaggcgcuccugcacgggcuggacuucagcgagguguccaacguccagcggcucaugcgcaagcagaagcgggacgacggcgaccugaagcgccugcgggaccucaaccaggccgugaacaaccugguggagcucaagagcacccagcagaaguccguccugcgcguggggacccugagcuccgacgaccugcucauccuggccgccgaccuggagaagcucaagagcaaggugacccggaccgagcgcccccuguccagcggcgucuacauggggaaccuguccagccagcagcucgaccagcggcgcgcccugcugaacaugaucggcaugaccggcguguccgggggcgggaagggcgcgagcgacgggaucgugcgggucugggacgugaagaacgccgagcuccugaacaaccaguucggcacgaugccgucccugacccucgccugccugaccaagcagggccagguggaccugaacgacgccguccaggcgcucaccgaccuggggcugaucuacacggccaaguaccccaacagcagcgaccucgaccgccugucccagagccaccccauccugaacaugaucgacaccaagaaguccagccucaacaucuccggcuacaacuucagccugggggccgccgugaaggccggcgcgugcaugcuggacggcgggaacaugcucgagaccaucaaggugagcccccagaccauggacggcauccucaaguccauccugaaggucaagaagucccuggggauguucgugagcgacacgccgggcgagcggaaccccuacgagaacauccuguacaagaucugccuguccggggacggcuggcccuacaucgccagccgcaccuccaucgugggccgggccugggagaacaccgucguggaccucgagcaggacaacaagccccagaagaucgggaacggcgggagcaacaagucccugcagagcgccggcuucgccgcggggcugaccuacucccagcucaugacgcugaaggacuucaagugcuucaaccugaucccgaacgccaagaccuggauggacaucgagggccgccccgaggaccccguggagaucgcccuguaccagcccagcuccggcugcuacguccacuucuuccgggagccgaccgaccucaagcaguucaagcaggacgccaaguacagccacgggaucgacgugaccgaccuguucgccgcgcagcccggccugacgagcgccgucaucgaggcccucccccgcaacauggugaucacgugccagggguccgaggacauccggaagcugcuggagagccagggccgccgcgacaucaagcucaucgacaucacccuguccaaggccgacagccggaaguucgagaacgccgugugggaccaguucaaggaccugugccacaugcacaccggggucgugguggagaagaagaagcgcggcggcaaggaggagaucacgccccacugcgcgcucauggacugcaucauguucgacgccgccgucuccgggggccuggacgccaaggugcugcgggugguccucccgcgcgacaugguguuccggaccagcacccccaaggugguccugugaggacuaguaauaaggaaacuguaugaaugucugugggcaggaagugaagagauccuucuguaaagguuuuuggaauuaugucugcugaauaauaaacuuuuuugaaauaauaaaucugguagaaaaaugagaucuaaaaaaaaaaaaaaaaaaaaaaaaaaaaaaaaaaaaaaaaaaaaaaaaaaaaaaaaaaaaaaaaaaaaaaaaaaaaaaaaaaaaaaaaaaaaaaaaaaaa

SEQ ID NO: 18924 - RNA, 2085 nt, Artificial Sequence
  mRNA product Design b-4 (A100) comprising derived and/or modified sequence from LASV(AV;Clade V)__CCA30315__SP-HsPLAT_NP(2-569) (opt1)
aggagagucccgcagucggcguccagcggcucugcuuguucgugugugugucguugcaggccuuauucaagcuuaccauggacgccaugaagcgcggccugugcugcgugcuccugcugugcggggccgucuucgugagccccagcgccuccaaggaggugaaguccuuccuguggacccagagccuccgccgggagcugagcggcuacugcuccaacaucaagcugcaggucgugaaggacgcccaggcgcuccugcacgggcuggacuucagcgagguguccaacguccagcgccucaugcggaagcagcgccgggacgacagcgaccugaagcgccugcgggaccucaaccaggccgugaacaaccugguggagcugaaguccacccagcagaaguccguccuccgcgugggcacgcugagcagcgacgaccugcucacccuggccgccgaccuggagaagcucaaguccaaggugacccggaccgagcgcccccugagcuccggggucuacaugggcaaccugagcucccagcagcucgaccagcggcgcgcccugcugaaccucaucgggaugacgaacggcagccagggcucccaggcggggcgggacggcguggugcgcgucugggacgugaagaacgccgagcugcugaacaaccaguucgggaccaugccgagccucacccuggccugccugaccaagcagggccagguggaccucaacgacgucgugcaggcccugacggaccuggggcucaucuacaccgcgaaguaccccaacaccagcgaccuggaccggcugacccagucccaccccauccucaacaugaucgacacgaagaaguccagccugaacaucagcggcuacaacuucucccugggcgccgccgugaaggccggggccugcaugcucgacggcgggaacaugcuggagaccaucaaggucagcccccaguccauggacggcauccucaagagcauccugaaggugaagcgcgcgcugggcauguucguguccgacaccccgggggagcggaaccccuacgagaacauccuguacaagaucugccucagcggcgacggguggcccuacaucgccucccgcaccagcaucgucggccgggccugggagaacacggugguggaccuggagaccgacgggaagccccagaagaucggcuccggcaacagcaacaagucccugcagagcgccggguucuccgccggccucaccuacagccagcugaugacccugaaggacgcgaugcugcagcucgacccgaacgccaagacguggauggacaucgaggggcgccccgaggaccccgucgagguggcccuguaccagcccaucuccggcugcuacauccacuucuuccgggagccgaccgaccugaagcaguucaagcaggacgccaaguacagccacgggaucgacaucgccgaccucuucgcggcccagcccggccugaccagcgccgucaucgaggcccugccccgcaacauggugaucacgugccagggcuccgaggacaucaagaagcuccuggagagccaggggcgcaaggacaucaagcugaucgacaucgcccucuccaagaucgacagccggaaguucgagaacgcggugugggaccaguacaaggaccugugccacaugcacaccggcgucgugguggagaagaagaagcgcgggggcaaggaggagaucaccccgcacugcgcccugauggacugcaucauguucgacgccgccgucuccgggggccucaacacccuggugcugcgggcggugcucccccgcgacauggucuuccggaccagcacgccccgcguggugcugugaggacuaguaauaaggaaacuguaugaaugucugugggcaggaagugaagagauccuucuguaaagguuuuuggaauuaugucugcugaauaauaaacuuuuuugaaauaauaaaucugguagaaaaaugagaucuaaaaaaaaaaaaaaaaaaaaaaaaaaaaaaaaaaaaaaaaaaaaaaaaaaaaaaaaaaaaaaaaaaaaaaaaaaaaaaaaaaaaaaaaaaaaaaaaaaaa

SEQ ID NO: 18925 - RNA, 2085 nt, Artificial Sequence
  mRNA product Design b-4 (A100) comprising derived and/or modified sequence from LASV(Togo/2016/7082;Clade VI)__AMR44578__SP-HsPLAT_NP(2-569) (opt1)
aggagagucccgcagucggcguccagcggcucugcuuguucgugugugugucguugcaggccuuauucaagcuuaccauggacgccaugaagcgcggccugugcugcgugcuccugcugugcggggccgucuucgugagccccagcaacuccaaggaggugaaguccuuccuguggacccagagccuccgccgggagcugagcggcuacugcuccaacaucaagcugcaggucgugaaggacgcccaggcccuccugcacgggcuggacuucagcgagguguccaacguccagcgccucaugcggaagcagaagcgcgacgacggcgaccugaagcggcugcgcgaccucaaccaggcggugaacaaccugguggagcucaagagcguccagcagaaguccauccugcggguggggacccugaccagcgacgaccugcucacccuggccgccgaccuggagaagcucaaguccaaggugacccgcaccgagcggccccugagcuccggcgucuacauggggaaccugagcucccagcagcucgaccagcgccgggcccugcugagcaugaucggcauguccggcgggaaccagaacagccagccgaagggcgacgggguggugcgcgucugggacgugaagaacgccgaccuccugaacaaccaguucggcacgaugcccucccugacccucgcgugccugaccaagcagggccagguggaccugaacgacgccguccaggcccucaccgaccuggggcugaucuacacggccaaguaccccaacagcagcgaccucgaccggcugucccagagccaccccauccugaacaugaucgacaccaagaaguccagccucaacaucuccggcuacaacuucagccugggggcggccaucaagaccggcgccugcaugcuggacgggggcaacaugcucgagaccaucaaggugacgccgcagaccauggacggcauccugaaguccauccugaaggugaagcgcagccucgggauguucaucuccgacacccccggcgagcggaaccccuacgagaacauccuguacaagaucugccugagcggggacggcuggcccuacaucgccucccgcaccgccaucaucgggcgggcgugggagaacacggucguggaccucgagagcgacuccaagccgcagaagaucggcagcaacggcuccaacaagagccugcaguccgccggguucgcccccggccugaccuacagccagcucaugacccugaaggacuccaugcugcagcuggaccccaacgccaagaccuggaucgacaucgaggggcgccccgaggacccgguggaggucgcccucuuccagcccaucagcggcugcuacauccacuucuuccgggagcccacggaccugaagcaguucaagcaggacgcgaaguacagccacgggaucgacgugaccgaccuguucgccgcccagcccggccucaccuccgccgugaucgaggcccugccgcgcaacaugguccugaccugccagggcagcgacgacaucaagaagcuccuggacucccaggggcggcgcgacaucaagcugaucgacgugagccucaacaagaucgacucccgcaaguucgagaacgcggucugggaccaguacaaggaccugugccacaugcacacgggcgugguggucgagaagaagaagaagggcgggaaggaggagaucacgccccacugcgcccugcucgacugcaucauguucgacgccgccgugagcgggggccugaacgccaccgugcugcgggcgguccucccccgcgacaugguguuccggaccuccagccccaaggugguccugugaggacuaguaauaaggaaacuguaugaaugucugugggcaggaagugaagagauccuucuguaaagguuuuuggaauuaugucugcugaauaauaaacuuuuuugaaauaauaaaucugguagaaaaaugagaucuaaaaaaaaaaaaaaaaaaaaaaaaaaaaaaaaaaaaaaaaaaaaaaaaaaaaaaaaaaaaaaaaaaaaaaaaaaaaaaaaaaaaaaaaaaaaaaaaaaaa

SEQ ID NO: 18926 - RNA, 2085 nt, Artificial Sequence
  mRNA product Design b-4 (A100) comprising derived and/or modified sequence from LASV(KAK-428;Clade n.d. (VII))__ANH09741__SP-HsPLAT_NP(2-569) (opt1)
aggagagucccgcagucggcguccagcggcucugcuuguucgugugugugucguugcaggccuuauucaagcuuaccauggacgccaugaagcgcggccugugcugcgugcuccugcugugcggggccgucuucgugagccccagcaacuccaaggaggugaaguccuuccuguggacccagagccuccgccgggagcugagcggcuacugcaccaacaucaagcugcaggucgugaaggacgcccaggcccuccugcacgggcuggacuucuccgaggugagcaacguccagcgccucaugcggaagcagaagcgcgacgacaacgaccugaagcggcugcgcgaccucaaccaggcggugaacaaccugguggagcugaaguccguccagcagaaguccgugcucaaggugggcacgcugaacagcgacgaccugcucacccuggccgccgaccuggagaagcucaagagcaaggucgugcggaccgagcgcccccuguccagcgggguguacaugggcaaccuguccagccagcagcucgaccagcggcgcgcccugcugaacaugaucgggauggccggcggcucccaggggaaccagccgagccgggacggcgucgugcgcgugugggacgucaagaacgcggaccuccugaacaaccaguucgggaccaugcccucccugacgcucgccugccugaccaagcagggccagguggaccugaacgacgugguccucgcccugaccgaccuggggcucaucuacaccgccaaguaccccaacagcuccgaccuggaccggcugagccagaaccaccccgugcucaacaugaucgacgugaacaagagcucccugaacaucagcggcuacaacuucucccugggcgcggccgucaaggccggggccugcaugcucgacggcgggaacaugcuggagacgaucaagaucagcccgcagaccguggacggcauccugaaguccauccucaaggugaagcgcgcccugggcauguucgucagcgacacccccggggagcggaaccccuacgagaacauccuguacaaggugugccucuccggcaacggguggcccuacaucgcgagccgcaccuccaucgucggccgggccugggagaacacggugguggaccuggagagcaacaagaaccagccgaaggucgggaacaacggcuccaacaagaugcugcagagcuccggcuucgccaccgggcucaccuacagccagcugaugacccugcgcgacuccaugcugcagcucgaccccacggccaagaccuggaucgacaucgagggccggcccgaggaccccguggagcuggcccuguuccagccgagcuccgggugcuacauccacuucuuccgcgagcccaccgaccucaagcaguucaagcaggacgcgaaguacagccacggcaucgacgugaacgaccuguucuccgcccagcccgggcugaccagcgccguccucgaggcccugccccggaacauggugcugacgugccagggcagcgacgacauccgcaagcuccuggacucccaggaccgcaaggacaucaagcugaucgacaucagccucuccaaggccgacgcgcggaaguucgagaacgacgugugggaccaguucaaggaccugugccacaugcacaccggcaucgucguggagaagaagaagaagggcgggaagcaggagaugaccccgcacugcgcccugcucgacugcaucauguucgacgccgccgugagcgggggccugaacguccccacccugcgcgccgugcuccccacggacaugguguuccggaccaucaccaccaaggucgugcugugaggacuaguaauaaggaaacuguaugaaugucugugggcaggaagugaagagauccuucuguaaagguuuuuggaauuaugucugcugaauaauaaacuuuuuugaaauaauaaaucugguagaaaaaugagaucuaaaaaaaaaaaaaaaaaaaaaaaaaaaaaaaaaaaaaaaaaaaaaaaaaaaaaaaaaaaaaaaaaaaaaaaaaaaaaaaaaaaaaaaaaaaaaaaaaaaa

SEQ ID NO: 18927 - RNA, 2085 nt, Artificial Sequence; identical to SEQ ID NO: 18921
  mRNA product Design b-4 (A100) comprising derived and/or modified sequence from LASV(Pinneo-NIG-1969;Clade I)__AIT17837__SP-HsPLAT_NP(2-569) (opt1)

SEQ ID NO: 18928 - RNA, 2085 nt, Artificial Sequence
  mRNA product Design b-4 (A100) comprising derived and/or modified sequence from LASV(ISTH0009-NIG-2011;Clade II)__AIT17405__SP-HsPLAT_NP(2-569) (opt1)
aggagagucccgcagucggcguccagcggcucugcuuguucgugugugugucguugcaggccuuauucaagcuuaccauggacgccaugaagcgcggccugugcugcgugcuccugcugugcggggccgucuucgugagccccagcguguccaaggaggucaagagcuuccuguggacccagucccuccgccgggagcugagcggcuacugcuccaacaucaagcuccagguggugaaggacgcccaggcccugcugcacgggcuggacuucagcgaggucuccaacgugcagcgccucaugcggaagcagaagcgcgacgacagcgaccugaagcggcugcgcgaccucaaccaggcggugaacaaccuggucgagcugaaguccacccagcagaaguccauccuccgggugggcacccugaccagcgacgaccugcucacccuggccgccgaccuggagaagcucaagagcaaggugauccgcaccgagcggccccuguccagcggggucuacaugggcaaccuguccacgcagcagcucgagcagcgccgggcccugcugaacaugaucgggauggugggcggcgcccaggggacccagccgggccgcgacggggugguccgggugugggacgugaagaaccccgaccuccugaacaaccaguucggcaccaugcccagccugacccucgcgugccugacgaagcaggggcaggucgaccugaacgacgccgugcucgcccugaccgaccugggccucaucuacaccgccaaguaccccaacuccagcgaccuggaccgccugucccagagccacccgauccucaacaugguggacaucaagaaguccagccugaacaucagcggcuacaacuucucccugggggcggccgucaaggccggcgccugcaugcucgacgggggcaacaugcuggagaccaucaaggugacgccccagaccauggacggcauccucaagagcauccugaaggugaagcggucccuggggauguucgucagcgacacccccggcgagcgcaaccccuacgagaacauccuguacaagaucugccucuccggggacggcuggccguacaucgccagccggaccuccaucguggggcgcgcgugggagaacacgaccguggaccuggagagcgacggcaagccccagaaggucggcuccgccgggagcaacaagucccugcagagcgccggcuuccccaccgggcucaccuacucccagcugaugacgcugaaggacagcaugaugcagcuggaccccuccgccaagaccuggaucgacaucgagggccggccggaggaccccguggagaucgcccucuaccagcccaugagcgggugcuacauccacuucuuccgcgagcccaccgaccugaagcaguucaagcaggacgcgaaguacucccacggcaucgacgucgccgaccuguucccggcccagcccggccucaccagcgccgugaucgaggcccugccccggaacauggugcugacgugccaggggagcgacgacaucaagcgccuccuggacucccagggccgccgggacaucaagcugaucgacaucgcgcucagcaaggccgacucccgccgguucgagaacgccgucugggaccagugcaaggaccugugccacaugcacaccggggugguggucgagaagaagaagcgcggcgggaaggaggagaucacgccccacugcgcccugauggacugcaucauguacgacgccgcggugagcggcggccucaacaucccggugcugcgggccguccugccccgcgacaugguguuccggaccuccagccccaaggugguccucugaggacuaguaauaaggaaacuguaugaaugucugugggcaggaagugaagagauccuucuguaaagguuuuuggaauuaugucugcugaauaauaaacuuuuuugaaauaauaaaucugguagaaaaaugagaucuaaaaaaaaaaaaaaaaaaaaaaaaaaaaaaaaaaaaaaaaaaaaaaaaaaaaaaaaaaaaaaaaaaaaaaaaaaaaaaaaaaaaaaaaaaaaaaaaaaaa

SEQ ID NO: 18929 - RNA, 2085 nt, Artificial Sequence
  mRNA product Design b-4 (A100) comprising derived and/or modified sequence from LASV(ISTH2010-NIG-2012;Clade II)__AIT17483__SP-HsPLAT_NP(2-569) (opt1)
aggagagucccgcagucggcguccagcggcucugcuuguucgugugugugucguugcaggccuuauucaagcuuaccauggacgccaugaagcgcggccugugcugcgugcuccugcugugcggggccgucuucgugagccccagcgccuccaaggaggugaaguccuuccuguggacccagagccuccgccgggagcugagcggcuacugcuccaacaucaagcugcaggucgugaaggacgcccaggcgcuccugcacgggcuggacuucagcgagguguccaacguccagcgccucaugcggaagcagaagcgcgacgacagcgaccugaagcggcugcgcgaccucaaccaggccgugaacaaccugguggagcugaaguccacccagcagaaguccauccuccgggucggcacgcugaccagcgacgaccugcucacccuggccgccgaccuggagaagcucaagagcaaggugauccgcaccgagcggccccuguccagcgggguguacaugggcaaccuguccacgcagcagcucgagcagcgccgggcccugcugaaccucaucgggauggucggcggcgcgcaggggacccagccgggccgcgacgggguggugcgggucugggacgugaagaaccccgaccugcugaacaaccaguucggcaccaugcccagccucacccuggccugccugacgaagcagggccagguggaccucaacgacgccguccuggcccugaccgaccucgggcugaucuacaccgcgaaguaccccaacuccagcgaccuggaccgccucucccagagccacccgauccugaacaugguggacaccaagaaguccagccugaacaucagcggcuucaacuucucccucggggccgccgugaaggccggcgccugcaugcuggacgggggcaacaugcuggagacgaucaaggucacgccccagaccauggacggcauccucaagagcauccugaaggugaagaagucccuggggauguucgugagcgacacccccggcgagcggaaccccuacgagaacauccucuacaagaucugccuguccggggacggcuggccguacaucgcgagccgcaccuccaucgucgggcgggccugggagaacaccaccguggaccuggagagcgacggcaagccccacaaggugggcaccgccggguccaacaagagccuccaguccgccggcuuccccacggggcugaccuacagccagcugaugacccugaaggacuccaugaugcagcucgaccccagcgccaagaccuggaucgacaucgagggccgcccggaggaccccgucgagaucgcgcuguaccagcccauguccgggugcuacauccacuucuuccgggagcccacggaccugaagcaguucaagcaggacgccaaguacagccacggcaucgacguggccgaccucuucccggcccagcccggccugaccuccgccgucaucgaggcgcugccccgcaacauggugcugaccugccaggggagcgacgacaucaagcggcuccuggacagccagggccgccgcgacaucaagcucaucgacaucgcccuguccaaggccgacagccggcgcuucgagaacgccgugugggaccagugcaaggaccugugccacaugcacaccggggucgugguggagaagaagaagcggggcgggaaggaggagaucacgccccacugcgcccucauggacugcaucauguacgacgcggccgucuccggcggccugaacaucccggugcugcgcgccgugcucccccgggacauggucuuccgcaccagcucccccaagguggugcugugaggacuaguaauaaggaaacuguaugaaugucugugggcaggaagugaagagauccuucuguaaagguuuuuggaauuaugucugcugaauaauaaacuuuuuugaaauaauaaaucugguagaaaaaugagaucuaaaaaaaaaaaaaaaaaaaaaaaaaaaaaaaaaaaaaaaaaaaaaaaaaaaaaaaaaaaaaaaaaaaaaaaaaaaaaaaaaaaaaaaaaaaaaaaaaaaa

SEQ ID NO: 18930 - RNA, 2085 nt, Artificial Sequence
  mRNA product Design b-4 (A100) comprising derived and/or modified sequence from LASV(Lassa virus/H.sapiens-wt/NGA/2015/ISTH_0543;Clade II)__AVO03640__SP-HsPLAT_NP(2-569) (opt1)
aggagagucccgcagucggcguccagcggcucugcuuguucgugugugugucguugcaggccuuauucaagcuuaccauggacgccaugaagcgcggccugugcugcgugcuccugcugugcggggccgucuucgugagccccagcgccuccaaggaggugaaguccuuccuguggacccagagccuccgccgggagcugagcggcuacugcuccaacaucaagcugcaggucgugaaggacgcccaggcgcuccugcacgggcuggacuucagcgagguguccaacguccagcgccucaugcggaagcagaagcgcgacgacagcgaccugaagcggcugcgcgaccucaaccaggccgugaacaaccugguggagcugaaguccacccagcagaaguccauccuccgggucggcacgcugaccagcgacgaccugcucacccuggccgccgaccuggagaagcucaagagcaaggugauccgcaccgagcggccccuguccagcgggguguacaugggcaaccuguccacgcagcagcucgagcagcgccgggcccugcugaacaugaucgggauggucggcggcgcgcaggggacccagccgggccgcgacgggguggugcgggucugggacgugaagaaccccgaccuccugaacaaccaguucggcaccaugcccagccugacccucgccugccugacgaagcagggccagguggaccugaacgacgccguccucgcccugaccgaccuggggcucaucuacaccgcgaaguaccccaacuccagcgaccuggaccgccugucccagagccacccgauccucaacaugguggacaccaagaaguccagccugaacaucagcggcuacaacuucucccugggggccgccgugaaggccggcgccugcaugcucgacgggggcaacaugcuggagacgaucaaggucacgccccagaccauggacggcauccucaagagcauccugaaggugaagaagucccuggggauguucgugagcgacacccccggcgagcggaaccccuacgagaacauccuguacaagaucugccucuccggggacggcuggccguacaucgcgagccgcaccuccaucgucgggcgggccugggagaacaccaccguggaccuggagagcgacggcaagccccagaaggugggcuccgccgggagcaacaagucccugcagagcgccggcuuccccaccgggcucacguacucccagcugaugacccugaaggacagcaugaugcagcuggaccccuccgccaagaccuggaucgacaucgagggccgcccggaggaccccgucgagaucgcgcucuaccagcccaugagcgggugcuacauccacuucuuccgggagcccaccgaccugaagcaguucaagcaggacgccaaguacucccacggcaucgacguggccgaccuguucccggcccagcccggccucacgagcgccgucaucgaggcgcugccccgcaacauggugcugaccugccaggggagcgacgacaucaagcggcuccuggacucccagggccgcaaggacaucaagcugaucgacaucgcccucagcaaggccgacucccgccgguucgagaacgccgugugggaccagugcaaggaccugugccacaugcacaccggggucgugguggagaagaagaagcgcggcgggaaggaggagaucacgccccacugcgcccugauggacugcaucauguacgacgcggccgucagcggcggccucaacaucccggugcugcgggccgugcugccccgcgacauggucuuccggaccuccagccccaagguggugcucugaggacuaguaauaaggaaacuguaugaaugucugugggcaggaagugaagagauccuucuguaaagguuuuuggaauuaugucugcugaauaauaaacuuuuuugaaauaauaaaucugguagaaaaaugagaucuaaaaaaaaaaaaaaaaaaaaaaaaaaaaaaaaaaaaaaaaaaaaaaaaaaaaaaaaaaaaaaaaaaaaaaaaaaaaaaaaaaaaaaaaaaaaaaaaaaaa

SEQ ID NO: 18931 - RNA, 2085 nt, Artificial Sequence
  mRNA product Design b-4 (A100) comprising derived and/or modified sequence from LASV(Lassa virus/H.sapiens-wt/NGA/2016/ISTH_0009;Clade II)__AVO03572__SP-HsPLAT_NP(2-569) (opt1)
aggagagucccgcagucggcguccagcggcucugcuuguucgugugugugucguugcaggccuuauucaagcuuaccauggacgccaugaagcgcggccugugcugcgugcuccugcugugcggggccgucuucgugagccccagcgccuccaaggaggugaaguccuuccuguggacccagagccuccgccgggagcugagcggcuacugcuccaacaucaagcugcaggucgugaaggacgcccaggcgcuccugcacgggcuggacuucagcgagguguccaacguccagcgccucaugcggaagcagaagcgcgacgacagcgaccugaagcggcugcgcgaccucaaccaggccgugaacaaccugguggagcugaaguccacccagcagaaguccauccuccgggucggcacgcugaccagcgacgaccugcucacccuggccgccgaccuggagaagcucaagagcaaggugauccgcaccgagcggccccuguccagcgggguguacaugggcaaccuguccacgcagcagcucgagcagcgccgggcccugcugaacaugaucgggauggucggcggcgcgcaggggacccagccgggccgcgacgggguggugcgggucugggacgugaagaaccccgaccuccugaacaaccaguucggcaccaugcccagccugacccucgccugccugacgaagcagggccagguggaccugaacgacgccguccucgcccugaccgaccuggggcucaucuacaccgcgaaguaccccaacuccagcgaccuggaccgccugucccagagccacccgauccucaacaugguggacaccaagaaguccagccugaacaucagcggcuacaacuucucccugggggccgccgugaaggccggcgccugcaugcucgacgggggcaacaugcuggagacgaucaaggucacgccccagaccauggacggcauccucaagagcauccugaaggugaagaagucccuggggauguucgugagcgacacccccggcgagcggaaccccuacgagaacauccuguacaagaucugccucuccggggacggcuggccguacaucgcgagccgcaccuccaucgucgggcgggccugggagaacaccaccguggaccuggagagcgacggcaagccccagaaggugggcuccgccgggagcaacaagucccugcagagcgccggcuuccccaccgggcucacguacucccagcugaugacccugaaggacagcaugaugcagcuggaccccuccgccaagaccuggaucgacaucgagggccgcccggaggaccccgucgagaucgcgcucuaccagcccaugagcgggugcuacauccacuucuuccgggagcccaccgaccugaagcaguucaagcaggacgccaaguacucccacggcaucgacguggccgaccuguucccggcccagcccggccucacgagcgccgucaucgaggcgcugccccgcaacauggugcugaccugccaggggagcgacgacaucaagcggcuccuggacucccagggccgccgcgacaucaagcugaucgacaucgcccucagcaaggccgacucccggcgcuucgagaacgccgugugggaccagugcaaggaccugugccacaugcacaccggggucgugguggagaagaagaagcggggcgggaaggaggagaucacgccccacugcgcccugauggacugcaucauguacgacgcggccgucagcggcggccucaacaucccggugcugcgcgccgugcugccccgggacauggucuuccgcaccuccagccccaagguggugcucugaggacuaguaauaaggaaacuguaugaaugucugugggcaggaagugaagagauccuucuguaaagguuuuuggaauuaugucugcugaauaauaaacuuuuuugaaauaauaaaucugguagaaaaaugagaucuaaaaaaaaaaaaaaaaaaaaaaaaaaaaaaaaaaaaaaaaaaaaaaaaaaaaaaaaaaaaaaaaaaaaaaaaaaaaaaaaaaaaaaaaaaaaaaaaaaaa

SEQ ID NO: 18932 - RNA, 2085 nt, Artificial Sequence
  mRNA product Design b-4 (A100) comprising derived and/or modified sequence from LASV(Lassa virus/H.sapiens-wt/NGA/2016/ISTH_0017;Clade II)__AVO03568__SP-HsPLAT_NP(2-569) (opt1)
aggagagucccgcagucggcguccagcggcucugcuuguucgugugugugucguugcaggccuuauucaagcuuaccauggacgccaugaagcgcggccugugcugcgugcuccugcugugcggggccgucuucgugagccccagcgccuccaaggaggugaaguccuuccuguggacccagagccuccgccgggagcugagcggcuacugcuccagcaucaagcugcaggucgugaaggacgcccaggcgcuccugcacgggcuggacuucuccgaggugagcaacguccagcgccucaugcggaagcagaagcgcgacgacuccgaccugaagcggcugcgcgaccucaaccaggccgugaacaaccugguggagcucaagagcacccagcagaaguccauccugcgggucggcacgcugaccagcgacgaccugcucacccuggccgccgaccuggagaagcucaaguccaaggugauccgcaccgagcggccccugagcuccgggguguacaugggcaaccugagcacgcagcagcucgagcagcgccgggcccugcugaacaugaucgggauggcgggcggcgcccaggggacccagccgggccgcgacggggucgugcgggugugggacgucaagaaccccgaccuccugaacaaccaguucggcaccaugcccucccugacccucgccugccugacgaagcagggccagguggaccugaacgacgccgugcucgcgcugaccgaccuggggcucaucuacaccgccaaguaccccaacagcuccgaccuggaccgccugagccagagccacccgauccucaacauggucgacaccaagaaguccagccugaacaucuccggcuacaacuucagccugggggccgccgugaaggccggcgcgugcaugcucgacgggggcaacaugcuggagacgaucaaggugacgccccagaccauggacggcauccugaaguccauccucaaggucaagcggagccuggggauguucguguccgacgcccccggcgagcgcaaccccuacgagaacauccuguacaagaucugccucagcggggacggcuggccguacaucgccucccggaccagcaucguggggcgcgccugggagaacaccaccgucgaccuggaguccgacggcaagccccagaaggugggcgccaccgggagcaacaagucccugcagagcgcgggcuuccccaccgggcucacguacucccagcugaugacccugaaggacagcaugaugcagcuggaccccuccgccaagaccuggaucgacaucgagggccggccggaggaccccguggaggucgcccucuaccagcccgugagcgggugcuacauccacuucuuccgcgagcccaccgaccugaagcaguucaagcaggacgccaaguacucccacggcaucgacgucgccgaccuguucccggcgcagcccggccucacgagcgccgugaucgaggcccugccccggaacauggugcugaccugccaggggagcgacgacaucaagaagcuccuggacucccagggccgcaaggacaucaagcugaucgacaucgcccucagcaaggccgacucccgccgguucgagaacgcggucugggaccagugcaaggaccugugccacaugcacaccggggugguggucgagaagaagaagcgcggcgggaaggaggagaucacgccccacugcgcccugauggacugcaucauguacgacgccgccgugagcggcggccucaacaucccggugcugcgggcgguccugccccgcgacaugguguuccggaccuccagccccaaggugguccucugaggacuaguaauaaggaaacuguaugaaugucugugggcaggaagugaagagauccuucuguaaagguuuuuggaauuaugucugcugaauaauaaacuuuuuugaaauaauaaaucugguagaaaaaugagaucuaaaaaaaaaaaaaaaaaaaaaaaaaaaaaaaaaaaaaaaaaaaaaaaaaaaaaaaaaaaaaaaaaaaaaaaaaaaaaaaaaaaaaaaaaaaaaaaaaaaa

SEQ ID NO: 18933 - RNA, 2085 nt, Artificial Sequence
  mRNA product Design b-4 (A100) comprising derived and/or modified sequence from LASV(Lassa virus/H.sapiens-wt/NGA/2018/ISTH_0959;Clade II)__AVV65100__SP-HsPLAT_NP(2-569) (opt1)
aggagagucccgcagucggcguccagcggcucugcuuguucgugugugugucguugcaggccuuauucaagcuuaccauggacgccaugaagcgcggccugugcugcgugcuccugcugugcggggccgucuucgugagccccagcgccuccaaggaggugaaguccuuccuguggacccagagccuccgccgggagcugagcggcuacugcuccaacaucaagcugcaggucgugaaggacgcccaggcgcuccugcacgggcuggacuucagcgagguguccaacguccagcgccucaugcggaagcagaagcgcgacgacagcgaccugaagcggcugcgcgaccucaaccaggccgugaacaaccugguggagcugaaguccacccagcagaaguccauccuccgggucggcacccugaccagcgacgaccugcucacccuggccgccgaccuggagaagcucaagagcaaggugauccgcaccgagcggccccuguccagcgggguguacaugggcaaccuguccacgcagcagcucgagcagcgccgggcccugcugaaccucaucgggauggucggcggcgcgcaggggacccagccgggccgcgacgggguggugcgggucugggacgugaagaaccccgaccugcugaacaaccaguucggcaccaugcccagccucacccuggccugccugacgaagcagggccagguggaccucaacgacgucgugcuggcccugaccgaccucgggcugaucuacaccgccaaguaccccaacuccagcgaccuggaccgccucucccagagccacccgauccugaacaugguggacaccaagaaguccagccugaacaucagcggcuucaacuucucccucggggcggccgucaaggccggcgccugcaugcuggacgggggcaacaugcuggagacgaucaaggugacgccccagaccauggacggcauccucaagagcauccugaaggugaagaagucccuggggauguucgucagcgacacccccggcgagcggaaccccuacgagaacauccucuacaagaucugccuguccggggacggcuggccguacaucgccagccgcaccuccaucguggggcgggcgugggagaacaccaccguggaccuggagagcgacggcaagccccacaaggucggcaccgccggguccaacaagagccuccaguccgccggcuuccccacggggcugaccuacagccagcugaugacccugaaggacuccaugaugcagcucgaccccagcgccaagaccuggaucgacaucgagggccgcccggaggaccccguggagaucgcccuguaccagcccauguccgggugcuacauccacuucuuccgggagcccacggaccugaagcaguucaagcaggacgcgaaguacagccacggcaucgacgucgccgaccucuucccggcccagcccggccugaccuccgccgugaucgaggcccugccccgcaacauggugcugaccugccaggggagcgacgacaucaagcggcuccuggacagccagggccgcaaggacaucaagcucaucgacaucgcgcuguccaagaccgacagccgccgguucgagaacgccgucugggaccagugcaaggaccugugccacaugcacacgggggugguggucgagaagaagaagcgcggcgggaaggaggagaucacgccccacugcgcccucauggacugcaucauguacgacgccgccguguccggcggccugaacaucccggugcugcgggcgguccucccccgcgacaugguguuccggaccagcucccccaaggugguccugugaggacuaguaauaaggaaacuguaugaaugucugugggcaggaagugaagagauccuucuguaaagguuuuuggaauuaugucugcugaauaauaaacuuuuuugaaauaauaaaucugguagaaaaaugagaucuaaaaaaaaaaaaaaaaaaaaaaaaaaaaaaaaaaaaaaaaaaaaaaaaaaaaaaaaaaaaaaaaaaaaaaaaaaaaaaaaaaaaaaaaaaaaaaaaaaaa

SEQ ID NO: 18934 - RNA, 2085 nt, Artificial Sequence
  mRNA product Design b-4 (A100) comprising derived and/or modified sequence from LASV(LASV003-NIG-2008;Clade II)__AIT17581__SP-HsPLAT_NP(2-569) (opt1)
aggagagucccgcagucggcguccagcggcucugcuuguucgugugugugucguugcaggccuuauucaagcuuaccauggacgccaugaagcgcggccugugcugcgugcuccugcugugcggggccgucuucgugagccccagcgccuccaaggaggugaaguccuuccuguggacccagagccuccgccgggagcugagcggcuacugcuccagcaucaagcugcaggucgugaaggacgcccaggcgcuccugcacgggcuggacuucuccgaggugagcaacguccagcgccucaugcggaagcagaagcgcgacgacuccgaccugaagcggcugcgcgaccucaaccaggccgugaacaaccugguggagcucaagagcacccagcagaaguccguccugcgggugggcacccugaccagcgacgaccugcucacccuggccgccgaccuggagaagcucaaguccaaggugauccgcaccgagcggccccugagcuccggggucuacaugggcaaccugagcgcccagcagcucgagcagcgccggacgcugcugaacaugaucgggauggugggcggcgcgcaggggacccagccgggccgcgacggggugguccgggugugggacgugaagaaccccgaccuccugaacaaccaguucggcaccaugcccucccugacccucgccugccugacgaagcaggggcaggucgaccugaacgacguggugcucgcccugaccgaccugggccucaucuacaccgccaaguaccccaacagcuccgaccuggaccgccugagccagagccacccgauccucuccauggucgacaccaagaaguccagccugaacaucagcggcuacaacuucucccugggggcggccgugaaggccggcgccugcaugcucgacgggggcaacaugcuggagacgaucaaggugacgccccagaccauggacggcauccucaagagcauccugaaggucaagaagucccuggggauguucgugagcgacacccccggcgagcggaaccccuacgagaacauccuguacaagaucugccucuccggggacggcuggccguacaucgccagccgcaccuccaucguggggcgggcgugggagaacaccaccgucgaccuggagagcgacggcaagccccagaaggugggcaccgccggguccaacaagagccugcaguccgccggcuuccccacggggcucaccuacagccagcugaugacccugaaggacuccaugaugcagcuggaccccagcgccaagaccuggaucgacaucgagggccgcccggaggaccccgucgagaucgcccucuaccagcccauguccgggugcuacauccacuucuuccgggagcccacggaccugaagcaguucaagcaggacgcgaaguacagccacggcaucgacgugaccgaccuguucccggcccagcccggccucaccagcgccgugaucgaggcccugccccgcaacaugguccugaccugccagggguccgacgacaucaagcggcuccuggacagccagggccgccgcgacaucaagcugaucgacaucgcccucuccaaggcggacagccggcgcuucgagaacgccgugugggaccagugcaaggaccugugccacaugcacacggggguggucguggagaagaagaagcggggcgggaaggaggagaucacgccccacugcgcccugauggacugcaucauguacgacgccgccguguccggcggccucaacaucccgguccugcgcgcggugcugccccgggacaugguguuccgcaccagcucccccaaggucgugcucugaggacuaguaauaaggaaacuguaugaaugucugugggcaggaagugaagagauccuucuguaaagguuuuuggaauuaugucugcugaauaauaaacuuuuuugaaauaauaaaucugguagaaaaaugagaucuaaaaaaaaaaaaaaaaaaaaaaaaaaaaaaaaaaaaaaaaaaaaaaaaaaaaaaaaaaaaaaaaaaaaaaaaaaaaaaaaaaaaaaaaaaaaaaaaaaaa

SEQ ID NO: 18935 - RNA, 2085 nt, Artificial Sequence
  mRNA product Design b-4 (A100) comprising derived and/or modified sequence from LASV(LASV035-NIG-2009;Clade II)__AIT17589__SP-HsPLAT_NP(2-569) (opt1)
aggagagucccgcagucggcguccagcggcucugcuuguucgugugugugucguugcaggccuuauucaagcuuaccauggacgccaugaagcgcggccugugcugcgugcuccugcugugcggggccgucuucgugagccccagcgccuccaaggaggugaaguccuuccuguggacccagagccuccgccgggagcugagcggcuacugcuccagcaucaagcugcaggucgugaaggacgcccaggcgcuccugcacgggcuggacuucuccgaggugagcaacguccagcgccucaugcggaagcagaagcgcgacgacuccgaccugaagcggcugcgcgaccucaaccaggccgugaacaaccugguggagcucaagagcacccagcagaaguccauccugcgggucggcacgcugaccagcgacgaccugcucacccuggccgccgaccuggagaagcucaaguccaaggugauccgcaccgagcggccccugagcuccgggguguacaugggcaaccugagcgcccagcagcucgagcagcgccgggcgcugcugaacaugaucgggauggucggcggcgcccaggggacgcagccgggccgcgacgggguggugcgggucugggacgugaagaaccccgaccuccugaacaaccaguucggcaccaugcccucccugacccucgccugccugaccaagcagggccagguggaccugaacgacgccguccucgcgcugacggaccuggggcucaucuacaccgccaaguaccccaacagcuccgaccuggaccgccugagccagagccacccgauccucaacaugguggacaccaagaaguccagccugaacaucuccggcuacaacuucagccugggggccgccgugaaggccggcgcgugcaugcucgacgggggcaacaugcuggagaccaucaaggucacgccccagaccauggacggcauccugaaguccauccucaaggugaagcggagccuggggauguucguguccgacacccccggcgagcgcaaccccuacgagaacauccuguacaagaucugccucagcggggacggcuggccguacaucgccucccggaccagcaucgucgggcgcgccugggagaacacgaccguggaccuggaguccgacggcaagccccagaaggugggcaccaccgggagcaacaagucccugcagagcgccggcuuccccacggggcucaccuacucccagcugaugacccugaaggacagcaugaugcagcuggaccccuccgccaagaccuggaucgacaucgagggccggccggaggaccccgucgagaucgcgcucuaccagcccaugagcgggugcuacauccacuucuuccgcgagcccacggaccugaagcaguucaagcaggacgccaaguacucccacggcaucgacguggccgaccuguucccggcccagcccggccucaccagcgccgucaucgaggcgcugccccggaacauggugcugaccugccaggggagcgacgacaucaagaagcuccuggacucccagggccgccgcgacaucaagcugaucgacaucgcccucagcaaggccgacucccggaaguucgagaacgccgugugggaccagugcaaggaccugugccacaugcacaccggggucgugguggagaagaagaagcgcggcgggaaggaggagaucacgccccacugcgcccugauggacugcaucauguacgacgcggccgucagcggcggccucaacaucccggugcugcgggccgugcugccccgcgacauggucuuccggaccuccagccccaagguggugcucugaggacuaguaauaaggaaacuguaugaaugucugugggcaggaagugaagagauccuucuguaaagguuuuuggaauuaugucugcugaauaauaaacuuuuuugaaauaauaaaucugguagaaaaaugagaucuaaaaaaaaaaaaaaaaaaaaaaaaaaaaaaaaaaaaaaaaaaaaaaaaaaaaaaaaaaaaaaaaaaaaaaaaaaaaaaaaaaaaaaaaaaaaaaaaaaaa

SEQ ID NO: 18936 - RNA, 2085 nt, Artificial Sequence
  mRNA product Design b-4 (A100) comprising derived and/or modified sequence from LASV(LASV1000-NIG-2009;Clade II)__AIT17783__SP-HsPLAT_NP(2-569) (opt1)
aggagagucccgcagucggcguccagcggcucugcuuguucgugugugugucguugcaggccuuauucaagcuuaccauggacgccaugaagcgcggccugugcugcgugcuccugcugugcggggccgucuucgugagccccagcgccuccaaggaggugaaguccuuccuguggacccagagccuccgccgggagcugagcggcuacugcuccaacaucaagcugcaggucgugaaggacgcccaggcgcuccugcacgggcuggacuucagcgagguguccaacguccagcgccucaugcggaagcagaagcgcgacgacagcgaccugaagcggcugcgcgaccucaaccaggccgugaacaaccugguggagcugaaguccacccagcagaaguccauccuccgggucggcacgcugaccagcgacgaccugcucacccuggccgccgaccuggagaagcucaagagcaaggugauccgcaccgagcggccccuguccagcgggguguacaugggcaaccuguccacgcagcagcucgagcagcgccgggcccugcugaacaugaucgggauggucggcggcgcgcaggggacccagccgggccgcgacgggguggugcgggucugggacgugaagaaccccgaccuccugaacaaccaguucggcaccaugcccagccugacccucgccugccugacgaagcagggccagguggaccugaacgacgucgugcucgcccugaccgaccuggggcucaucuacaccgccaaguaccccaacuccagcgaccuggaccgccugucccagagccacccgauccucaacaugguggacaccaagaaguccagccugaacaucagcggcuacaacuucucccugggggcggccgucaaggccggcgccugcaugcucgacgggggcaacaugcuggagacgaucaaggugacgccccagaccauggacggcauccucaagagcauccugaaggugaagaagucccuggggauguucgucagcgacacccccggcgagcggaaccccuacgagaacauccuguacaagaucugccucuccggggacggcuggccguacaucgccagccgcaccuccaucguggggcgggcgugggagaacaccaccguggaccuggagagcgacggcaagccccagaaggucggcaccgccggguccaacaagagccugcaguccgccggcuuccccacggggcucaccuacagccagcugaugacccugaaggacuccaugaugcagcuggaccccagcgccaagaccuggaucgacaucgagggccgcccggaggaccccguggagaucgcccucuaccagcccgucuccgggugcuacauccacuucuuccgggagcccacggaccugaagcaguucaagcaggacgcgaaguacagccacggcaucgacguggccgaccuguucccggcccagcccggccucaccuccgccgugaucgaggcccugccccgcaacaugguccugaccugccaggggagcgacgacaucaagcggcuccuggacagccagggccgccgcgacaucaagcugaucgacaucgcgcucuccaaggccgacagccggcgcuucgagaacgccgugugggaccagugcaaggaccugugccacaugcacaccgggguggucguggagaagaagaagcggggcgggaaggaggagaucacgccccacugcgcccugauggacugcaucauguacgacgccgcgguguccggcggccucaacaucccgguccugcgcgccgugcugccccgggacaugguguuccgcaccagcucccccaaggucgugcucugaggacuaguaauaaggaaacuguaugaaugucugugggcaggaagugaagagauccuucuguaaagguuuuuggaauuaugucugcugaauaauaaacuuuuuugaaauaauaaaucugguagaaaaaugagaucuaaaaaaaaaaaaaaaaaaaaaaaaaaaaaaaaaaaaaaaaaaaaaaaaaaaaaaaaaaaaaaaaaaaaaaaaaaaaaaaaaaaaaaaaaaaaaaaaaaaa

SEQ ID NO: 18937 - RNA, 2085 nt, Artificial Sequence
  mRNA product Design b-4 (A100) comprising derived and/or modified sequence from LASV(LASV221-NIG-2010;Clade II)__AIT17625__SP-HsPLAT_NP(2-569) (opt1)
aggagagucccgcagucggcguccagcggcucugcuuguucgugugugugucguugcaggccuuauucaagcuuaccauggacgccaugaagcgcggccugugcugcgugcuccugcugugcggggccgucuucgugagccccagcgccuccaaggaggugaaguccuuccuguggacccagagccuccgccgggagcugagcggcuacugcuccagcaucaagcugcaggucgugaaggacgcccaggcgcuccugcacgggcuggacuucuccgaggugagcaacguccagcgccucaugcggaagcagcgccgggacgacuccgaccugaagcgccugcgggaccucaaccaggccgugaacaaccugguggagcucaagagcacccagcagaaguccauccugcgcgucggcacgcugaccagcgacgaccugcucacccuggccgccgaccuggagaagcucaaguccaaggugauccggaccgagcgcccccugagcuccgggguguacaugggcaaccugagcacgcagcagcucgagcagcggcgcgcccugcugaacaugaucgggauggucggcggcgcgcaggggacccagccgggccgggacgggguggugcgcgucugggacgugaagaaccccgaccuccugaacaaccaguucggcaccaugcccucccugacccucgccugccugacgaagcagggccagguggaccugaacgacgccguccucgcccugaccgaccuggggcucaucuacaccgcgaaguaccccaacagcuccgaccuggaccggcugagccagagccacccgauccucaacaugguggacaccaagaaguccagccugaacaucuccggcuacaacuucagccugggggccgccgugaaggccggcgccugcaugcucgacgggggcaacaugcuggagacgaucaaggucacgccccagaccguggacggcauccugaaguccauccucaaggugaagcgcagccuggggauguucgucuccgacacccccggcgagcggaaccccuacgagaacauccuguacaagaucugccucagcggggacggcuggccguacaucgcgucccgcaccagcaucguggggcgggccugggagaacaccaccguggaccuggaguccgacggcaagccccagaaggucggcaccgccgggagcaacaagucccugcagagcgccggcuuccccacggggcucaccuacucccagcugaugacccugaaggacagcaugaugcagcuggaccccuccgccaagaccuggaucgacaucgagggccgcccggaggaccccguggagaucgcgcucuaccagcccaugagcgggugcuacauccacuucuuccgggagcccacggaccugaagcaguucaagcaggacgccaaguacucccacggcaucgacgucgccgaccuguucccggcccagcccggccucaccagcgccgugaucgaggcgcugccccgcaacauggugcugaccugccaggggagcgacgacaucaagcgccuccuggacucccagggccggcgcgacaucaagcugaucgacaucgcccucagcaaggccgacucccggaaguucgagaacgccgucugggaccagugcaaggaccugugccacaugcacaccggggugguggucgagaagaagaagcgcggcgggaaggaggagaucacgccccacugcgcccugauggacugcaucauguacgacgcggccgugagcggcggccucaacaucccggugcugcgggccguccugccccgcgacaugguguuccggaccuccagccccaaggugguccucugaggacuaguaauaaggaaacuguaugaaugucugugggcaggaagugaagagauccuucuguaaagguuuuuggaauuaugucugcugaauaauaaacuuuuuugaaauaauaaaucugguagaaaaaugagaucuaaaaaaaaaaaaaaaaaaaaaaaaaaaaaaaaaaaaaaaaaaaaaaaaaaaaaaaaaaaaaaaaaaaaaaaaaaaaaaaaaaaaaaaaaaaaaaaaaaaa

SEQ ID NO: 18938 - RNA, 2085 nt, Artificial Sequence
  mRNA product Design b-4 (A100) comprising derived and/or modified sequence from LASV(LASV237-NIG-2010;Clade II)__AIT17639__SP-HsPLAT_NP(2-569) (opt1)
aggagagucccgcagucggcguccagcggcucugcuuguucgugugugugucguugcaggccuuauucaagcuuaccauggacgccaugaagcgcggccugugcugcgugcuccugcugugcggggccgucuucgugagccccagcgccuccaaggaggugaaguccuuccuguggacccagagccuccgccgggagcugagcggcuacugcuccaacaucaagcugcaggucgugaaggacgcccaggcgcuccugcacgggcuggacuucagcgagguguccaacguccagcgccucaugcggaagcagaagcgcgacgacagcgaccugaagcggcugcgcgaccucaaccaggccgugaacaaccugguggagcugaaguccacccagcagaaguccauccuccgggucggcacccugaccagcgacgaccugcucacccuggccgccgaccuggagaagcucaagagcaaggugauccgcaccgagcggccccuguccagcgggguguacaugggcaaccuguccacgcagcagcucgagcagcgccgggcccugcugaacaugaucgggauggucggcggcgcgcaggggacccagccgggccgcgacgggguggugcgggucugggacgugaagaaccccgaccuccugaacaaccaguucggcaccaugcccagccugacccucgccugccugacgaagcagggccagguggaccugaacgacgccguccucgcccugaccgaccuggggcucaucuacaccgcgaaguaccccaacuccagcgaccuggaccgccugucccagagccacccgauccucaacaugguggacaucaagaaguccagccugaacaucagcggcuacaacuucucccugggggccgccgugaaggccggcgccugcaugcucgacgggggcaacaugcuggagaccaucaaggucacgccccagaccauggacggcauccucaagagcauccugaaggugaagcggucccuggggauguucgugagcgacacccccggcgagcgcaaccccuacgagaacauccuguacaagaucugccucuccggggacggcuggccguacaucgcgagccggaccuccaucgucgggcgcgccugggagaacacgaccguggaccuggagagcgacggcaagccccagaaggugggcuccgccgggagcaacaagucccugcagagcgccggcuuccccaccgggcucaccuacucccagcugaugacgcugaaggacagcaugaugcagcuggaccccuccgccaagaccuggaucgacaucgagggccggccggaggaccccgucgagaucgcgcucuaccagcccaugagcgggugcuacauccacuucuuccgcgagcccaccgaccugaagcaguucaagcaggacgccaaguacucccacggcaucgacguggccgaccuguucccggcccagcccggccucaccagcgccgucaucgaggcgcugccccggaacauggugcugacgugccaggggagcgacgacaucaagcgccuccuggacucccagggccgccgggacaucaagcugaucgacaucgcccucagcaaggccgacucccgccgguucgagaacgccgugugggaccagugcaaggaccugugccacaugcacaccggggucgugguggagaagaagaagcgcggcgggaaggaggagaucacgccccacugcgcccugauggacugcaucauguacgacgcggccgucagcggcggccucaacaucccggugcugcgggccgugcugccccgcgacauggucuuccggaccuccagccccaagguggugcucugaggacuaguaauaaggaaacuguaugaaugucugugggcaggaagugaagagauccuucuguaaagguuuuuggaauuaugucugcugaauaauaaacuuuuuugaaauaauaaaucugguagaaaaaugagaucuaaaaaaaaaaaaaaaaaaaaaaaaaaaaaaaaaaaaaaaaaaaaaaaaaaaaaaaaaaaaaaaaaaaaaaaaaaaaaaaaaaaaaaaaaaaaaaaaaaaa

SEQ ID NO: 18939 - RNA, 2085 nt, Artificial Sequence
  mRNA product Design b-4 (A100) comprising derived and/or modified sequence from LASV(LASV253-NIG-2011;Clade II)__AIT17671__SP-HsPLAT_NP(2-569) (opt1)
aggagagucccgcagucggcguccagcggcucugcuuguucgugugugugucguugcaggccuuauucaagcuuaccauggacgccaugaagcgcggccugugcugcgugcuccugcugugcggggccgucuucgugagccccagcgccuccaaggaggugaaguccuuccuguggacccagagccuccgccgggagcugagcggcuacugcuccagcaucaagcugcaggucgugaaggacgcccaggcgcuccugcacgggcuggacuucuccgaggugagcaacguccagcgccucaugcggaagcagaagcgcgacgacuccgaccugaagcggcugcgcgaccucaaccaggccgugaacaaccugguggagcucaagagcacccagcagaaguccguccugcgggugggcacccugaccagcgacgaccugcucacccuggccgccgaccuggagaagcucaaguccaaggugauccgcaccgagcggccccugagcuccggggucuacaugggcaaccugagcacgcagcagcucgagcagcgccgggcccugcugaacaugaucgggauggugggcggcgcgcaggggacccagccgggccgcgacggggugguccgggugugggacgugaagaaccccgaccuccugaacaaccaguucggcaccaugcccucccugacccucgccugccugacgaagcaggggcaggucgaccugaacgacguggugcucgcccugaccgaccugggccucaucuacaccgccaaguaccccaacagcuccgaccuggaccgccugagccagagccacccgauccucaacauggucgacaccaagaaguccagccugaacaucuccggcuacaacuucagccugggggcggccgugaaggccggcgccugcaugcucgacgggggcaacaugcuggagacgaucaaggugacgccccagaccauggacggcauccugaaguccauccucaaggucaagaagucccuggggauguucgugagcgacacccccggcgagcggaaccccuacgagaacauccuguacaagaucugccucagcggggacggcuggccguacaucgccucccgcaccagcaucguggggcgggcgugggagaacaccaccgucgaccuggaguccgacggcaagccccagaaggugggcaccgccgggagcaacaagucccugcagagcgccggcuuccccacggggcucaccuacucccagcugaugacccugaaggacagcaugaugcagcuggaccccuccgccaagaccuggaucgacaucgagggccgcccggaggaccccgucgagaucgcccucuaccagcccaugagcgggugcuacauccacuucuuccgggagcccacggaccugaagcaguucaagcaggacgcgaaguacucccacggcaucgacgugaccgaccuguucccggcccagcccggccucaccagcgccgugaucgaggcccugccccgcaacaugguccugaccugccaggggagcgacgacaucaagcggcuccuggacucccagggccgccgcgacaucaagcugaucgacaucgcccucagcaaggcggacucccggcgcuucgagaacgccgugugggaccagugcaaggaccugugccacaugcacacggggguggucguggagaagaagaagcggggcgggaaggaggagaucacgccccacugcgcccugauggacugcaucauguacgacgccgccgugagcggcggccucaacaucccgguccugcgcgcggugcugccccgggacaugguguuccgcaccuccagccccaaggucgugcucugaggacuaguaauaaggaaacuguaugaaugucugugggcaggaagugaagagauccuucuguaaagguuuuuggaauuaugucugcugaauaauaaacuuuuuugaaauaauaaaucugguagaaaaaugagaucuaaaaaaaaaaaaaaaaaaaaaaaaaaaaaaaaaaaaaaaaaaaaaaaaaaaaaaaaaaaaaaaaaaaaaaaaaaaaaaaaaaaaaaaaaaaaaaaaaaaa

SEQ ID NO: 18940 - RNA, 2085 nt, Artificial Sequence
  mRNA product Design b-4 (A100) comprising derived and/or modified sequence from LASV(LASV254-NIG-2011;Clade II)__AIT17675__SP-HsPLAT_NP(2-569) (opt1)
aggagagucccgcagucggcguccagcggcucugcuuguucgugugugugucguugcaggccuuauucaagcuuaccauggacgccaugaagcgcggccugugcugcgugcuccugcugugcggggccgucuucgugagccccagcgccuccaaggaggugaaguccuuccuguggacccagagccuccgccgggagcugagcggcuacugcuccagcaucaagcugcaggucgugaaggacgcccaggcgcuccugcacgggcuggacuucuccgaggugagcaacguccagcgccucaugcggaagcagaagcgcgacgacuccgaccugaagcggcugcgcgaccucaaccaggccgugaacaaccugguggagcucaagagcacccagcagaaguccguccugcgggugggcacgcugaccagcgacgaccugcucacccuggccgccgaccuggagaagcucaaguccaaggugauccgcaccgagcggccccugagcuccggggucuacaugggcaaccugagcacgcagcagcucgagcagcgccgggcccugcugaacaugaucgggauggugggcggcgcgcaggggacccagccgggccgcgacggggugguccgggugugggacgugaagaaccccgaccuccugaacaaccaguucggcaccaugcccucccugacccucgccugccugacgaagcaggggcaggucgaccugaacgacgccgugcucgcccugaccgaccugggccucaucuacaccgcgaaguaccccaacagcuccgaccuggaccgccugagccagagccacccgauccucaacaugguggacaccaagaaguccagccugaacaucuccggcuacaacuucagccugggggccgccgucaaggccggcgccugcaugcucgacgggggcaacaugcuggagacgaucaaggugacgccccagaccauggacggcauccugaaguccauccucaaggugaagaagucccuggggauguucgucagcgacacccccggcgagcggaaccccuacgagaacauccuguacaagaucugccucagcggggacggcuggccguacaucgcgucccgcaccagcaucguggggcgggccugggagaacaccaucguggaccuggaguccgacggcaagccccagaaggucggcaccgccgggagcaacaagucccugcagagcgccggcuuccccaccgggcucacguacucccagcugaugacccugaaggacagcaugaugcagcuggaccccuccgccaagaccuggaucgacaucgagggccgcccggaggaccccguggagaucgcgcucuaccagcccaugagcgggugcuacauccacuucuuccgggagcccaccgaccugaagcaguucaagcaggacgccaaguacucccacggcaucgacgucgccgaccuguucccggcccagcccggccucacgagcgccgugaucgaggcgcugccccgcaacauggugcugaccugccaggggagcgacgacaucaagcggcuccuggacucccagggccgccgcgacaucaagcugaucgacaucgcccucagcaaggccgacucccggcgcuucgagaacgccgucugggaccagugcaaggaccugugccacaugcacaccggggugguggucgagaagaagaagcggggcgggaaggaggagaucacgccccacugcgcccugauggacugcaucauguacgacgcggccgugagcggcggccucaacaucccggugcugcgcgccguccugccccgggacaugguguuccgcaccuccagccccaaggugguccucugaggacuaguaauaaggaaacuguaugaaugucugugggcaggaagugaagagauccuucuguaaagguuuuuggaauuaugucugcugaauaauaaacuuuuuugaaauaauaaaucugguagaaaaaugagaucuaaaaaaaaaaaaaaaaaaaaaaaaaaaaaaaaaaaaaaaaaaaaaaaaaaaaaaaaaaaaaaaaaaaaaaaaaaaaaaaaaaaaaaaaaaaaaaaaaaaa

SEQ ID NO: 18941 - RNA, 2085 nt, Artificial Sequence
  mRNA product Design b-4 (A100) comprising derived and/or modified sequence from LASV(Nig08-04;Clade II)__ADU56611__SP-HsPLAT_NP(2-569) (opt1)
aggagagucccgcagucggcguccagcggcucugcuuguucgugugugugucguugcaggccuuauucaagcuuaccauggacgccaugaagcgcggccugugcugcgugcuccugcugugcggggccgucuucgugagccccagcgccuccaaggaggugaaguccuuccuguggacccagagccuccgccgggagcugagcggcuacugcuccaacaucaagcugcaggucgugaaggacgcccaggcgcuccugcacgggcuggacuucagcgagguguccaacguccagcgccucaugcggaagcagaagcgcgacgacggcgaccugaagcggcugcgcgaccucaaccaggccgugaacaaccugguggagcucaagagcacccagcagaaguccguccugcggguggggacccugaccagcgacgaccugcucacccuggccgccgaccuggagaagcucaaguccaaggugauccgcaccgagcggccccugagcuccggcgucuacauggggaaccugagcacgcagcagcucgagcagcgcaaggcccugcuguccaugaucggcauggugggcggggcgcagggcacccagccggggcgggacggcgugguccgcgugugggacgugaagaaccccgaccuccugaacaaccaguucgggaccaugcccagccugacccucgccugccugacgaagcagggccaggucgaccugaacgacgccgugcucgcccugaccgaccugggccucaucuacaccgcgaaguaccccaacuccagcgaccuggaccggcugucccagagccacccgauccucaacaugguggacaccaagaaguccagccugaacaucagcggguacaacuucucccugggcgccgccgucaaggccggggccugcaugcucgacggcggcaacaugcuggagacgaucaaggugacgccccagaccauggacgggauccucaagagcauccugaaggugaagcgcucccugggcauguucgucagcgacacccccggggagcggaaccccuacgagaacauccuguacaagaucugccucuccggcgacggguggccguacaucgcgagccgcaccuccaucgugggccgggccugggagaacaccaccguggaccuggagagcgacggcaagccccagaaggucgggaccgccggcuccaacaagagccugcaguccgccggguuccccacgggccucaccuacagccagcugaugacccugaaggacuccaugaugcagcuggaccccagcgccaagaccuggaucgacaucgaggggcgcccggaggaccccguggagaucgcgcucuaccagcccauguccggcugcuacauccacuucuuccgggagcccacggaccugaagcaguucaagcaggacgccaaguacagccacggcaucgacgucaccgaccuguucuccgcccagccggggcucaccagcgccgugaucgaggcccugccccgcaacauggugcugaccugccagggcagcgacgacaucaagaagcuccuggacucccaggggcggcgcgacaucaagcugaucgacaucagccucaacaaggcggacucccgccgguucgagaacgccgucugggaccagugcaaggaccugugccacaugcacacgggcgugguggucgagaagaagaagcgcgggggcaaggaggagaucacgccccacugcgcccugauggacugcaucauguucgacgccgccgugagcggcgggcucaacauccccauccugcgggcggugcugccgcgcgacauggucuuccggaccuccagccccaagguggugcucugaggacuaguaauaaggaaacuguaugaaugucugugggcaggaagugaagagauccuucuguaaagguuuuuggaauuaugucugcugaauaauaaacuuuuuugaaauaauaaaucugguagaaaaaugagaucuaaaaaaaaaaaaaaaaaaaaaaaaaaaaaaaaaaaaaaaaaaaaaaaaaaaaaaaaaaaaaaaaaaaaaaaaaaaaaaaaaaaaaaaaaaaaaaaaaaaa

SEQ ID NO: 18942 - RNA, 2088 nt, Artificial Sequence
  mRNA product Design b-4 (A100) comprising derived and/or modified sequence from LASV(GA391;Clade III)__AAA46284__SP-HsPLAT_NP(2-570) (opt1)
aggagagucccgcagucggcguccagcggcucugcuuguucgugugugugucguugcaggccuuauucaagcuuaccauggacgccaugaagcgcggccugugcugcgugcuccugcugugcggggccgucuucgugagccccagcgccuccaaggaggugcgcagcugccuguggacccagucccuccggcgcgagcugagcggcuacugcuccaacaucaagcugcaggucgugaaggacgcccaggcgcuccugcacgggcuggacuucagcgagguguccaacguccagcggcucaugcgcaagcagaagcgggacgacggcgaccugaagcgccugcgggaccucaaccaggccgugaacaaccugguggagcugaaguccacccagcagaaguccguccuccgcguggggacgcugagcuccgacgaccugcucauccuggccgccgaccuggagaagcucaagagcaaggugacccggaccgagcgcccccuguccagcggcgucuacauggggaaccuguccagccagcagcucgaccagcggcgcgcccugcugaacaugaucggcaugaccggcguguccgggggcgggaagggcgcgagcaacgggaucgugcgggucugggacgugaagaacgccgagcuccugaacaaccaguucggcacgaugccgucccugacccucgccugccugaccaagcagggccagguggaccugaacgacgccguccaggcgcucaccgaccuggggcugaucuacacggccaaguaccccaacagcagcgaccucgaccgccugucccagagccaccccauccugaacaugaucgacaccaagaaguccagccucaacaucuccggcuacaacuucagccugggggccgccgugaaggccggcgcgugcaugcuggacggcgggaacaugcucgagaccaucaaggugagcccccagaccauggacggcauccucaagagcauccugaaggucaagaagucccuggggauguucgugagcgacacgccgggcgagcggaaccccuacgagaacauccuguacaagaucugccuguccggggacggcuggagcuacaucgccucccgcaccagcaucgugggccgggccugggagaacaccgucguggaccucgagcaggacaacaagccccagaagaucgggaacggcggguccaacaagagccugcaguccgccggcuucgccgcggggcugaucuacagccagcucaugacccugaaggacuucaagugcuucaaccugauccccaacgccaagacguggauggacaucgagggccgcccggaggaccccguggagaucgcccuguaccagcccuccagcggcugcuacguccacuucuuccgggagcccaccgaccucaagcaguucaagcaggacgccaaguacagccacgggcgcgacgugaccgaccuguucgccgcgcagccgggccugaccuccgccgucaucgaggcccucccccggaacauggugaucacgugccaggggagcgaggacauccgcaagcugcuggagucccagggccgccgggacaucaagcucaucgacaucacccugagcaaggccgacucccgcaaguucgagaacgccgugugggaccaguucaaggaccugugccacaugcacaccggggucgugguggagaagaagaagcggggcggcaaggaggagaucacgccccacugcgcgcucauggacugcaucauguucgacgccgccgucagcgggggccuggacgccaaggugcugcgcgugguccucccccgggacaugguguuccgcaccuccaccccgaaggugguccugugaggacuaguaauaaggaaacuguaugaaugucugugggcaggaagugaagagauccuucuguaaagguuuuuggaauuaugucugcugaauaauaaacuuuuuugaaauaauaaaucugguagaaaaaugagaucuaaaaaaaaaaaaaaaaaaaaaaaaaaaaaaaaaaaaaaaaaaaaaaaaaaaaaaaaaaaaaaaaaaaaaaaaaaaaaaaaaaaaaaaaaaaaaaaaaaaa

SEQ ID NO: 18943 - RNA, 2085 nt, Artificial Sequence
  mRNA product Design b-4 (A100) comprising derived and/or modified sequence from LASV(Nig08-A19;Clade III)__ADU56619__SP-HsPLAT_NP(2-569) (opt1)
aggagagucccgcagucggcguccagcggcucugcuuguucgugugugugucguugcaggccuuauucaagcuuaccauggacgccaugaagcgcggccugugcugcgugcuccugcugugcggggccgucuucgugagccccagcgccuccaaggaggugaaguccuuccuguggacccagucccuccgccgggagcugagcggcuacugcuccaacaucaagcugcaggucgugaaggacgcccaggcgcuccugcacgggcuggacuucagcgagguguccaacguccagcgccucaugcggaagcagaagcgcgacgacggcgaccugaagcggcugcgcgaccucaaccaggccgugaacaaccugguggagcucaagagcacccagcagaaguccguccugcggguggggacccugagcuccgacgaccugcucgugcuggccgccgaccuggagaagcucaagagcaaggucgugcgcaccgagcggccccuguccagcggcaucuacauggggaaccuguccagccagcagcucgaccagcgcaaggcccugcugaacaugaucggcaugaccggcgggaacggcgggcggaacaccacguccgacggcaucgugcgcgucugggacgugaagaacgcggagcuccugaacaaccaguucgggaccaugccgagccugacccucgccugccugaccaagcagggccagguggaccugaacgacgccguccaggcccucacggaccugggccugaucuacaccgcgaaguaccccaacuccagcgaccucgaccggcuggcccagagccaccccauccugaacaugaucgacaccaagaaguccagccucaacaucuccggguacaacuucagccugggcgccgccgugaaggccggggcgugcaugcuggacggcggcaacaugcucgagaccaucaaggugagcccccagacgauggacgggauccucaagagcauccugaaggucaagcgcucccugggcauguucaucagcgacaccccgggggagcggaaccccuacgagaacauccuguacaagaucugccuguccggcgacggguggcccuacaucgccagccgcaccuccaucgugggccgggccugggagaacaccguggucgaccucgagagcgacaacaagccccagaagacgggcaacgggggcuccaacaagagccugcaguccgccggguucgccgcgggccugaccuacagccagcucaugacccugaaggacuccaugcugcagcuggacccgaacgccaagaccuggauggacaucgaggggcgccccgaggaccccguggagaucgcccucuaccagcccagcuccggcugcuacauccacuucuuccgggagccgacggaccugaagcaguucaagcaggacgccaaguacagccacggcaucgacgugaccgaccuguucgccgcgcagcccgggcucaccagcgccgucaucgaggcccugccccgcaacauggugaucacgugccagggcuccgaggacauccggaagcugcucgagagccaggggcgccgcgacaucaagcugaucgacaucucccugagcaaggucgacucccggaaguucgagaacgccgugugggaccaguucaaggaccucugccacaugcacaccggcaucguggucgagaagaagaagcgcgggggcaaggaggagaucacgccccacugcgcccugauggacugcaucauguucgacgcggccgugagcggcgggguggacgccaagguccugcgggccgugcucccgcgcgacaugguguuccggaccuccacccccaaggucgugcugugaggacuaguaauaaggaaacuguaugaaugucugugggcaggaagugaagagauccuucuguaaagguuuuuggaauuaugucugcugaauaauaaacuuuuuugaaauaauaaaucugguagaaaaaugagaucuaaaaaaaaaaaaaaaaaaaaaaaaaaaaaaaaaaaaaaaaaaaaaaaaaaaaaaaaaaaaaaaaaaaaaaaaaaaaaaaaaaaaaaaaaaaaaaaaaaaa

SEQ ID NO: 18944 - RNA, 2085 nt, Artificial Sequence
  mRNA product Design b-4 (A100) comprising derived and/or modified sequence from LASV(G1180-SLE-2010;Clade IV)__AIT17169__SP-HsPLAT_NP(2-569) (opt1)
aggagagucccgcagucggcguccagcggcucugcuuguucgugugugugucguugcaggccuuauucaagcuuaccauggacgccaugaagcgcggccugugcugcgugcuccugcugugcggggccgucuucgugagccccagcgccuccaaggagaucaagagcuuccuguggacccagucccuccgccgggagcugagcggcuacugcuccaacaucaagcuccagguggucaaggacgcccaggcgcugcugcacgggcuggacuucagcgagguguccaacgugcagcgccucaugcggaaggagcgccgggacgacaacgaccugaagcgccugcgggaccucaaccaggccgucaacaaccugguggagcucaagagcacccagcagaaguccauccugcgcgugggcacccugaccagcgacgaccugcucauccuggccgccgaccuggagaagcucaaguccaaggucauccggaccgagcgcccccugagcgccgggguguacaugggcaaccuguccagccagcagcucgaccagcggcgcgcgcugcuguccaugaucgggaugagcuccggcaaccagcgggcccaggccggccgcgacggggugguccgggugugggacgugaagaacgucgagcuccugaacaaccaguucggcaccaugccgagccugacgcucgccugccugaccaagcagggccagguggaccugaacgacgcggugcaggcccucaccgaccuggggcugaucuacaccgccaaguaccccaacacguccgaccucgaccgccugacccagagccaccccauccugaacaugaucgacaccaagaaguccagccucaacaucagcggguacaacuucucccugggcgccgccgucaaggcgggcgccugcaugcuggacgggggcaacaugcucgagaccaucaaggugagcccccagacgauggacgggauccugaaguccauccugaaggugaagaaggcccucggcauguucaucagcgacaccccgggcgagcggaaccccuacgagaacauccuguacaagaucugccuguccggggacggcuggcccuacaucgccagccgcaccuccaucaccgggcgggccugggagaacacggucguggaccucgagagcgacggcaagccccagaaggcgggguccaacaacagcaacaagucccugcagagcgugggcuucaccgccggccugaccuacucccagcucaugacccugaaggacgccaugcugcagcuggacccgaacgccaagacguggauggacaucgaggggcgccccgaggaccccgucgagaucgcccucuaccagcccagcuccggcugcuacauccacuucuuccgggagccgaccgaccugaagcaguucaagcaggacgcgaaguacagccacgggaucgacgugaccgaccuguucgccgcccagcccggccucaccuccgccgugaucgacgcccugccccgcaacauggucaucacgugccaggggagcgacgacauccgcaagcugcucgagagccagggccggaaggacaucaagcugaucgacaucgcgcuguccaagaccgacagccgcaaguacgagaacgccgugugggaccaguacaaggaccucugccacaugcacaccggcgucgugguggagaagaagaagcgcgggggcaaggaggagaucacgccccacugcgcccugauggacugcaucauguucgacgccgcggucuccgggggccugaacaccagcgugcuccgggccgugcugccgcgggacauggucuuccgcaccuccacgccccggguggugcugugaggacuaguaauaaggaaacuguaugaaugucugugggcaggaagugaagagauccuucuguaaagguuuuuggaauuaugucugcugaauaauaaacuuuuuugaaauaauaaaucugguagaaaaaugagaucuaaaaaaaaaaaaaaaaaaaaaaaaaaaaaaaaaaaaaaaaaaaaaaaaaaaaaaaaaaaaaaaaaaaaaaaaaaaaaaaaaaaaaaaaaaaaaaaaaaaa

SEQ ID NO: 18945 - RNA, 2085 nt, Artificial Sequence
  mRNA product Design b-4 (A100) comprising derived and/or modified sequence from LASV(G1442-SLE-2011;Clade IV)__AIT17181__SP-HsPLAT_NP(2-569) (opt1)
aggagagucccgcagucggcguccagcggcucugcuuguucgugugugugucguugcaggccuuauucaagcuuaccauggacgccaugaagcgcggccugugcugcgugcuccugcugugcggggccgucuucgugagccccagcgccuccaaggaggugaaguccuuccuguggacccagagccuccgccgggagcugagcggcuacugcuccaacaucaagcugcaggucgugaaggacgcccaggcgcuccugcacgggcuggacuucagcgagguguccaacguccagcgccucaugcggaagcagcgccgggacgacaacgaccugaagcgccugcgggaccucaaccaggccgugaacaaccugguggagcucaagagcacccagcagaaguccguccugcgcgugggcacccugaccagcgacgaccugcucgugcuggccgccgaccuggagaagcucaaguccaaggucauccggaccgagcgcccccugagcgccgggguguacaugggcaaccuguccagccagcagcucgaccagcggcgcgcgcugcugaacaugaucgggauguccggcggcauccaggggacccggacgggccgcgacggggugguccgggugugggacgugaagaacgccgaccuccugaacaaccaguucggcaccaugccgagccugacccucgccugccugaccaagcaggggcaggucgaccugaacgacguggugcaggcccucacggaccugggccugaucuacaccgcgaaguaccccaacgccuccgaccucgaccgccugacccagagccaccccauccugaacaugaucgacaccaagaaguccagccucaacaucagcggcuacaacuucucccugggggccgccgucaaggccggcgcgugcaugcuggacgggggcaacaugcucgagacgaucaaggugagcccccagaccauggacggcauccugaaguccauccugaaggugaagaagacccucgggauguucaucagcgacaccccgggcgagcggaaccccuacgagaacauccuguacaagaucugccuguccggggacggcuggcccuacaucgccagccgcacguccaucaccgggcgggccugggagaacaccgucguggaccucgagagcgacggcaagccccagaaggccggcuccaacaacagcaacaagucccugcagagcgccggguucgcggccggccugaccuacucccagcucaugacgcugaaggacgccaugcugcagcuggacccgaacgccaagaccuggauggacaucgaggggcgccccgaggaccccguggagaucgcccucuaccagcccagcuccggcugcuacauccacuucuuccgggagccgaccgaccugaagcaguucaagcaggacgcgaaguacagccacgggaucgacgucaccgaccuguucgccgcccagcccggccucacguccgccgugaucgaggcccugccccgcaacauggucaucacgugccagggcagcgacgacaucaagaagcugcucgagucccaggggcgcaaggacaucaagcugaucgacaucgcgcugagcaagaccgacagccggaaguacgagaacgccgugugggaccaguacaaggaccucugccacaugcacaccggcguggucguggagaagaagaagcgcgggggcaaggaggagaucaccccgcacugcgcccugauggacugcaucauguucgacgccgcgguguccgggggccugaacacccucguccugcgggccgugcugccccgcgacaugguguuccggaccagcacgccccgcgucgugcucugaggacuaguaauaaggaaacuguaugaaugucugugggcaggaagugaagagauccuucuguaaagguuuuuggaauuaugucugcugaauaauaaacuuuuuugaaauaauaaaucugguagaaaaaugagaucuaaaaaaaaaaaaaaaaaaaaaaaaaaaaaaaaaaaaaaaaaaaaaaaaaaaaaaaaaaaaaaaaaaaaaaaaaaaaaaaaaaaaaaaaaaaaaaaaaaaa

SEQ ID NO: 18946 - RNA, 2085 nt, Artificial Sequence
  mRNA product Design b-4 (A100) comprising derived and/or modified sequence from LASV(G3010-SLE-2013;Clade IV)__AIT17345__SP-HsPLAT_NP(2-569) (opt1)
aggagagucccgcagucggcguccagcggcucugcuuguucgugugugugucguugcaggccuuauucaagcuuaccauggacgccaugaagcgcggccugugcugcgugcuccugcugugcggggccgucuucgugagccccagcgccuccaaggagaucaagagcuuccuguggacccagucccuccgccgggagcugagcggcuacugcuccaacaucaagcuccagguggucaaggacgcccaggcgcugcugcacgggcuggacuucagcgagguguccaacgugcagcgccucaugcggaaggagcgccgggacgacaacgaccugaagcgccugcgggaccucaaccaggccgucaacaaccugguggagcucaagagcacccagcagaaguccauccugcgcgugggcacccugaccagcgacgaccugcucauccuggccgccgaccuggagaagcucaaguccaaggucacccggaccgagcgcccccugagcgccgggguguacaugggcaaccuguccagccagcagcucgaccagcggcgcgcgcugcuguccaugaucgggaugagcuccggcgugcagggcgcccgggccgggcgcgacggcgucgugcgggugugggacgucaagaacgccgagcuccugaacaaccaguucgggacgaugccgagccugacccucgcgugccugaccaagcagggccagguggaccugaacgacgugguccaggcccucaccgaccuggggcugaucuacacggccaaguaccccaacaccuccgaccucgaccgccugacccagagccaccccauccugaacaugaucgacaccaagaaguccagccucaacaucagcggcuacaacuucucccugggcgccgccgugaaggcgggggccugcaugcuggacggcgggaacaugcucgagacgaucaaggugagcccccagaccauggacggcauccugaaguccauccugaaggucaagaaggcccucggcauguucaucagcgagaccccgggggagcggaaccccuacgagaacauccuguacaagaucugccuguccggcgacggguggcccuacaucgccagccgcaccuccaucacgggccgggccugggagaacaccgugguggaccucgagagcgacgggaagccccagaaggcgggcuccaacaacagcaacaagucccugcagagcgccggcuucaccgccgggcugaccuacucccagcucaugacgcugaaggacgccaugcugcagcuggacccgaacgccaagaccuggauggacaucgagggccgccccgaggaccccgucgagguggcgcucuaccagcccagcuccgggugcuacauccacuucuuccgggagccgaccgaccugaagcaguucaagcaggacgccaaguacagccacggcaucgacgugaccgaccuguucgccgcccagcccgggcucacguccgccgucaucgacgcgcugccccgcaacauggugaucacgugccagggcagcgacgacaucaagaagcugcucgagagccagggccgcaaggacaucaagcugaucgacaucgcccuguccaagaccgacagccggaaguacgagaacgccgucugggaccaguacaaggaccucugccacaugcacaccggggugguggucgagaagaagaagcgcggcgggaaggaggagaucaccccgcacugcgcccugauggacugcaucauguucgacgcggccguguccggcgggcugaacaccagcgugcuccgggccguccugccccgcgacaugguguuccggaccuccacgccccgcgugguccugugaggacuaguaauaaggaaacuguaugaaugucugugggcaggaagugaagagauccuucuguaaagguuuuuggaauuaugucugcugaauaauaaacuuuuuugaaauaauaaaucugguagaaaaaugagaucuaaaaaaaaaaaaaaaaaaaaaaaaaaaaaaaaaaaaaaaaaaaaaaaaaaaaaaaaaaaaaaaaaaaaaaaaaaaaaaaaaaaaaaaaaaaaaaaaaaaa

SEQ ID NO: 18947 - RNA, 2085 nt, Artificial Sequence
  mRNA product Design b-4 (A100) comprising derived and/or modified sequence from LASV(G502-SLE-2009;Clade IV)__AIT17127__SP-HsPLAT_NP(2-569) (opt1)
aggagagucccgcagucggcguccagcggcucugcuuguucgugugugugucguugcaggccuuauucaagcuuaccauggacgccaugaagcgcggccugugcugcgugcuccugcugugcggggccgucuucgugagccccagcgccuccaaggagaucaagagcuuccuguggacccagucccuccgccgggagcugagcggcuacugcuccaacaucaagcuccagguggucaaggacgcccaggcgcugcugcacgggcuggacuucagcgagguguccaacgugcagcgccucaugcggaaggagcgccgggacgacaacgaccugaagcgccugcgggaccucaaccaggccgucaacaaccugguggagcucaagagcacccagcagaaguccauccugcgcgugggcacccugaccagcgacgaccugcucauccuggccgccgaccuggagaagcucaaguccaaggucauccggaccgagcgcccccugagcgccgggguguacaugggcaaccuguccagccagcagcucgaccagcggcgcgcgcugcuguccaugaucgggaugagcggcggcaaccagggggugcgggccggcaaggacggggucgugcgcgugugggacgucaagaacgccgagcuccugaacaaccaguucggcaccaugccgucccugacgcucgccugccugaccaagcagggccagguggaccugaacgacgcggugcaggcccucaccgaccuggggcugaucuacaccgccaaguaccccaacacgagcgaccucgaccggcugacccagucccaccccauccugaacaugaucgacaccaagaaguccagccucaacaucuccggcuacaacuucagccugggggccgccgucaaggcgggcgccugcaugcuggacgggggcaacaugcucgagaccaucaaggugagcccccagacgauggacggcauccucaagagcauccugaaggugaagaaggcccuggggauguucaucuccgacaccccgggcgagcgcaaccccuacgagaacauccuguacaagaucugccugagcggggacggcuggcccuacaucgccucccggaccagcaucaccgggcgcgccugggagaacacggucguggaccucgaguccgacggcaagccccagaaggcgggcagcaacaacuccaacaagagccugcaguccgccggguucaccgccggccugaccuacagccagcucaugacccugaaggacgccaugcugcagcuggacccgaacacgaagaccuggauggacaucgaggggcggcccgaggaccccguggagaucgcccucuaccagcccuccagcggcugcuacauccacuucuuccgcgagccgaccgaccugaagcaguucaagcaggacgcgaaguacucccacgggaucgacgucaccgaccuguucgccgcccagcccggccucacgagcgccgugaucgacgcccugccccggaacauggugaucacgugccagggcuccgacgacauccgcaagcugcucgagagccaggggcgcaaggacaucaagcugaucgacaucgcgcugaacaagaccgacagccggaaguacgagaacgccgucugggaccaguacaaggaccucugccacaugcacaccggcguggucguggagaagaagaagcgcgggggcaaggaggagaucaccccgcacugcgcccugauggacugcaucauguucgacgccgcgguguccgggggccugaacaccagcguccuccgggccgugcugccccgcgacaugguguuccggaccuccacgccccgcgucgugcugugaggacuaguaauaaggaaacuguaugaaugucugugggcaggaagugaagagauccuucuguaaagguuuuuggaauuaugucugcugaauaauaaacuuuuuugaaauaauaaaucugguagaaaaaugagaucuaaaaaaaaaaaaaaaaaaaaaaaaaaaaaaaaaaaaaaaaaaaaaaaaaaaaaaaaaaaaaaaaaaaaaaaaaaaaaaaaaaaaaaaaaaaaaaaaaaaa

SEQ ID NO: 18948 - RNA, 2085 nt, Artificial Sequence
  mRNA product Design b-4 (A100) comprising derived and/or modified sequence from LASV(G733-SLE-2010;Clade IV)__AIT17155__SP-HsPLAT_NP(2-569) (opt1)
aggagagucccgcagucggcguccagcggcucugcuuguucgugugugugucguugcaggccuuauucaagcuuaccauggacgccaugaagcgcggccugugcugcgugcuccugcugugcggggccgucuucgugagccccagcgccuccaaggagaucaagagcuuccuguggacccagucccuccgccgggagcugagcggcuacugcuccaacaucaagcuccagguggucaaggacgcccaggcgcugcugcacgggcuggacuucagcgagguguccaacgugcagcgccucaugcggaaggagcgccgggacgacaacgaccugaagcgccugcgggaccucaaccaggccgucaacaaccugguggagcucaagagcacccagcagaaguccgugcugcgcgucggcacccugaccagcgacgagcugcucgugcuggccgccgaccuggagaagcucaaguccaaggugauccggaccgagcgcccccugagcgccggggucuacaugggcaaccuguccagccagcagcucgaccagcggcgcgcgcugcuguccaugaucgggaugagcggcggcaaccagggggcccggaccggccgcgacgggguggugcgggucugggacgugaagaacgccgagcuccugaacaaccaguucggcaccaugccgucccugacccucgccugccugaccaagcagggccagguggaccugaacgacgcgguccaggcccucaccgaccuggggcugaucuacacggccaaguaccccaacaccagcgaccucgaccgccugacccagucccaccccauccugaacaugaucgacaccaagaaguccagccucaacaucuccggcuacaacuucagccugggggccgccgugaaggcgggcgccugcaugcuggacgggggcaacaugcucgagacgaucaaggugagcccccagaccauggacggcauccucaagagcauccugaaggucaagaaggcccuggggauguucaucuccgacaccccgggcgagcggaaccccuacgagaacauccuguacaagaucugccugagcggggacggcuggcccuacaucgccucccgcaccagcaucacggggcgggccugggagaacaccgugguggaccucgaguccgacggcaagccccagaaggcgggcagcaacaacuccaacaagagccugcaguccgccggguucaccgccggccugaccuacagccagcucaugacgcugaaggacgccaugcugcagcuggacccgaacgccaagaccuggauggacaucgaggggcgccccgaggaccccgucgagaucgcgcucuaccagcccuccagcggcugcuacauccacuucuuccgggagccgaccgaccugaagcaguucaagcaggacgccaaguacucccacgggaucgacgugaccgaccuguucgccgcccagcccggccucacgagcgccgugaucgacgcgcugccccgcaacauggucaucacgugccagggcuccgacgacauccgcaagcugcucgagagccaggggcggaaggacaucaagcugaucgacaucgcccugagcaagaucgacucccgcaaguacgagaacgccgugugggaccaguacaaggaccucugccacaugcacaccggcgucgugguggagaagaagaagcgcgggggcaaggaggagaucacgccccacugcgcccugauggacugcaucauguucgacgcggccgucagcgggggccugaacucccucgugcugcgggccgugcugccgcgggacauggucuuccgcaccagcacgccccggguggugcucugaggacuaguaauaaggaaacuguaugaaugucugugggcaggaagugaagagauccuucuguaaagguuuuuggaauuaugucugcugaauaauaaacuuuuuugaaauaauaaaucugguagaaaaaugagaucuaaaaaaaaaaaaaaaaaaaaaaaaaaaaaaaaaaaaaaaaaaaaaaaaaaaaaaaaaaaaaaaaaaaaaaaaaaaaaaaaaaaaaaaaaaaaaaaaaaaa

SEQ ID NO: 18949 - RNA, 2085 nt, Artificial Sequence
  mRNA product Design b-4 (A100) comprising derived and/or modified sequence from MOPV/LASV reassortant(IGS-1;Clade IV)__AFY05578__SP-HsPLAT_NP(2-569) (opt1)
aggagagucccgcagucggcguccagcggcucugcuuguucgugugugugucguugcaggccuuauucaagcuuaccauggacgccaugaagcgcggccugugcugcgugcuccugcugugcggggccgucuucgugagccccagcgccuccaaggagaucaagagcuuccuguggacccagucccuccgccgggagcugagcggcuacugcuccaacaucaagcuccagguggucaaggacgcccaggcgcugcugcacgggcuggacuucagcgagguguccaacgugcagcgccucaugcggaaggagcgccgggacgacaacgaccugaagcgccugcgggaccucaaccaggccgucaacaaccugguggagcucaagagcacccagcagaaguccauccugcgcgugggcacccugaccagcgacgaccugcucauccuggccgccgaccuggagaagcuccgguccaaggucauccgcaccgagcggccccugagcgccgggguguacaugggcaaccuguccagccagcagcucgaccagcgccgggcgcugcugaacaugaucgggauguccggcggcaaccagggggcccgcgccggccgggacggggugguccgcgugugggacgugaagaacgccgagcuccugagcaaccaguucggcaccaugccgucccugacgcucgcgugccugaccaagcaggggcaggucgaccugaacgacgccgugcaggcccucaccgaccugggccugaucuacaccgccaaguaccccaacacgagcgaccucgaccggcugacccagucccaccccauccugaacaugaucgacaccaagaaguccagccucaacaucuccggcuacaacuucagccugggggccgcggugaaggccggcgccugcaugcuggacgggggcaacaugcucgagaccaucaaggucagcccccagacgauggacggcauccucaagagcauccugaaggugaagaaggcccuggggauguucaucuccgacaccccgggcgagcgcaaccccuacgagaacauccuguacaagaucugccugagcggggacggcuggcccuacaucgccucccggaccagcaucaccgggcgcgcgugggagaacacgguggucgaccucgaguccgacggcaagccccagaaggccgacagcaacaacuccagcaagucccugcagagcgccggcuucaccgccgggcugaccuacucccagcucaugacccugaaggacgccaugcugcagcuggacccgaacgcgaagacguggauggacaucgagggccggcccgaggaccccguggagaucgcccucuaccagcccagcuccgggugcuacauccacuucuuccgcgagccgaccgaccugaagcaguucaagcaggacgccaaguacagccacggcaucgacgugaccgaccuguucgccacccagcccgggcucacguccgccgucaucgacgcgcugccccgcaacauggugaucacgugccagggcagcgacgacauccggaagcugcucgagagccagggccgcaaggacaucaagcugaucgacaucgaccuguccaagaccgacagccggaaguacgagaacgccgugugggaccaguacaaggaccucugccacaugcacaccggggucguggucgagaagaagaagcgcggcgggaaggaggagaucaccccgcacugcgcccugauggacugcaucauguucgacgccgcgguguccggcgggcugaacaccagcgugcuccgggccguccugccccgcgacaugguguuccggaccuccacgccccgcgugguccugugaggacuaguaauaaggaaacuguaugaaugucugugggcaggaagugaagagauccuucuguaaagguuuuuggaauuaugucugcugaauaauaaacuuuuuugaaauaauaaaucugguagaaaaaugagaucuaaaaaaaaaaaaaaaaaaaaaaaaaaaaaaaaaaaaaaaaaaaaaaaaaaaaaaaaaaaaaaaaaaaaaaaaaaaaaaaaaaaaaaaaaaaaaaaaaaaa

SEQ ID NO: 18950 - RNA, 2085 nt, Artificial Sequence
  mRNA product Design b-4 (A100) comprising derived and/or modified sequence from LASV(LM765-SLE-2012;Clade IV)__AIT17815__SP-HsPLAT_NP(2-569) (opt1)
aggagagucccgcagucggcguccagcggcucugcuuguucgugugugugucguugcaggccuuauucaagcuuaccauggacgccaugaagcgcggccugugcugcgugcuccugcugugcggggccgucuucgugagccccagcgccuccaaggagaucaagagcuuccuguggacccagucccuccgccgggagcugagcggcuacugcuccaacaucaagcuccagguggucaaggacgcccaggcgcugcugcacgggcuggacuucagcgagguguccaacgugcagcgccucaugcggaaggagcgccgggacgacaacgaccugaagcgccugcgggaccucaaccaggccgucaacaaccugguggagcucaagagcacccagcagaaguccauccugcgcgugggcacccugaccagcgacgaccugcucauccuggccgccgaccuggagaagcucaaguccaaggucacccggaccgagcgcccccugagcgccgggguguacaugggcaaccuguccagccagcagcucgaccagcggcgcgcgcugcuggacaugaucgggauguccggcagcaaccagggcgcccgggccgggcgcgacggcgugguccgggugugggacgugaagaacgccgagcuccugaacaaccaguucgggacgaugccgucccugacccucgcgugccugaccaagcagggccaggucgaccugaacgacgccgugcaggcccucaccgaccuggggcugaucuacacggccaaguaccccaacaccagcgaccucgaccgccugacccagucccaccccauccugaacaugaucgacaccaagaaguccagccucaacaucuccggcuacaacuucagccugggcgccgcggugaaggccggggccugcaugcuggacggcgggaacaugcucgagacgaucaaggucagcccccagaccauggacggcauccucaagagcauccugaaggugaagaaggcccugggcauguucaucuccgacgccccgggggagcggaaccccuacgagaacauccuguacaagaucugccugagcggcgacggguggcccuacaucgcgucccgcaccagcaucaccggccgggccugggagaacacgguggucgaccucgaguccgacgggaagccccagaaggccggcagcaacggcuccaacaagagccugcaguccgccggguucaccgccggccugaccuacagccagcucaugacccugaaggacgcgaugcugcagcuggacccgaacgccaagacguggauggacaucgaggggcgccccgaggaccccguggagaucgcccucuaccagcccuccagcggcugcuacauccacuucuuccgggagccgaccgaccugaagcaguucaagcaggacgccaaguacucccacgggaucgacgugaccgaccuguucgccgcgcagcccggccucaccagcgccgucaucgacgcccugccccgcaacauggugaucacgugccagggcuccgacgacauccgcaagcuguucgagagccaggggcggaaggacaucaagcucaucgacaucgcccugagcaagaccgacucccgcaaguacgagaacgcggugugggaccaguacaaggaccugugccacaugcacaccggcaucgucguggagaagaagaagcgcgggggcaaggaggagaucacgccccacugcgcccucauggacugcaucauguucgacgccgccgucagcgggggccugaacaccuccgugcugcgggccgugcucccgcgggacauggucuuccgcaccagcacgccccggguggugcugugaggacuaguaauaaggaaacuguaugaaugucugugggcaggaagugaagagauccuucuguaaagguuuuuggaauuaugucugcugaauaauaaacuuuuuugaaauaauaaaucugguagaaaaaugagaucuaaaaaaaaaaaaaaaaaaaaaaaaaaaaaaaaaaaaaaaaaaaaaaaaaaaaaaaaaaaaaaaaaaaaaaaaaaaaaaaaaaaaaaaaaaaaaaaaaaaa

SEQ ID NO: 18951 - RNA, 2085 nt, Artificial Sequence
  mRNA product Design b-4 (A100) comprising derived and/or modified sequence from LASV(LM776-SLE-2012;Clade IV)__AIT17825__SP-HsPLAT_NP(2-569) (opt1)
aggagagucccgcagucggcguccagcggcucugcuuguucgugugugugucguugcaggccuuauucaagcuuaccauggacgccaugaagcgcggccugugcugcgugcuccugcugugcggggccgucuucgugagccccagcgccuccaaggagaucaagagcuuccuguggacccagucccuccgccgggagcugagcuccuacugcagcaacaucaagcuccagguggucaaggacgcccaggcgcugcugcacggccuggacuucuccgaggugagcaacgugcagcgccucaugcggaaggagcgccgggacgacaacgaccugaagcgccugcgggaccucaaccaggccgucaacaaccugguggagcugaaguccacccagcagaaguccauccuccgcguggggacccugaccuccgacgaccugcucauccuggccgccgaccuggagaagcucaagagcaaggucacccggaccgagcgcccccuguccgccggcguguacauggggaaccugagcucccagcagcucgaccagcggcgcgcgcugcugagcaugaucggcauguccgggagcaaccagggcgcccgggccggccgcgacggggugguccgggugugggacgugaagaacgccgagcuccugaacaaccaguucggcacgaugccgucccugacccucgcgugccugaccaagcaggggcaggucgaccugaacgacgccgugcaggcccucaccgaccugggccugaucuacacggccaaguaccccaacaccagcgaccucgaccgccugacccagagccaccccauccugaacaugaucgacaccaagaaguccagccucaacaucuccggguacaacuucagccugggcgccgcggugaaggccggcgccugcaugcuggacgggggcaacaugcucgagacgaucaaggucagcccccagaccauggacgggauccucaagagcauccugaaggugaagaaggcccugggcauguucaucuccgacaccccgggcgagcggaaccccuacgagaacauccuguacaagaucugccugagcggggacggcuggcccuacaucgccucccgcaccagcaucacggggcgggcgugggagaacaccguggucgaccucgaguccgacggcaagccccagaaggccgggagcaacaacuccaacaagagccugcaguccgccggcuucaccgccggccugaccuacagccagcucaugacgcugaaggacgccaugcugcagcuggacccgaacgcgaagaccuggauggacaucgaggggcgccccgaggaccccguggagguggcccucuaccagcccuccagcggcugcuacauccacuucuuccgggagccgaccgaccugaagcaguucaagcaggacgccaaguacucccacgggaucgacgucaccgaccuguucgccgcccagcccggccucacgagcgcggugaucgacgcccugccccgcaacauggugaucacgugccaggggagcgacgacauccgcaagcugcucgagucccagggccggaaggacaucaagcugaucgacaucgcccugagcaagaccgacucccgcaaguacgagaacgccgucugggaccaguacaaggaccucugccacaugcacaccggcguggucguggagaagaagaagcgcgggggcaaggaggagaucaccccgcacugcgcgcugauggacugcaucauguucgacgccgccgugagcgggggccugaacaccuccguccuccgggccgugcugccccgggacaugguguuccgcaccagcacgccccgggucgugcugugaggacuaguaauaaggaaacuguaugaaugucugugggcaggaagugaagagauccuucuguaaagguuuuuggaauuaugucugcugaauaauaaacuuuuuugaaauaauaaaucugguagaaaaaugagaucuaaaaaaaaaaaaaaaaaaaaaaaaaaaaaaaaaaaaaaaaaaaaaaaaaaaaaaaaaaaaaaaaaaaaaaaaaaaaaaaaaaaaaaaaaaaaaaaaaaaa

SEQ ID NO: 18952 - RNA, 2085 nt, Artificial Sequence
  mRNA product Design b-4 (A100) comprising derived and/or modified sequence from LASV(Mad39;Clade IV)__ANH09723__SP-HsPLAT_NP(2-569) (opt1)
aggagagucccgcagucggcguccagcggcucugcuuguucgugugugugucguugcaggccuuauucaagcuuaccauggacgccaugaagcgcggccugugcugcgugcuccugcugugcggggccgucuucgugagccccagcgccuccaaggagaucaagagcuuccuguggacccagucccuccgccgggagcugagcggcuacugcuccaacaucaagcuccagguggucaaggacgcccaggcgcugcugcacgggcuggacuucagcgagguguccaacgugcagcgccucaugcggaagcagcgccgggacgacaacgaccugaagcgccugcgggaccucaaccaggccgucaacaaccugguggagcugaaguccacccagcagaaguccgugcuccgcgucggcacgcugaccagcgacgaccugcucacccuggccgccgaccuggagaagcucaaguccaaggugacccggacggagcgcccccugaccgccgggguguacaugggcaaccugagcucccagcagcucgaccagcggcgcgcgcugcugaacaugaucgggaugagcggcggcaaccagggggcccggaccggccgcgacggggucgugcgggugugggacgucaagaacgccgagcuccugaacaaccaguucggcaccaugccgucccugacgcucgccugccugaccaagcagggccagguggaccugaacgacgugguccaggcgcucaccgaccuggggcugaucuacaccgccaaguaccccaacacgagcgaccucgaccgccugacccagucccaccccauccugaacaugaucgacaccaacaagagcucccucaacaucagcggcuacaacuucagccugggggccgccgugaaggccggcgcgugcaugcuggacgggggcaacaugcucgagaccaucaaggugagcccccagacgauggacggcauccucaagagcauccugaaggucaagaagucccuggggauguucaucagcgacaccccgggcgagcggaaccccuacgagaacauccuguacaagaucugccuguccggggacggcuggcccuacaucgccagccgcaccuccaucaccgggcgggccugggagaacacggugguggaccucgagagcggcggcaagccccagaaggccggguccaacaacagcaacaagucccugcagagcgccggcuucgcggccgggcugaccuacucccagcucaugacccugaaggacgccaugcugcagcuggacccgaacgccaagaccuggauggacaucgagggccgccccgaggaccccgucgagaucgcccucuaccagcccaucagcgggugcuacauccacuucuuccgggagccgacggaccugaagcaguucaagcaggacgcgaaguacucccacggcaucgacgugaccgaccuguucgccgcccagcccggccucaccagcgccgugaucgaggcccugccccgcaacauggucaucacgugccagggguccgacgacauccgcaagcuguucgagagccagggccggaaggacaucaagcucaucgacaucgcgcuguccaagaccgacagccgcaaguacgagaacgccgugugggaccaguacaaggaccugugccacaugcacaccggggucgugguggagaagaagaagaagggcgggaaggaggagaucacgccccacugcgcccucauggacugcaucauguucgacgccgcggucagcggcggccugaacacccuggugcuccgggccgugcugccgcgcgacauggucuuccggaccuccacccccaagguggugcugugaggacuaguaauaaggaaacuguaugaaugucugugggcaggaagugaagagauccuucuguaaagguuuuuggaauuaugucugcugaauaauaaacuuuuuugaaauaauaaaucugguagaaaaaugagaucuaaaaaaaaaaaaaaaaaaaaaaaaaaaaaaaaaaaaaaaaaaaaaaaaaaaaaaaaaaaaaaaaaaaaaaaaaaaaaaaaaaaaaaaaaaaaaaaaaaaa

SEQ ID NO: 18953 - RNA, 2085 nt, Artificial Sequence
  mRNA product Design b-4 (A100) comprising derived and/or modified sequence from LASV(Z0947-SLE-2011;Clade IV)__AIT17841__SP-HsPLAT_NP(2-569) (opt1)
aggagagucccgcagucggcguccagcggcucugcuuguucgugugugugucguugcaggccuuauucaagcuuaccauggacgccaugaagcgcggccugugcugcgugcuccugcugugcggggccgucuucgugagccccagcgccuccaaggagaucaagagcuuccuguggacccagucccuccgccgggagcugagcggcuacugcuccaacaucaagcuccagguggucaaggacgcccaggcgcugcugcacgggcuggacuucagcgagguguccaacgugcagcgccucaugcggaaggagcgccgggacgacaacgaccugaagcgccugcgggaccucaaccaggccgucaacaaccugguggagcucaagagcacccagcagaaguccauccugcgcgugggcacccugaccagcgacgaccugcucauccuggccgccgaccuggagaagcucaaguccaaggucacccggaccgagcgcccccugagcgccgggguguacaugggcaaccuguccagccagcagcucgaccagcggcgcgcgcugcugaacaugaucgggauguccggcagcaaccagggcgcccggacggggcgcgacggcgugguccgggugugggacgugaagaacgccgagcuccugaacaaccaguucgggaccaugccgucccugacccucgccugccugaccaagcagggccaggucgaccugaacgacgcggugcaggcccucacggaccuggggcugaucuacaccgccaaguaccccaacaccagcgaccucgaccgccugacccagucccaccccauccugaacaugaucgacacgaagaaguccagccucaacaucuccggcuacaacuucagccugggcgccgccgugaaggcgggggccugcaugcuggacggcgggaacaugcucgagaccaucaaggucagcccccagaccauggacggcauccucaagagcauccugaaggugaagaaggcccugggcauguucaucuccgacgccccgggggagcggaaccccuacgagaacauccuguacaagaucugccugagcggcgacggguggcccuacaucgccucccgcaccagcaucacgggccgggcgugggagaacaccguggucgaccucgaguccgacgggaagccccagaaggccggcagcaacggcuccaacaagagccugcaguccgccggguucaccgccggccugaccuacagccagcucaugacgcugaaggacgccaugcugcagcuggacccgaacgcgaagaccuggauggacaucgaggggcgccccgaggaccccguggagaucgcccucuaccagcccuccagcggcugcuacauccacuucuuccgggagccgaccgaccugaagcaguucaagcaggacgccaaguacucccacgggaucgacgugaccgaccuguucgccgcccagcccggccucacgagcgcggucaucgacgcccugccccgcaacauggugaucacgugccagggcuccgacgacauccgcaagcuguucgagagccaggggcggaaggacaucaagcucaucgacaucgcccugagcaagaccgacucccgcaaguacgagaacgccgugugggaccaguacaaggaccugugccacaugcacaccggcaucgucguggagaagaagaagcgcgggggcaaggaggagaucaccccgcacugcgcgcucauggacugcaucauguucgacgccgccgucagcgggggccugaacaccuccgugcugcgggccgugcucccccgggacauggucuuccgcaccagcacgccccggguggugcugugaggacuaguaauaaggaaacuguaugaaugucugugggcaggaagugaagagauccuucuguaaagguuuuuggaauuaugucugcugaauaauaaacuuuuuugaaauaauaaaucugguagaaaaaugagaucuaaaaaaaaaaaaaaaaaaaaaaaaaaaaaaaaaaaaaaaaaaaaaaaaaaaaaaaaaaaaaaaaaaaaaaaaaaaaaaaaaaaaaaaaaaaaaaaaaaaa

SEQ ID NO: 18954 - RNA, 2085 nt, Artificial Sequence
  mRNA product Design b-4 (A100) comprising derived and/or modified sequence from LASV(Josiah;Clade IV)__NP_694869__SP-HsPLAT_NP(2-569) (opt4)
aggagagucccgcagucggcguccagcggcucugcuuguucgugugugugucguugcaggccuuauucaagcuuaccauggacgccaugaagagaggccugugcugcgugcugcugcugugcggcgccguguucgugagccccagcgccagcaaggagaucaagagcuuccuguggacccagagccugagaagagagcugagcggcuacugcagcaacaucaagcugcagguggugaaggacgcccaggcccugcugcacggccuggacuucagcgaggugagcaacgugcagagacugaugagaaaggagagaagagacgacaacgaccugaagagacugagagaccugaaccaggccgugaacaaccugguggagcugaagagcacccagcagaagagcauccugagagugggcacccugaccagcgacgaccugcugauccuggccgccgaccuggagaagcugaagagcaaggugaucagaaccgagagaccccugagcgccggcguguacaugggcaaccugagcagccagcagcuggaccagagaagagcccugcugaacaugaucggcaugagcggcggcaaccagggcgccagagccggcagagacggcguggugagagugugggacgugaagaacgccgagcugcugaacaaccaguucggcaccaugcccagccugacccuggccugccugaccaagcagggccagguggaccugaacgacgccgugcaggcccugaccgaccugggccugaucuacaccgccaaguaccccaacaccagcgaccuggacagacugacccagagccaccccauccugaacaugaucgacaccaagaagagcagccugaacaucagcggcuacaacuucagccugggcgccgccgugaaggccggcgccugcaugcuggacggcggcaacaugcuggagaccaucaaggugagcccccagaccauggacggcauccugaagagcauccugaaggugaagaaggcccugggcauguucaucagcgacacccccggcgagagaaaccccuacgagaacauccuguacaagaucugccugagcggcgacggcuggcccuacaucgccagcagaaccagcaucaccggcagagccugggagaacaccgugguggaccuggagagcgacggcaagccccagaaggccgacagcaacaacagcagcaagagccugcagagcgccggcuucaccgccggccugaccuacagccagcugaugacccugaaggacgccaugcugcagcuggaccccaacgccaagaccuggauggacaucgagggcagacccgaggaccccguggagaucgcccuguaccagcccagcagcggcugcuacauccacuucuucagagagcccaccgaccugaagcaguucaagcaggacgccaaguacagccacggcaucgacgugaccgaccuguucgccacccagcccggccugaccagcgccgugaucgacgcccugcccagaaacauggugaucaccugccagggcagcgacgacaucagaaagcugcuggagagccagggcagaaaggacaucaagcugaucgacaucgcccugagcaagaccgacagcagaaaguacgagaacgccgugugggaccaguacaaggaccugugccacaugcacaccggcguggugguggagaagaagaagagaggcggcaaggaggagaucaccccccacugcgcccugauggacugcaucauguucgacgccgccgugagcggcggccugaacaccagcgugcugagagccgugcugcccagagacaugguguucagaaccagcacccccagaguggugcugugaggacuaguaauaaggaaacuguaugaaugucugugggcaggaagugaagagauccuucuguaaagguuuuuggaauuaugucugcugaauaauaaacuuuuuugaaauaauaaaucugguagaaaaaugagaucuaaaaaaaaaaaaaaaaaaaaaaaaaaaaaaaaaaaaaaaaaaaaaaaaaaaaaaaaaaaaaaaaaaaaaaaaaaaaaaaaaaaaaaaaaaaaaaaaaaaa

SEQ ID NO: 18955 - RNA, 2085 nt, Artificial Sequence
  mRNA product Design b-4 (A100) comprising derived and/or modified sequence from LASV(LP;Clade I)__AAF86702__SP-HsPLAT_NP(2-569) (opt4)
aggagagucccgcagucggcguccagcggcucugcuuguucgugugugugucguugcaggccuuauucaagcuuaccauggacgccaugaagagaggccugugcugcgugcugcugcugugcggcgccguguucgugagccccagcaacagcaaggagaucaagagcuuccuguggacccagagccugagaagagagcugagcggcuacugcagcaacaucaagcugcagguggugaaggacgcccaggcccugcugcacggccuggacuucagcgaggugagcaacgugcagagacugaugagaaagcagaagagagacgacgccgaccugaagagacugagagaccugaaccaggccgugaacaaccugguggagcugaagagcacccagcagaagaacgugcugagagugggcacccugagcagcgacgaccugaucacccuggccgccgaccuggagaagcugaagagcaaggugaucagaaccgagagaccccugagcagcggcguguacaugggcaaccugagcagccagcagcuggaccagagaagagcccugcugagcaugaucggcaugagcggcggcccccagggcaacagaaccggcggcgacggcguggugagagugugggacgugaagaacgccgagcugcugaacaaccaguucggcaccaugcccagccugacccuggccugccugaccaagcagggccagguggaccugaacgacgccgugcaggcccugaccgaccugggccugaucuacaccgccaaguaccccaacagcagcgaccuggacaugcugacccagagccaccccauccugggcaugguggacaccaagaagagcagccugaacaucagcggcuacaacuucagccugggcgccgccgugaaggccggcgccugcaugcuggacggcggcaacaugcuggagaccaucaaggugagcccccagaccauggacggcauccugaagagcauccugaaggugaagagaagccugggcauguucaucagcgacacccccggcgagagaaaccccuacgagaacauccuguacaagaucugccugagcggcgagggcuggcccuacaucgccagcagaaccagcaucaccggcagagccugggagaacacccugguggaccuggagagcgacaacaagccccccaagcugaacagcgccggcagcaacaagagccugcaggccgccggccugaacgccggccugaccuacagccagcugaugacccugaaggacugcaugcugcagcuggaccccagcagcaagaccuggaucgacaucgagggcagacccgaggaccccguggagaucgcccuguuccagcccagcagcggcugcuacauccacuucuucagagagcccaccgaccugaagcaguucaagcaggacgccaaguacagccacggcaucgacgugaccgaccuguucagcacccagcccggccugaccagcgccgugaucgaggcccugcccagaaacauggugcugaccugccagggcagcgacgacaucaagaagcugcuggagagccagggcagaagagacaucaagcugaucgacaucagccugagcaaggccgacagcagaaaguucgagaacgccgugugggaccaguacaaggaccugugccacaugcacaccggcguggugguggagaagaagaagagaggcggcaaggaggagaucaccccccacugcgcccugcuggacugcaucauguucgacgccgccaccaccggcagccugaacaucaccacccugagagccgugcugcccagagacaugguguucagaaccagcacccccaagguggugcugugaggacuaguaauaaggaaacuguaugaaugucugugggcaggaagugaagagauccuucuguaaagguuuuuggaauuaugucugcugaauaauaaacuuuuuugaaauaauaaaucugguagaaaaaugagaucuaaaaaaaaaaaaaaaaaaaaaaaaaaaaaaaaaaaaaaaaaaaaaaaaaaaaaaaaaaaaaaaaaaaaaaaaaaaaaaaaaaaaaaaaaaaaaaaaaaaa

SEQ ID NO: 18956 - RNA, 2085 nt, Artificial Sequence
  mRNA product Design b-4 (A100) comprising derived and/or modified sequence from LASV(803213;Clade II)__AAF86704__SP-HsPLAT_NP(2-569) (opt4)
aggagagucccgcagucggcguccagcggcucugcuuguucgugugugugucguugcaggccuuauucaagcuuaccauggacgccaugaagagaggccugugcugcgugcugcugcugugcggcgccguguucgugagccccagcgccagcaaggaggugaagagcuuccuguggacccagagccugagaagagagcugagcggcuacugcagcaacaucaagcugcagguggugaaggacgcccaggcccugcugcacggccuggacuucagcgaggugaacaacgugcagagacugaugagaaagcagaagagagacgacggcgaccugaagagacugagagaccugaaccaggccgugaacaaccugguggagcugaagagcacccagcagaagagcauccugagagugggcacccugaccagcgacgaccugcugacccuggccgccgaccuggagaagcugaagagcaaggugaucagaaccgagagaccccugagcagcggcguguacaugggcaaccugagcacccagcagcuggagcagagaagagcccugcugaacaugaucggcauggugggcggcgcccagggcacccagcccggcagagacggcguggugagagugugggacgugaagaaccccgaccugcugaacaaccaguucggcaccaugcccagccugacccuggccugccugaccaagcagggccagguggaccugaacgacgccgugcuggcccugaccgaccugggccugaucuacaccgccaaguaccccaacagcagcgaccuggacagacugagccagagccaccccauccugaacaugguggacaccaagaagagcagccugaacaucagcggcuacaacuucagccugggcgccgccgugaaggccggcgccugcaugcuggacggcggcaacaugcuggagaccaucaaggugaccccccagaccauggacggcauccugaagagcauccugaaggugaagagaagccugggcauguucgugagcgacacccccggcgagagaaaccccuacgagaacauccuguacaagaucugccugagcggcgacggcuggcccuacaucgccagcagaaccagcaucgugggcagagccugggagaacaccaccguggaccuggagagcgacggcaagccccagaaggugggcaccgccggcagcaacaagagccugcagagcgccggcuuccccaccggccugaccuacagccagcugaugacccugaaggacagcaugaugcagcuggaccccagcgccaagaccuggaucgacaucgagggcagacccgaggaccccguggagaucgcccuguaccagcccaugagcggcugcuacauccacuucuucagagagcccaccgaccugaagcaguucaagcaggacgccaaguacagccacggcaucgacguggccgaccuguuccccgcccagcccggccugaccagcgccgugaucgaggcccugcccagaaacauggugcugaccugccagggcagcgacgacaucaagaagcugcuggacagccagggcagaagagacaucaagcugaucgacaucagccugagcaagguggacagcagaaaguucgagaacgccgugugggaccagugcaaggaccugugccacaugcacaccggcguggugguggagaagaagaagagaggcggcaaggaggagaucaccccccacugcgcccugauggacugcaucauguucgacgccgccgugagcggcggccugaacauccccgugcugagagccgugcugcccagagacaugguguucagaaccagcagccccaagguggugcugugaggacuaguaauaaggaaacuguaugaaugucugugggcaggaagugaagagauccuucuguaaagguuuuuggaauuaugucugcugaauaauaaacuuuuuugaaauaauaaaucugguagaaaaaugagaucuaaaaaaaaaaaaaaaaaaaaaaaaaaaaaaaaaaaaaaaaaaaaaaaaaaaaaaaaaaaaaaaaaaaaaaaaaaaaaaaaaaaaaaaaaaaaaaaaaaaa

SEQ ID NO: 18957 - RNA, 2088 nt, Artificial Sequence
  mRNA product Design b-4 (A100) comprising derived and/or modified sequence from LASV(GA391;Clade III)__CAA36646__SP-HsPLAT_NP(2-570) (opt4)
aggagagucccgcagucggcguccagcggcucugcuuguucgugugugugucguugcaggccuuauucaagcuuaccauggacgccaugaagagaggccugugcugcgugcugcugcugugcggcgccguguucgugagccccagcgccagcaaggaggugagaagcuuccuguggacccagagccugagaagagagcugagcggcuacugcagcaacaucaagcugcagguggugaaggacgcccaggcccugcugcacggccuggacuucagcgaggugagcaacgugcagagacugaugagaaagcagaagagagacgacggcgaccugaagagacugagagaccugaaccaggccgugaacaaccugguggagcugaagagcacccagcagaagagcgugcugagagugggcacccugagcagcgacgaccugcugauccuggccgccgaccuggagaagcugaagagcaaggugaccagaaccgagagaccccugagcagcggcguguacaugggcaaccugagcagccagcagcuggaccagagaagagcccugcugaacaugaucggcaugaccggcgugagcggcggcggcaagggcgccagcgacggcaucgugagagugugggacgugaagaacgccgagcugcugaacaaccaguucggcaccaugcccagccugacccuggccugccugaccaagcagggccagguggaccugaacgacgccgugcaggcccugaccgaccugggccugaucuacaccgccaaguaccccaacagcagcgaccuggacagacugagccagagccaccccauccugaacaugaucgacaccaagaagagcagccugaacaucagcggcuacaacuucagccugggcgccgccgugaaggccggcgccugcaugcuggacggcggcaacaugcuggagaccaucaaggugagcccccagaccauggacggcauccugaagagcauccugaaggugaagaagagccugggcauguucgugagcgacacccccggcgagagaaaccccuacgagaacauccuguacaagaucugccugagcggcgacggcuggcccuacaucgccagcagaaccagcaucgugggcagagccugggagaacaccgugguggaccuggagcaggacaacaagccccagaagaucggcaacggcggcagcaacaagagccugcagagcgccggcuucgccgccggccugaccuacagccagcugaugacccugaaggacuucaagugcuucaaccugauccccaacgccaagaccuggauggacaucgagggcagacccgaggaccccguggagaucgcccuguaccagcccagcagcggcugcuacgugcacuucuucagagagcccaccgaccugaagcaguucaagcaggacgccaaguacagccacggcaucgacgugaccgaccuguucgccgcccagcccggccugaccagcgccgugaucgaggcccugcccagaaacauggugaucaccugccagggcagcgaggacaucagaaagcugcuggagagccagggcagaagagacaucaagcugaucgacaucacccugagcaaggccgacagcagaaaguucgagaacgccgugugggaccaguucaaggaccugugccacaugcacaccggcguggugguggagaagaagaagagaggcggcaaggaggagaucaccccccacugcgcccugauggacugcaucauguucgacgccgccgugagcggcggccuggacgccaaggugcugagaguggugcugcccagagacaugguguucagaaccagcacccccaagguggugcugugaggacuaguaauaaggaaacuguaugaaugucugugggcaggaagugaagagauccuucuguaaagguuuuuggaauuaugucugcugaauaauaaacuuuuuugaaauaauaaaucugguagaaaaaugagaucuaaaaaaaaaaaaaaaaaaaaaaaaaaaaaaaaaaaaaaaaaaaaaaaaaaaaaaaaaaaaaaaaaaaaaaaaaaaaaaaaaaaaaaaaaaaaaaaaaaaa

SEQ ID NO: 18958 - RNA, 2085 nt, Artificial Sequence
  mRNA product Design b-4 (A100) comprising derived and/or modified sequence from LASV(AV;Clade V)__CCA30315__SP-HsPLAT_NP(2-569) (opt4)
aggagagucccgcagucggcguccagcggcucugcuuguucgugugugugucguugcaggccuuauucaagcuuaccauggacgccaugaagagaggccugugcugcgugcugcugcugugcggcgccguguucgugagccccagcgccagcaaggaggugaagagcuuccuguggacccagagccugagaagagagcugagcggcuacugcagcaacaucaagcugcagguggugaaggacgcccaggcccugcugcacggccuggacuucagcgaggugagcaacgugcagagacugaugagaaagcagagaagagacgacagcgaccugaagagacugagagaccugaaccaggccgugaacaaccugguggagcugaagagcacccagcagaagagcgugcugagagugggcacccugagcagcgacgaccugcugacccuggccgccgaccuggagaagcugaagagcaaggugaccagaaccgagagaccccugagcagcggcguguacaugggcaaccugagcagccagcagcuggaccagagaagagcccugcugaaccugaucggcaugaccaacggcagccagggcagccaggccggcagagacggcguggugagagugugggacgugaagaacgccgagcugcugaacaaccaguucggcaccaugcccagccugacccuggccugccugaccaagcagggccagguggaccugaacgacguggugcaggcccugaccgaccugggccugaucuacaccgccaaguaccccaacaccagcgaccuggacagacugacccagagccaccccauccugaacaugaucgacaccaagaagagcagccugaacaucagcggcuacaacuucagccugggcgccgccgugaaggccggcgccugcaugcuggacggcggcaacaugcuggagaccaucaaggugagcccccagagcauggacggcauccugaagagcauccugaaggugaagagagcccugggcauguucgugagcgacacccccggcgagagaaaccccuacgagaacauccuguacaagaucugccugagcggcgacggcuggcccuacaucgccagcagaaccagcaucgugggcagagccugggagaacaccgugguggaccuggagaccgacggcaagccccagaagaucggcagcggcaacagcaacaagagccugcagagcgccggcuucagcgccggccugaccuacagccagcugaugacccugaaggacgccaugcugcagcuggaccccaacgccaagaccuggauggacaucgagggcagacccgaggaccccguggagguggcccuguaccagcccaucagcggcugcuacauccacuucuucagagagcccaccgaccugaagcaguucaagcaggacgccaaguacagccacggcaucgacaucgccgaccuguucgccgcccagcccggccugaccagcgccgugaucgaggcccugcccagaaacauggugaucaccugccagggcagcgaggacaucaagaagcugcuggagagccagggcagaaaggacaucaagcugaucgacaucgcccugagcaagaucgacagcagaaaguucgagaacgccgugugggaccaguacaaggaccugugccacaugcacaccggcguggugguggagaagaagaagagaggcggcaaggaggagaucaccccccacugcgcccugauggacugcaucauguucgacgccgccgugagcggcggccugaacacccuggugcugagagccgugcugcccagagacaugguguucagaaccagcacccccagaguggugcugugaggacuaguaauaaggaaacuguaugaaugucugugggcaggaagugaagagauccuucuguaaagguuuuuggaauuaugucugcugaauaauaaacuuuuuugaaauaauaaaucugguagaaaaaugagaucuaaaaaaaaaaaaaaaaaaaaaaaaaaaaaaaaaaaaaaaaaaaaaaaaaaaaaaaaaaaaaaaaaaaaaaaaaaaaaaaaaaaaaaaaaaaaaaaaaaaa

SEQ ID NO: 18959 - RNA, 2085 nt, Artificial Sequence
  mRNA product Design b-4 (A100) comprising derived and/or modified sequence from LASV(Togo/2016/7082;Clade VI)__AMR44578__SP-HsPLAT_NP(2-569) (opt4)
aggagagucccgcagucggcguccagcggcucugcuuguucgugugugugucguugcaggccuuauucaagcuuaccauggacgccaugaagagaggccugugcugcgugcugcugcugugcggcgccguguucgugagccccagcaacagcaaggaggugaagagcuuccuguggacccagagccugagaagagagcugagcggcuacugcagcaacaucaagcugcagguggugaaggacgcccaggcccugcugcacggccuggacuucagcgaggugagcaacgugcagagacugaugagaaagcagaagagagacgacggcgaccugaagagacugagagaccugaaccaggccgugaacaaccugguggagcugaagagcgugcagcagaagagcauccugagagugggcacccugaccagcgacgaccugcugacccuggccgccgaccuggagaagcugaagagcaaggugaccagaaccgagagaccccugagcagcggcguguacaugggcaaccugagcagccagcagcuggaccagagaagagcccugcugagcaugaucggcaugagcggcggcaaccagaacagccagcccaagggcgacggcguggugagagugugggacgugaagaacgccgaccugcugaacaaccaguucggcaccaugcccagccugacccuggccugccugaccaagcagggccagguggaccugaacgacgccgugcaggcccugaccgaccugggccugaucuacaccgccaaguaccccaacagcagcgaccuggacagacugagccagagccaccccauccugaacaugaucgacaccaagaagagcagccugaacaucagcggcuacaacuucagccugggcgccgccaucaagaccggcgccugcaugcuggacggcggcaacaugcuggagaccaucaaggugaccccccagaccauggacggcauccugaagagcauccugaaggugaagagaagccugggcauguucaucagcgacacccccggcgagagaaaccccuacgagaacauccuguacaagaucugccugagcggcgacggcuggcccuacaucgccagcagaaccgccaucaucggcagagccugggagaacaccgugguggaccuggagagcgacagcaagccccagaagaucggcagcaacggcagcaacaagagccugcagagcgccggcuucgcccccggccugaccuacagccagcugaugacccugaaggacagcaugcugcagcuggaccccaacgccaagaccuggaucgacaucgagggcagacccgaggaccccguggagguggcccuguuccagcccaucagcggcugcuacauccacuucuucagagagcccaccgaccugaagcaguucaagcaggacgccaaguacagccacggcaucgacgugaccgaccuguucgccgcccagcccggccugaccagcgccgugaucgaggcccugcccagaaacauggugcugaccugccagggcagcgacgacaucaagaagcugcuggacagccagggcagaagagacaucaagcugaucgacgugagccugaacaagaucgacagcagaaaguucgagaacgccgugugggaccaguacaaggaccugugccacaugcacaccggcguggugguggagaagaagaagaagggcggcaaggaggagaucaccccccacugcgcccugcuggacugcaucauguucgacgccgccgugagcggcggccugaacgccaccgugcugagagccgugcugcccagagacaugguguucagaaccagcagccccaagguggugcugugaggacuaguaauaaggaaacuguaugaaugucugugggcaggaagugaagagauccuucuguaaagguuuuuggaauuaugucugcugaauaauaaacuuuuuugaaauaauaaaucugguagaaaaaugagaucuaaaaaaaaaaaaaaaaaaaaaaaaaaaaaaaaaaaaaaaaaaaaaaaaaaaaaaaaaaaaaaaaaaaaaaaaaaaaaaaaaaaaaaaaaaaaaaaaaaaa

SEQ ID NO: 18960 - RNA, 2085 nt, Artificial Sequence
  mRNA product Design b-4 (A100) comprising derived and/or modified sequence from LASV(KAK-428;Clade n.d. (VII))__ANH09741__SP-HsPLAT_NP(2-569) (opt4)
aggagagucccgcagucggcguccagcggcucugcuuguucgugugugugucguugcaggccuuauucaagcuuaccauggacgccaugaagagaggccugugcugcgugcugcugcugugcggcgccguguucgugagccccagcaacagcaaggaggugaagagcuuccuguggacccagagccugagaagagagcugagcggcuacugcaccaacaucaagcugcagguggugaaggacgcccaggcccugcugcacggccuggacuucagcgaggugagcaacgugcagagacugaugagaaagcagaagagagacgacaacgaccugaagagacugagagaccugaaccaggccgugaacaaccugguggagcugaagagcgugcagcagaagagcgugcugaaggugggcacccugaacagcgacgaccugcugacccuggccgccgaccuggagaagcugaagagcaagguggugagaaccgagagaccccugagcagcggcguguacaugggcaaccugagcagccagcagcuggaccagagaagagcccugcugaacaugaucggcauggccggcggcagccagggcaaccagcccagcagagacggcguggugagagugugggacgugaagaacgccgaccugcugaacaaccaguucggcaccaugcccagccugacccuggccugccugaccaagcagggccagguggaccugaacgacguggugcuggcccugaccgaccugggccugaucuacaccgccaaguaccccaacagcagcgaccuggacagacugagccagaaccaccccgugcugaacaugaucgacgugaacaagagcagccugaacaucagcggcuacaacuucagccugggcgccgccgugaaggccggcgccugcaugcuggacggcggcaacaugcuggagaccaucaagaucagcccccagaccguggacggcauccugaagagcauccugaaggugaagagagcccugggcauguucgugagcgacacccccggcgagagaaaccccuacgagaacauccuguacaaggugugccugagcggcaacggcuggcccuacaucgccagcagaaccagcaucgugggcagagccugggagaacaccgugguggaccuggagagcaacaagaaccagcccaaggugggcaacaacggcagcaacaagaugcugcagagcagcggcuucgccaccggccugaccuacagccagcugaugacccugagagacagcaugcugcagcuggaccccaccgccaagaccuggaucgacaucgagggcagacccgaggaccccguggagcuggcccuguuccagcccagcagcggcugcuacauccacuucuucagagagcccaccgaccugaagcaguucaagcaggacgccaaguacagccacggcaucgacgugaacgaccuguucagcgcccagcccggccugaccagcgccgugcuggaggcccugcccagaaacauggugcugaccugccagggcagcgacgacaucagaaagcugcuggacagccaggacagaaaggacaucaagcugaucgacaucagccugagcaaggccgacgccagaaaguucgagaacgacgugugggaccaguucaaggaccugugccacaugcacaccggcaucgugguggagaagaagaagaagggcggcaagcaggagaugaccccccacugcgcccugcuggacugcaucauguucgacgccgccgugagcggcggccugaacgugcccacccugagagccgugcugcccaccgacaugguguucagaaccaucaccaccaagguggugcugugaggacuaguaauaaggaaacuguaugaaugucugugggcaggaagugaagagauccuucuguaaagguuuuuggaauuaugucugcugaauaauaaacuuuuuugaaauaauaaaucugguagaaaaaugagaucuaaaaaaaaaaaaaaaaaaaaaaaaaaaaaaaaaaaaaaaaaaaaaaaaaaaaaaaaaaaaaaaaaaaaaaaaaaaaaaaaaaaaaaaaaaaaaaaaaaaa

SEQ ID NO: 18961 - RNA, 2085 nt, Artificial Sequence; identical to SEQ ID NO: 18955
  mRNA product Design b-4 (A100) comprising derived and/or modified sequence from LASV(Pinneo-NIG-1969;Clade I)__AIT17837__SP-HsPLAT_NP(2-569) (opt4)

SEQ ID NO: 18962 - RNA, 2085 nt, Artificial Sequence
  mRNA product Design b-4 (A100) comprising derived and/or modified sequence from LASV(ISTH0009-NIG-2011;Clade II)__AIT17405__SP-HsPLAT_NP(2-569) (opt4)
aggagagucccgcagucggcguccagcggcucugcuuguucgugugugugucguugcaggccuuauucaagcuuaccauggacgccaugaagagaggccugugcugcgugcugcugcugugcggcgccguguucgugagccccagcgugagcaaggaggugaagagcuuccuguggacccagagccugagaagagagcugagcggcuacugcagcaacaucaagcugcagguggugaaggacgcccaggcccugcugcacggccuggacuucagcgaggugagcaacgugcagagacugaugagaaagcagaagagagacgacagcgaccugaagagacugagagaccugaaccaggccgugaacaaccugguggagcugaagagcacccagcagaagagcauccugagagugggcacccugaccagcgacgaccugcugacccuggccgccgaccuggagaagcugaagagcaaggugaucagaaccgagagaccccugagcagcggcguguacaugggcaaccugagcacccagcagcuggagcagagaagagcccugcugaacaugaucggcauggugggcggcgcccagggcacccagcccggcagagacggcguggugagagugugggacgugaagaaccccgaccugcugaacaaccaguucggcaccaugcccagccugacccuggccugccugaccaagcagggccagguggaccugaacgacgccgugcuggcccugaccgaccugggccugaucuacaccgccaaguaccccaacagcagcgaccuggacagacugagccagagccaccccauccugaacaugguggacaucaagaagagcagccugaacaucagcggcuacaacuucagccugggcgccgccgugaaggccggcgccugcaugcuggacggcggcaacaugcuggagaccaucaaggugaccccccagaccauggacggcauccugaagagcauccugaaggugaagagaagccugggcauguucgugagcgacacccccggcgagagaaaccccuacgagaacauccuguacaagaucugccugagcggcgacggcuggcccuacaucgccagcagaaccagcaucgugggcagagccugggagaacaccaccguggaccuggagagcgacggcaagccccagaaggugggcagcgccggcagcaacaagagccugcagagcgccggcuuccccaccggccugaccuacagccagcugaugacccugaaggacagcaugaugcagcuggaccccagcgccaagaccuggaucgacaucgagggcagacccgaggaccccguggagaucgcccuguaccagcccaugagcggcugcuacauccacuucuucagagagcccaccgaccugaagcaguucaagcaggacgccaaguacagccacggcaucgacguggccgaccuguuccccgcccagcccggccugaccagcgccgugaucgaggcccugcccagaaacauggugcugaccugccagggcagcgacgacaucaagagacugcuggacagccagggcagaagagacaucaagcugaucgacaucgcccugagcaaggccgacagcagaagauucgagaacgccgugugggaccagugcaaggaccugugccacaugcacaccggcguggugguggagaagaagaagagaggcggcaaggaggagaucaccccccacugcgcccugauggacugcaucauguacgacgccgccgugagcggcggccugaacauccccgugcugagagccgugcugcccagagacaugguguucagaaccagcagccccaagguggugcugugaggacuaguaauaaggaaacuguaugaaugucugugggcaggaagugaagagauccuucuguaaagguuuuuggaauuaugucugcugaauaauaaacuuuuuugaaauaauaaaucugguagaaaaaugagaucuaaaaaaaaaaaaaaaaaaaaaaaaaaaaaaaaaaaaaaaaaaaaaaaaaaaaaaaaaaaaaaaaaaaaaaaaaaaaaaaaaaaaaaaaaaaaaaaaaaaa

SEQ ID NO: 18963 - RNA, 2085 nt, Artificial Sequence
  mRNA product Design b-4 (A100) comprising derived and/or modified sequence from LASV(ISTH2010-NIG-2012;Clade II)__AIT17483__SP-HsPLAT_NP(2-569) (opt4)
aggagagucccgcagucggcguccagcggcucugcuuguucgugugugugucguugcaggccuuauucaagcuuaccauggacgccaugaagagaggccugugcugcgugcugcugcugugcggcgccguguucgugagccccagcgccagcaaggaggugaagagcuuccuguggacccagagccugagaagagagcugagcggcuacugcagcaacaucaagcugcagguggugaaggacgcccaggcccugcugcacggccuggacuucagcgaggugagcaacgugcagagacugaugagaaagcagaagagagacgacagcgaccugaagagacugagagaccugaaccaggccgugaacaaccugguggagcugaagagcacccagcagaagagcauccugagagugggcacccugaccagcgacgaccugcugacccuggccgccgaccuggagaagcugaagagcaaggugaucagaaccgagagaccccugagcagcggcguguacaugggcaaccugagcacccagcagcuggagcagagaagagcccugcugaaccugaucggcauggugggcggcgcccagggcacccagcccggcagagacggcguggugagagugugggacgugaagaaccccgaccugcugaacaaccaguucggcaccaugcccagccugacccuggccugccugaccaagcagggccagguggaccugaacgacgccgugcuggcccugaccgaccugggccugaucuacaccgccaaguaccccaacagcagcgaccuggacagacugagccagagccaccccauccugaacaugguggacaccaagaagagcagccugaacaucagcggcuucaacuucagccugggcgccgccgugaaggccggcgccugcaugcuggacggcggcaacaugcuggagaccaucaaggugaccccccagaccauggacggcauccugaagagcauccugaaggugaagaagagccugggcauguucgugagcgacacccccggcgagagaaaccccuacgagaacauccuguacaagaucugccugagcggcgacggcuggcccuacaucgccagcagaaccagcaucgugggcagagccugggagaacaccaccguggaccuggagagcgacggcaagccccacaaggugggcaccgccggcagcaacaagagccugcagagcgccggcuuccccaccggccugaccuacagccagcugaugacccugaaggacagcaugaugcagcuggaccccagcgccaagaccuggaucgacaucgagggcagacccgaggaccccguggagaucgcccuguaccagcccaugagcggcugcuacauccacuucuucagagagcccaccgaccugaagcaguucaagcaggacgccaaguacagccacggcaucgacguggccgaccuguuccccgcccagcccggccugaccagcgccgugaucgaggcccugcccagaaacauggugcugaccugccagggcagcgacgacaucaagagacugcuggacagccagggcagaagagacaucaagcugaucgacaucgcccugagcaaggccgacagcagaagauucgagaacgccgugugggaccagugcaaggaccugugccacaugcacaccggcguggugguggagaagaagaagagaggcggcaaggaggagaucaccccccacugcgcccugauggacugcaucauguacgacgccgccgugagcggcggccugaacauccccgugcugagagccgugcugcccagagacaugguguucagaaccagcagccccaagguggugcugugaggacuaguaauaaggaaacuguaugaaugucugugggcaggaagugaagagauccuucuguaaagguuuuuggaauuaugucugcugaauaauaaacuuuuuugaaauaauaaaucugguagaaaaaugagaucuaaaaaaaaaaaaaaaaaaaaaaaaaaaaaaaaaaaaaaaaaaaaaaaaaaaaaaaaaaaaaaaaaaaaaaaaaaaaaaaaaaaaaaaaaaaaaaaaaaaa

SEQ ID NO: 18964 - RNA, 2085 nt, Artificial Sequence
  mRNA product Design b-4 (A100) comprising derived and/or modified sequence from LASV(Lassa virus/H.sapiens-wt/NGA/2015/ISTH_0543;Clade II)__AVO03640__SP-HsPLAT_NP(2-569) (opt4)
aggagagucccgcagucggcguccagcggcucugcuuguucgugugugugucguugcaggccuuauucaagcuuaccauggacgccaugaagagaggccugugcugcgugcugcugcugugcggcgccguguucgugagccccagcgccagcaaggaggugaagagcuuccuguggacccagagccugagaagagagcugagcggcuacugcagcaacaucaagcugcagguggugaaggacgcccaggcccugcugcacggccuggacuucagcgaggugagcaacgugcagagacugaugagaaagcagaagagagacgacagcgaccugaagagacugagagaccugaaccaggccgugaacaaccugguggagcugaagagcacccagcagaagagcauccugagagugggcacccugaccagcgacgaccugcugacccuggccgccgaccuggagaagcugaagagcaaggugaucagaaccgagagaccccugagcagcggcguguacaugggcaaccugagcacccagcagcuggagcagagaagagcccugcugaacaugaucggcauggugggcggcgcccagggcacccagcccggcagagacggcguggugagagugugggacgugaagaaccccgaccugcugaacaaccaguucggcaccaugcccagccugacccuggccugccugaccaagcagggccagguggaccugaacgacgccgugcuggcccugaccgaccugggccugaucuacaccgccaaguaccccaacagcagcgaccuggacagacugagccagagccaccccauccugaacaugguggacaccaagaagagcagccugaacaucagcggcuacaacuucagccugggcgccgccgugaaggccggcgccugcaugcuggacggcggcaacaugcuggagaccaucaaggugaccccccagaccauggacggcauccugaagagcauccugaaggugaagaagagccugggcauguucgugagcgacacccccggcgagagaaaccccuacgagaacauccuguacaagaucugccugagcggcgacggcuggcccuacaucgccagcagaaccagcaucgugggcagagccugggagaacaccaccguggaccuggagagcgacggcaagccccagaaggugggcagcgccggcagcaacaagagccugcagagcgccggcuuccccaccggccugaccuacagccagcugaugacccugaaggacagcaugaugcagcuggaccccagcgccaagaccuggaucgacaucgagggcagacccgaggaccccguggagaucgcccuguaccagcccaugagcggcugcuacauccacuucuucagagagcccaccgaccugaagcaguucaagcaggacgccaaguacagccacggcaucgacguggccgaccuguuccccgcccagcccggccugaccagcgccgugaucgaggcccugcccagaaacauggugcugaccugccagggcagcgacgacaucaagagacugcuggacagccagggcagaaaggacaucaagcugaucgacaucgcccugagcaaggccgacagcagaagauucgagaacgccgugugggaccagugcaaggaccugugccacaugcacaccggcguggugguggagaagaagaagagaggcggcaaggaggagaucaccccccacugcgcccugauggacugcaucauguacgacgccgccgugagcggcggccugaacauccccgugcugagagccgugcugcccagagacaugguguucagaaccagcagccccaagguggugcugugaggacuaguaauaaggaaacuguaugaaugucugugggcaggaagugaagagauccuucuguaaagguuuuuggaauuaugucugcugaauaauaaacuuuuuugaaauaauaaaucugguagaaaaaugagaucuaaaaaaaaaaaaaaaaaaaaaaaaaaaaaaaaaaaaaaaaaaaaaaaaaaaaaaaaaaaaaaaaaaaaaaaaaaaaaaaaaaaaaaaaaaaaaaaaaaaa

SEQ ID NO: 18965 - RNA, 2085 nt, Artificial Sequence
  mRNA product Design b-4 (A100) comprising derived and/or modified sequence from LASV(Lassa virus/H.sapiens-wt/NGA/2016/ISTH_0009;Clade II)__AVO03572__SP-HsPLAT_NP(2-569) (opt4)
aggagagucccgcagucggcguccagcggcucugcuuguucgugugugugucguugcaggccuuauucaagcuuaccauggacgccaugaagagaggccugugcugcgugcugcugcugugcggcgccguguucgugagccccagcgccagcaaggaggugaagagcuuccuguggacccagagccugagaagagagcugagcggcuacugcagcaacaucaagcugcagguggugaaggacgcccaggcccugcugcacggccuggacuucagcgaggugagcaacgugcagagacugaugagaaagcagaagagagacgacagcgaccugaagagacugagagaccugaaccaggccgugaacaaccugguggagcugaagagcacccagcagaagagcauccugagagugggcacccugaccagcgacgaccugcugacccuggccgccgaccuggagaagcugaagagcaaggugaucagaaccgagagaccccugagcagcggcguguacaugggcaaccugagcacccagcagcuggagcagagaagagcccugcugaacaugaucggcauggugggcggcgcccagggcacccagcccggcagagacggcguggugagagugugggacgugaagaaccccgaccugcugaacaaccaguucggcaccaugcccagccugacccuggccugccugaccaagcagggccagguggaccugaacgacgccgugcuggcccugaccgaccugggccugaucuacaccgccaaguaccccaacagcagcgaccuggacagacugagccagagccaccccauccugaacaugguggacaccaagaagagcagccugaacaucagcggcuacaacuucagccugggcgccgccgugaaggccggcgccugcaugcuggacggcggcaacaugcuggagaccaucaaggugaccccccagaccauggacggcauccugaagagcauccugaaggugaagaagagccugggcauguucgugagcgacacccccggcgagagaaaccccuacgagaacauccuguacaagaucugccugagcggcgacggcuggcccuacaucgccagcagaaccagcaucgugggcagagccugggagaacaccaccguggaccuggagagcgacggcaagccccagaaggugggcagcgccggcagcaacaagagccugcagagcgccggcuuccccaccggccugaccuacagccagcugaugacccugaaggacagcaugaugcagcuggaccccagcgccaagaccuggaucgacaucgagggcagacccgaggaccccguggagaucgcccuguaccagcccaugagcggcugcuacauccacuucuucagagagcccaccgaccugaagcaguucaagcaggacgccaaguacagccacggcaucgacguggccgaccuguuccccgcccagcccggccugaccagcgccgugaucgaggcccugcccagaaacauggugcugaccugccagggcagcgacgacaucaagagacugcuggacagccagggcagaagagacaucaagcugaucgacaucgcccugagcaaggccgacagcagaagauucgagaacgccgugugggaccagugcaaggaccugugccacaugcacaccggcguggugguggagaagaagaagagaggcggcaaggaggagaucaccccccacugcgcccugauggacugcaucauguacgacgccgccgugagcggcggccugaacauccccgugcugagagccgugcugcccagagacaugguguucagaaccagcagccccaagguggugcugugaggacuaguaauaaggaaacuguaugaaugucugugggcaggaagugaagagauccuucuguaaagguuuuuggaauuaugucugcugaauaauaaacuuuuuugaaauaauaaaucugguagaaaaaugagaucuaaaaaaaaaaaaaaaaaaaaaaaaaaaaaaaaaaaaaaaaaaaaaaaaaaaaaaaaaaaaaaaaaaaaaaaaaaaaaaaaaaaaaaaaaaaaaaaaaaaa

SEQ ID NO: 18966 - RNA, 2085 nt, Artificial Sequence
  mRNA product Design b-4 (A100) comprising derived and/or modified sequence from LASV(Lassa virus/H.sapiens-wt/NGA/2016/ISTH_0017;Clade II)__AVO03568__SP-HsPLAT_NP(2-569) (opt4)
aggagagucccgcagucggcguccagcggcucugcuuguucgugugugugucguugcaggccuuauucaagcuuaccauggacgccaugaagagaggccugugcugcgugcugcugcugugcggcgccguguucgugagccccagcgccagcaaggaggugaagagcuuccuguggacccagagccugagaagagagcugagcggcuacugcagcagcaucaagcugcagguggugaaggacgcccaggcccugcugcacggccuggacuucagcgaggugagcaacgugcagagacugaugagaaagcagaagagagacgacagcgaccugaagagacugagagaccugaaccaggccgugaacaaccugguggagcugaagagcacccagcagaagagcauccugagagugggcacccugaccagcgacgaccugcugacccuggccgccgaccuggagaagcugaagagcaaggugaucagaaccgagagaccccugagcagcggcguguacaugggcaaccugagcacccagcagcuggagcagagaagagcccugcugaacaugaucggcauggccggcggcgcccagggcacccagcccggcagagacggcguggugagagugugggacgugaagaaccccgaccugcugaacaaccaguucggcaccaugcccagccugacccuggccugccugaccaagcagggccagguggaccugaacgacgccgugcuggcccugaccgaccugggccugaucuacaccgccaaguaccccaacagcagcgaccuggacagacugagccagagccaccccauccugaacaugguggacaccaagaagagcagccugaacaucagcggcuacaacuucagccugggcgccgccgugaaggccggcgccugcaugcuggacggcggcaacaugcuggagaccaucaaggugaccccccagaccauggacggcauccugaagagcauccugaaggugaagagaagccugggcauguucgugagcgacgcccccggcgagagaaaccccuacgagaacauccuguacaagaucugccugagcggcgacggcuggcccuacaucgccagcagaaccagcaucgugggcagagccugggagaacaccaccguggaccuggagagcgacggcaagccccagaaggugggcgccaccggcagcaacaagagccugcagagcgccggcuuccccaccggccugaccuacagccagcugaugacccugaaggacagcaugaugcagcuggaccccagcgccaagaccuggaucgacaucgagggcagacccgaggaccccguggagguggcccuguaccagcccgugagcggcugcuacauccacuucuucagagagcccaccgaccugaagcaguucaagcaggacgccaaguacagccacggcaucgacguggccgaccuguuccccgcccagcccggccugaccagcgccgugaucgaggcccugcccagaaacauggugcugaccugccagggcagcgacgacaucaagaagcugcuggacagccagggcagaaaggacaucaagcugaucgacaucgcccugagcaaggccgacagcagaagauucgagaacgccgugugggaccagugcaaggaccugugccacaugcacaccggcguggugguggagaagaagaagagaggcggcaaggaggagaucaccccccacugcgcccugauggacugcaucauguacgacgccgccgugagcggcggccugaacauccccgugcugagagccgugcugcccagagacaugguguucagaaccagcagccccaagguggugcugugaggacuaguaauaaggaaacuguaugaaugucugugggcaggaagugaagagauccuucuguaaagguuuuuggaauuaugucugcugaauaauaaacuuuuuugaaauaauaaaucugguagaaaaaugagaucuaaaaaaaaaaaaaaaaaaaaaaaaaaaaaaaaaaaaaaaaaaaaaaaaaaaaaaaaaaaaaaaaaaaaaaaaaaaaaaaaaaaaaaaaaaaaaaaaaaaa

SEQ ID NO: 18967 - RNA, 2085 nt, Artificial Sequence
  mRNA product Design b-4 (A100) comprising derived and/or modified sequence from LASV(Lassa virus/H.sapiens-wt/NGA/2018/ISTH_0959;Clade II)__AVV65100__SP-HsPLAT_NP(2-569) (opt4)
aggagagucccgcagucggcguccagcggcucugcuuguucgugugugugucguugcaggccuuauucaagcuuaccauggacgccaugaagagaggccugugcugcgugcugcugcugugcggcgccguguucgugagccccagcgccagcaaggaggugaagagcuuccuguggacccagagccugagaagagagcugagcggcuacugcagcaacaucaagcugcagguggugaaggacgcccaggcccugcugcacggccuggacuucagcgaggugagcaacgugcagagacugaugagaaagcagaagagagacgacagcgaccugaagagacugagagaccugaaccaggccgugaacaaccugguggagcugaagagcacccagcagaagagcauccugagagugggcacccugaccagcgacgaccugcugacccuggccgccgaccuggagaagcugaagagcaaggugaucagaaccgagagaccccugagcagcggcguguacaugggcaaccugagcacccagcagcuggagcagagaagagcccugcugaaccugaucggcauggugggcggcgcccagggcacccagcccggcagagacggcguggugagagugugggacgugaagaaccccgaccugcugaacaaccaguucggcaccaugcccagccugacccuggccugccugaccaagcagggccagguggaccugaacgacguggugcuggcccugaccgaccugggccugaucuacaccgccaaguaccccaacagcagcgaccuggacagacugagccagagccaccccauccugaacaugguggacaccaagaagagcagccugaacaucagcggcuucaacuucagccugggcgccgccgugaaggccggcgccugcaugcuggacggcggcaacaugcuggagaccaucaaggugaccccccagaccauggacggcauccugaagagcauccugaaggugaagaagagccugggcauguucgugagcgacacccccggcgagagaaaccccuacgagaacauccuguacaagaucugccugagcggcgacggcuggcccuacaucgccagcagaaccagcaucgugggcagagccugggagaacaccaccguggaccuggagagcgacggcaagccccacaaggugggcaccgccggcagcaacaagagccugcagagcgccggcuuccccaccggccugaccuacagccagcugaugacccugaaggacagcaugaugcagcuggaccccagcgccaagaccuggaucgacaucgagggcagacccgaggaccccguggagaucgcccuguaccagcccaugagcggcugcuacauccacuucuucagagagcccaccgaccugaagcaguucaagcaggacgccaaguacagccacggcaucgacguggccgaccuguuccccgcccagcccggccugaccagcgccgugaucgaggcccugcccagaaacauggugcugaccugccagggcagcgacgacaucaagagacugcuggacagccagggcagaaaggacaucaagcugaucgacaucgcccugagcaagaccgacagcagaagauucgagaacgccgugugggaccagugcaaggaccugugccacaugcacaccggcguggugguggagaagaagaagagaggcggcaaggaggagaucaccccccacugcgcccugauggacugcaucauguacgacgccgccgugagcggcggccugaacauccccgugcugagagccgugcugcccagagacaugguguucagaaccagcagccccaagguggugcugugaggacuaguaauaaggaaacuguaugaaugucugugggcaggaagugaagagauccuucuguaaagguuuuuggaauuaugucugcugaauaauaaacuuuuuugaaauaauaaaucugguagaaaaaugagaucuaaaaaaaaaaaaaaaaaaaaaaaaaaaaaaaaaaaaaaaaaaaaaaaaaaaaaaaaaaaaaaaaaaaaaaaaaaaaaaaaaaaaaaaaaaaaaaaaaaaa

SEQ ID NO: 18968 - RNA, 2085 nt, Artificial Sequence
  mRNA product Design b-4 (A100) comprising derived and/or modified sequence from LASV(LASV003-NIG-2008;Clade II)__AIT17581__SP-HsPLAT_NP(2-569) (opt4)
aggagagucccgcagucggcguccagcggcucugcuuguucgugugugugucguugcaggccuuauucaagcuuaccauggacgccaugaagagaggccugugcugcgugcugcugcugugcggcgccguguucgugagccccagcgccagcaaggaggugaagagcuuccuguggacccagagccugagaagagagcugagcggcuacugcagcagcaucaagcugcagguggugaaggacgcccaggcccugcugcacggccuggacuucagcgaggugagcaacgugcagagacugaugagaaagcagaagagagacgacagcgaccugaagagacugagagaccugaaccaggccgugaacaaccugguggagcugaagagcacccagcagaagagcgugcugagagugggcacccugaccagcgacgaccugcugacccuggccgccgaccuggagaagcugaagagcaaggugaucagaaccgagagaccccugagcagcggcguguacaugggcaaccugagcgcccagcagcuggagcagagaagaacccugcugaacaugaucggcauggugggcggcgcccagggcacccagcccggcagagacggcguggugagagugugggacgugaagaaccccgaccugcugaacaaccaguucggcaccaugcccagccugacccuggccugccugaccaagcagggccagguggaccugaacgacguggugcuggcccugaccgaccugggccugaucuacaccgccaaguaccccaacagcagcgaccuggacagacugagccagagccaccccauccugagcaugguggacaccaagaagagcagccugaacaucagcggcuacaacuucagccugggcgccgccgugaaggccggcgccugcaugcuggacggcggcaacaugcuggagaccaucaaggugaccccccagaccauggacggcauccugaagagcauccugaaggugaagaagagccugggcauguucgugagcgacacccccggcgagagaaaccccuacgagaacauccuguacaagaucugccugagcggcgacggcuggcccuacaucgccagcagaaccagcaucgugggcagagccugggagaacaccaccguggaccuggagagcgacggcaagccccagaaggugggcaccgccggcagcaacaagagccugcagagcgccggcuuccccaccggccugaccuacagccagcugaugacccugaaggacagcaugaugcagcuggaccccagcgccaagaccuggaucgacaucgagggcagacccgaggaccccguggagaucgcccuguaccagcccaugagcggcugcuacauccacuucuucagagagcccaccgaccugaagcaguucaagcaggacgccaaguacagccacggcaucgacgugaccgaccuguuccccgcccagcccggccugaccagcgccgugaucgaggcccugcccagaaacauggugcugaccugccagggcagcgacgacaucaagagacugcuggacagccagggcagaagagacaucaagcugaucgacaucgcccugagcaaggccgacagcagaagauucgagaacgccgugugggaccagugcaaggaccugugccacaugcacaccggcguggugguggagaagaagaagagaggcggcaaggaggagaucaccccccacugcgcccugauggacugcaucauguacgacgccgccgugagcggcggccugaacauccccgugcugagagccgugcugcccagagacaugguguucagaaccagcagccccaagguggugcugugaggacuaguaauaaggaaacuguaugaaugucugugggcaggaagugaagagauccuucuguaaagguuuuuggaauuaugucugcugaauaauaaacuuuuuugaaauaauaaaucugguagaaaaaugagaucuaaaaaaaaaaaaaaaaaaaaaaaaaaaaaaaaaaaaaaaaaaaaaaaaaaaaaaaaaaaaaaaaaaaaaaaaaaaaaaaaaaaaaaaaaaaaaaaaaaaa

SEQ ID NO: 18969 - RNA, 2085 nt, Artificial Sequence
  mRNA product Design b-4 (A100) comprising derived and/or modified sequence from LASV(LASV035-NIG-2009;Clade II)__AIT17589__SP-HsPLAT_NP(2-569) (opt4)
aggagagucccgcagucggcguccagcggcucugcuuguucgugugugugucguugcaggccuuauucaagcuuaccauggacgccaugaagagaggccugugcugcgugcugcugcugugcggcgccguguucgugagccccagcgccagcaaggaggugaagagcuuccuguggacccagagccugagaagagagcugagcggcuacugcagcagcaucaagcugcagguggugaaggacgcccaggcccugcugcacggccuggacuucagcgaggugagcaacgugcagagacugaugagaaagcagaagagagacgacagcgaccugaagagacugagagaccugaaccaggccgugaacaaccugguggagcugaagagcacccagcagaagagcauccugagagugggcacccugaccagcgacgaccugcugacccuggccgccgaccuggagaagcugaagagcaaggugaucagaaccgagagaccccugagcagcggcguguacaugggcaaccugagcgcccagcagcuggagcagagaagagcccugcugaacaugaucggcauggugggcggcgcccagggcacccagcccggcagagacggcguggugagagugugggacgugaagaaccccgaccugcugaacaaccaguucggcaccaugcccagccugacccuggccugccugaccaagcagggccagguggaccugaacgacgccgugcuggcccugaccgaccugggccugaucuacaccgccaaguaccccaacagcagcgaccuggacagacugagccagagccaccccauccugaacaugguggacaccaagaagagcagccugaacaucagcggcuacaacuucagccugggcgccgccgugaaggccggcgccugcaugcuggacggcggcaacaugcuggagaccaucaaggugaccccccagaccauggacggcauccugaagagcauccugaaggugaagagaagccugggcauguucgugagcgacacccccggcgagagaaaccccuacgagaacauccuguacaagaucugccugagcggcgacggcuggcccuacaucgccagcagaaccagcaucgugggcagagccugggagaacaccaccguggaccuggagagcgacggcaagccccagaaggugggcaccaccggcagcaacaagagccugcagagcgccggcuuccccaccggccugaccuacagccagcugaugacccugaaggacagcaugaugcagcuggaccccagcgccaagaccuggaucgacaucgagggcagacccgaggaccccguggagaucgcccuguaccagcccaugagcggcugcuacauccacuucuucagagagcccaccgaccugaagcaguucaagcaggacgccaaguacagccacggcaucgacguggccgaccuguuccccgcccagcccggccugaccagcgccgugaucgaggcccugcccagaaacauggugcugaccugccagggcagcgacgacaucaagaagcugcuggacagccagggcagaagagacaucaagcugaucgacaucgcccugagcaaggccgacagcagaaaguucgagaacgccgugugggaccagugcaaggaccugugccacaugcacaccggcguggugguggagaagaagaagagaggcggcaaggaggagaucaccccccacugcgcccugauggacugcaucauguacgacgccgccgugagcggcggccugaacauccccgugcugagagccgugcugcccagagacaugguguucagaaccagcagccccaagguggugcugugaggacuaguaauaaggaaacuguaugaaugucugugggcaggaagugaagagauccuucuguaaagguuuuuggaauuaugucugcugaauaauaaacuuuuuugaaauaauaaaucugguagaaaaaugagaucuaaaaaaaaaaaaaaaaaaaaaaaaaaaaaaaaaaaaaaaaaaaaaaaaaaaaaaaaaaaaaaaaaaaaaaaaaaaaaaaaaaaaaaaaaaaaaaaaaaaa

SEQ ID NO: 18970 - RNA, 2085 nt, Artificial Sequence
  mRNA product Design b-4 (A100) comprising derived and/or modified sequence from LASV(LASV1000-NIG-2009;Clade II)__AIT17783__SP-HsPLAT_NP(2-569) (opt4)
aggagagucccgcagucggcguccagcggcucugcuuguucgugugugugucguugcaggccuuauucaagcuuaccauggacgccaugaagagaggccugugcugcgugcugcugcugugcggcgccguguucgugagccccagcgccagcaaggaggugaagagcuuccuguggacccagagccugagaagagagcugagcggcuacugcagcaacaucaagcugcagguggugaaggacgcccaggcccugcugcacggccuggacuucagcgaggugagcaacgugcagagacugaugagaaagcagaagagagacgacagcgaccugaagagacugagagaccugaaccaggccgugaacaaccugguggagcugaagagcacccagcagaagagcauccugagagugggcacccugaccagcgacgaccugcugacccuggccgccgaccuggagaagcugaagagcaaggugaucagaaccgagagaccccugagcagcggcguguacaugggcaaccugagcacccagcagcuggagcagagaagagcccugcugaacaugaucggcauggugggcggcgcccagggcacccagcccggcagagacggcguggugagagugugggacgugaagaaccccgaccugcugaacaaccaguucggcaccaugcccagccugacccuggccugccugaccaagcagggccagguggaccugaacgacguggugcuggcccugaccgaccugggccugaucuacaccgccaaguaccccaacagcagcgaccuggacagacugagccagagccaccccauccugaacaugguggacaccaagaagagcagccugaacaucagcggcuacaacuucagccugggcgccgccgugaaggccggcgccugcaugcuggacggcggcaacaugcuggagaccaucaaggugaccccccagaccauggacggcauccugaagagcauccugaaggugaagaagagccugggcauguucgugagcgacacccccggcgagagaaaccccuacgagaacauccuguacaagaucugccugagcggcgacggcuggcccuacaucgccagcagaaccagcaucgugggcagagccugggagaacaccaccguggaccuggagagcgacggcaagccccagaaggugggcaccgccggcagcaacaagagccugcagagcgccggcuuccccaccggccugaccuacagccagcugaugacccugaaggacagcaugaugcagcuggaccccagcgccaagaccuggaucgacaucgagggcagacccgaggaccccguggagaucgcccuguaccagcccgugagcggcugcuacauccacuucuucagagagcccaccgaccugaagcaguucaagcaggacgccaaguacagccacggcaucgacguggccgaccuguuccccgcccagcccggccugaccagcgccgugaucgaggcccugcccagaaacauggugcugaccugccagggcagcgacgacaucaagagacugcuggacagccagggcagaagagacaucaagcugaucgacaucgcccugagcaaggccgacagcagaagauucgagaacgccgugugggaccagugcaaggaccugugccacaugcacaccggcguggugguggagaagaagaagagaggcggcaaggaggagaucaccccccacugcgcccugauggacugcaucauguacgacgccgccgugagcggcggccugaacauccccgugcugagagccgugcugcccagagacaugguguucagaaccagcagccccaagguggugcugugaggacuaguaauaaggaaacuguaugaaugucugugggcaggaagugaagagauccuucuguaaagguuuuuggaauuaugucugcugaauaauaaacuuuuuugaaauaauaaaucugguagaaaaaugagaucuaaaaaaaaaaaaaaaaaaaaaaaaaaaaaaaaaaaaaaaaaaaaaaaaaaaaaaaaaaaaaaaaaaaaaaaaaaaaaaaaaaaaaaaaaaaaaaaaaaaa

SEQ ID NO: 18971 - RNA, 2085 nt, Artificial Sequence
  mRNA product Design b-4 (A100) comprising derived and/or modified sequence from LASV(LASV221-NIG-2010;Clade II)__AIT17625__SP-HsPLAT_NP(2-569) (opt4)
aggagagucccgcagucggcguccagcggcucugcuuguucgugugugugucguugcaggccuuauucaagcuuaccauggacgccaugaagagaggccugugcugcgugcugcugcugugcggcgccguguucgugagccccagcgccagcaaggaggugaagagcuuccuguggacccagagccugagaagagagcugagcggcuacugcagcagcaucaagcugcagguggugaaggacgcccaggcccugcugcacggccuggacuucagcgaggugagcaacgugcagagacugaugagaaagcagagaagagacgacagcgaccugaagagacugagagaccugaaccaggccgugaacaaccugguggagcugaagagcacccagcagaagagcauccugagagugggcacccugaccagcgacgaccugcugacccuggccgccgaccuggagaagcugaagagcaaggugaucagaaccgagagaccccugagcagcggcguguacaugggcaaccugagcacccagcagcuggagcagagaagagcccugcugaacaugaucggcauggugggcggcgcccagggcacccagcccggcagagacggcguggugagagugugggacgugaagaaccccgaccugcugaacaaccaguucggcaccaugcccagccugacccuggccugccugaccaagcagggccagguggaccugaacgacgccgugcuggcccugaccgaccugggccugaucuacaccgccaaguaccccaacagcagcgaccuggacagacugagccagagccaccccauccugaacaugguggacaccaagaagagcagccugaacaucagcggcuacaacuucagccugggcgccgccgugaaggccggcgccugcaugcuggacggcggcaacaugcuggagaccaucaaggugaccccccagaccguggacggcauccugaagagcauccugaaggugaagagaagccugggcauguucgugagcgacacccccggcgagagaaaccccuacgagaacauccuguacaagaucugccugagcggcgacggcuggcccuacaucgccagcagaaccagcaucgugggcagagccugggagaacaccaccguggaccuggagagcgacggcaagccccagaaggugggcaccgccggcagcaacaagagccugcagagcgccggcuuccccaccggccugaccuacagccagcugaugacccugaaggacagcaugaugcagcuggaccccagcgccaagaccuggaucgacaucgagggcagacccgaggaccccguggagaucgcccuguaccagcccaugagcggcugcuacauccacuucuucagagagcccaccgaccugaagcaguucaagcaggacgccaaguacagccacggcaucgacguggccgaccuguuccccgcccagcccggccugaccagcgccgugaucgaggcccugcccagaaacauggugcugaccugccagggcagcgacgacaucaagagacugcuggacagccagggcagaagagacaucaagcugaucgacaucgcccugagcaaggccgacagcagaaaguucgagaacgccgugugggaccagugcaaggaccugugccacaugcacaccggcguggugguggagaagaagaagagaggcggcaaggaggagaucaccccccacugcgcccugauggacugcaucauguacgacgccgccgugagcggcggccugaacauccccgugcugagagccgugcugcccagagacaugguguucagaaccagcagccccaagguggugcugugaggacuaguaauaaggaaacuguaugaaugucugugggcaggaagugaagagauccuucuguaaagguuuuuggaauuaugucugcugaauaauaaacuuuuuugaaauaauaaaucugguagaaaaaugagaucuaaaaaaaaaaaaaaaaaaaaaaaaaaaaaaaaaaaaaaaaaaaaaaaaaaaaaaaaaaaaaaaaaaaaaaaaaaaaaaaaaaaaaaaaaaaaaaaaaaaa

SEQ ID NO: 18972 - RNA, 2085 nt, Artificial Sequence
  mRNA product Design b-4 (A100) comprising derived and/or modified sequence from LASV(LASV237-NIG-2010;Clade II)__AIT17639__SP-HsPLAT_NP(2-569) (opt4)
aggagagucccgcagucggcguccagcggcucugcuuguucgugugugugucguugcaggccuuauucaagcuuaccauggacgccaugaagagaggccugugcugcgugcugcugcugugcggcgccguguucgugagccccagcgccagcaaggaggugaagagcuuccuguggacccagagccugagaagagagcugagcggcuacugcagcaacaucaagcugcagguggugaaggacgcccaggcccugcugcacggccuggacuucagcgaggugagcaacgugcagagacugaugagaaagcagaagagagacgacagcgaccugaagagacugagagaccugaaccaggccgugaacaaccugguggagcugaagagcacccagcagaagagcauccugagagugggcacccugaccagcgacgaccugcugacccuggccgccgaccuggagaagcugaagagcaaggugaucagaaccgagagaccccugagcagcggcguguacaugggcaaccugagcacccagcagcuggagcagagaagagcccugcugaacaugaucggcauggugggcggcgcccagggcacccagcccggcagagacggcguggugagagugugggacgugaagaaccccgaccugcugaacaaccaguucggcaccaugcccagccugacccuggccugccugaccaagcagggccagguggaccugaacgacgccgugcuggcccugaccgaccugggccugaucuacaccgccaaguaccccaacagcagcgaccuggacagacugagccagagccaccccauccugaacaugguggacaucaagaagagcagccugaacaucagcggcuacaacuucagccugggcgccgccgugaaggccggcgccugcaugcuggacggcggcaacaugcuggagaccaucaaggugaccccccagaccauggacggcauccugaagagcauccugaaggugaagagaagccugggcauguucgugagcgacacccccggcgagagaaaccccuacgagaacauccuguacaagaucugccugagcggcgacggcuggcccuacaucgccagcagaaccagcaucgugggcagagccugggagaacaccaccguggaccuggagagcgacggcaagccccagaaggugggcagcgccggcagcaacaagagccugcagagcgccggcuuccccaccggccugaccuacagccagcugaugacccugaaggacagcaugaugcagcuggaccccagcgccaagaccuggaucgacaucgagggcagacccgaggaccccguggagaucgcccuguaccagcccaugagcggcugcuacauccacuucuucagagagcccaccgaccugaagcaguucaagcaggacgccaaguacagccacggcaucgacguggccgaccuguuccccgcccagcccggccugaccagcgccgugaucgaggcccugcccagaaacauggugcugaccugccagggcagcgacgacaucaagagacugcuggacagccagggcagaagagacaucaagcugaucgacaucgcccugagcaaggccgacagcagaagauucgagaacgccgugugggaccagugcaaggaccugugccacaugcacaccggcguggugguggagaagaagaagagaggcggcaaggaggagaucaccccccacugcgcccugauggacugcaucauguacgacgccgccgugagcggcggccugaacauccccgugcugagagccgugcugcccagagacaugguguucagaaccagcagccccaagguggugcugugaggacuaguaauaaggaaacuguaugaaugucugugggcaggaagugaagagauccuucuguaaagguuuuuggaauuaugucugcugaauaauaaacuuuuuugaaauaauaaaucugguagaaaaaugagaucuaaaaaaaaaaaaaaaaaaaaaaaaaaaaaaaaaaaaaaaaaaaaaaaaaaaaaaaaaaaaaaaaaaaaaaaaaaaaaaaaaaaaaaaaaaaaaaaaaaaa

SEQ ID NO: 18973 - RNA, 2085 nt, Artificial Sequence
  mRNA product Design b-4 (A100) comprising derived and/or modified sequence from LASV(LASV253-NIG-2011;Clade II)__AIT17671__SP-HsPLAT_NP(2-569) (opt4)
aggagagucccgcagucggcguccagcggcucugcuuguucgugugugugucguugcaggccuuauucaagcuuaccauggacgccaugaagagaggccugugcugcgugcugcugcugugcggcgccguguucgugagccccagcgccagcaaggaggugaagagcuuccuguggacccagagccugagaagagagcugagcggcuacugcagcagcaucaagcugcagguggugaaggacgcccaggcccugcugcacggccuggacuucagcgaggugagcaacgugcagagacugaugagaaagcagaagagagacgacagcgaccugaagagacugagagaccugaaccaggccgugaacaaccugguggagcugaagagcacccagcagaagagcgugcugagagugggcacccugaccagcgacgaccugcugacccuggccgccgaccuggagaagcugaagagcaaggugaucagaaccgagagaccccugagcagcggcguguacaugggcaaccugagcacccagcagcuggagcagagaagagcccugcugaacaugaucggcauggugggcggcgcccagggcacccagcccggcagagacggcguggugagagugugggacgugaagaaccccgaccugcugaacaaccaguucggcaccaugcccagccugacccuggccugccugaccaagcagggccagguggaccugaacgacguggugcuggcccugaccgaccugggccugaucuacaccgccaaguaccccaacagcagcgaccuggacagacugagccagagccaccccauccugaacaugguggacaccaagaagagcagccugaacaucagcggcuacaacuucagccugggcgccgccgugaaggccggcgccugcaugcuggacggcggcaacaugcuggagaccaucaaggugaccccccagaccauggacggcauccugaagagcauccugaaggugaagaagagccugggcauguucgugagcgacacccccggcgagagaaaccccuacgagaacauccuguacaagaucugccugagcggcgacggcuggcccuacaucgccagcagaaccagcaucgugggcagagccugggagaacaccaccguggaccuggagagcgacggcaagccccagaaggugggcaccgccggcagcaacaagagccugcagagcgccggcuuccccaccggccugaccuacagccagcugaugacccugaaggacagcaugaugcagcuggaccccagcgccaagaccuggaucgacaucgagggcagacccgaggaccccguggagaucgcccuguaccagcccaugagcggcugcuacauccacuucuucagagagcccaccgaccugaagcaguucaagcaggacgccaaguacagccacggcaucgacgugaccgaccuguuccccgcccagcccggccugaccagcgccgugaucgaggcccugcccagaaacauggugcugaccugccagggcagcgacgacaucaagagacugcuggacagccagggcagaagagacaucaagcugaucgacaucgcccugagcaaggccgacagcagaagauucgagaacgccgugugggaccagugcaaggaccugugccacaugcacaccggcguggugguggagaagaagaagagaggcggcaaggaggagaucaccccccacugcgcccugauggacugcaucauguacgacgccgccgugagcggcggccugaacauccccgugcugagagccgugcugcccagagacaugguguucagaaccagcagccccaagguggugcugugaggacuaguaauaaggaaacuguaugaaugucugugggcaggaagugaagagauccuucuguaaagguuuuuggaauuaugucugcugaauaauaaacuuuuuugaaauaauaaaucugguagaaaaaugagaucuaaaaaaaaaaaaaaaaaaaaaaaaaaaaaaaaaaaaaaaaaaaaaaaaaaaaaaaaaaaaaaaaaaaaaaaaaaaaaaaaaaaaaaaaaaaaaaaaaaaa

SEQ ID NO: 18974 - RNA, 2085 nt, Artificial Sequence
  mRNA product Design b-4 (A100) comprising derived and/or modified sequence from LASV(LASV254-NIG-2011;Clade II)__AIT17675__SP-HsPLAT_NP(2-569) (opt4)
aggagagucccgcagucggcguccagcggcucugcuuguucgugugugugucguugcaggccuuauucaagcuuaccauggacgccaugaagagaggccugugcugcgugcugcugcugugcggcgccguguucgugagccccagcgccagcaaggaggugaagagcuuccuguggacccagagccugagaagagagcugagcggcuacugcagcagcaucaagcugcagguggugaaggacgcccaggcccugcugcacggccuggacuucagcgaggugagcaacgugcagagacugaugagaaagcagaagagagacgacagcgaccugaagagacugagagaccugaaccaggccgugaacaaccugguggagcugaagagcacccagcagaagagcgugcugagagugggcacccugaccagcgacgaccugcugacccuggccgccgaccuggagaagcugaagagcaaggugaucagaaccgagagaccccugagcagcggcguguacaugggcaaccugagcacccagcagcuggagcagagaagagcccugcugaacaugaucggcauggugggcggcgcccagggcacccagcccggcagagacggcguggugagagugugggacgugaagaaccccgaccugcugaacaaccaguucggcaccaugcccagccugacccuggccugccugaccaagcagggccagguggaccugaacgacgccgugcuggcccugaccgaccugggccugaucuacaccgccaaguaccccaacagcagcgaccuggacagacugagccagagccaccccauccugaacaugguggacaccaagaagagcagccugaacaucagcggcuacaacuucagccugggcgccgccgugaaggccggcgccugcaugcuggacggcggcaacaugcuggagaccaucaaggugaccccccagaccauggacggcauccugaagagcauccugaaggugaagaagagccugggcauguucgugagcgacacccccggcgagagaaaccccuacgagaacauccuguacaagaucugccugagcggcgacggcuggcccuacaucgccagcagaaccagcaucgugggcagagccugggagaacaccaucguggaccuggagagcgacggcaagccccagaaggugggcaccgccggcagcaacaagagccugcagagcgccggcuuccccaccggccugaccuacagccagcugaugacccugaaggacagcaugaugcagcuggaccccagcgccaagaccuggaucgacaucgagggcagacccgaggaccccguggagaucgcccuguaccagcccaugagcggcugcuacauccacuucuucagagagcccaccgaccugaagcaguucaagcaggacgccaaguacagccacggcaucgacguggccgaccuguuccccgcccagcccggccugaccagcgccgugaucgaggcccugcccagaaacauggugcugaccugccagggcagcgacgacaucaagagacugcuggacagccagggcagaagagacaucaagcugaucgacaucgcccugagcaaggccgacagcagaagauucgagaacgccgugugggaccagugcaaggaccugugccacaugcacaccggcguggugguggagaagaagaagagaggcggcaaggaggagaucaccccccacugcgcccugauggacugcaucauguacgacgccgccgugagcggcggccugaacauccccgugcugagagccgugcugcccagagacaugguguucagaaccagcagccccaagguggugcugugaggacuaguaauaaggaaacuguaugaaugucugugggcaggaagugaagagauccuucuguaaagguuuuuggaauuaugucugcugaauaauaaacuuuuuugaaauaauaaaucugguagaaaaaugagaucuaaaaaaaaaaaaaaaaaaaaaaaaaaaaaaaaaaaaaaaaaaaaaaaaaaaaaaaaaaaaaaaaaaaaaaaaaaaaaaaaaaaaaaaaaaaaaaaaaaaa

SEQ ID NO: 18975 - RNA, 2085 nt, Artificial Sequence
  mRNA product Design b-4 (A100) comprising derived and/or modified sequence from LASV(Nig08-04;Clade II)__ADU56611__SP-HsPLAT_NP(2-569) (opt4)
aggagagucccgcagucggcguccagcggcucugcuuguucgugugugugucguugcaggccuuauucaagcuuaccauggacgccaugaagagaggccugugcugcgugcugcugcugugcggcgccguguucgugagccccagcgccagcaaggaggugaagagcuuccuguggacccagagccugagaagagagcugagcggcuacugcagcaacaucaagcugcagguggugaaggacgcccaggcccugcugcacggccuggacuucagcgaggugagcaacgugcagagacugaugagaaagcagaagagagacgacggcgaccugaagagacugagagaccugaaccaggccgugaacaaccugguggagcugaagagcacccagcagaagagcgugcugagagugggcacccugaccagcgacgaccugcugacccuggccgccgaccuggagaagcugaagagcaaggugaucagaaccgagagaccccugagcagcggcguguacaugggcaaccugagcacccagcagcuggagcagagaaaggcccugcugagcaugaucggcauggugggcggcgcccagggcacccagcccggcagagacggcguggugagagugugggacgugaagaaccccgaccugcugaacaaccaguucggcaccaugcccagccugacccuggccugccugaccaagcagggccagguggaccugaacgacgccgugcuggcccugaccgaccugggccugaucuacaccgccaaguaccccaacagcagcgaccuggacagacugagccagagccaccccauccugaacaugguggacaccaagaagagcagccugaacaucagcggcuacaacuucagccugggcgccgccgugaaggccggcgccugcaugcuggacggcggcaacaugcuggagaccaucaaggugaccccccagaccauggacggcauccugaagagcauccugaaggugaagagaagccugggcauguucgugagcgacacccccggcgagagaaaccccuacgagaacauccuguacaagaucugccugagcggcgacggcuggcccuacaucgccagcagaaccagcaucgugggcagagccugggagaacaccaccguggaccuggagagcgacggcaagccccagaaggugggcaccgccggcagcaacaagagccugcagagcgccggcuuccccaccggccugaccuacagccagcugaugacccugaaggacagcaugaugcagcuggaccccagcgccaagaccuggaucgacaucgagggcagacccgaggaccccguggagaucgcccuguaccagcccaugagcggcugcuacauccacuucuucagagagcccaccgaccugaagcaguucaagcaggacgccaaguacagccacggcaucgacgugaccgaccuguucagcgcccagcccggccugaccagcgccgugaucgaggcccugcccagaaacauggugcugaccugccagggcagcgacgacaucaagaagcugcuggacagccagggcagaagagacaucaagcugaucgacaucagccugaacaaggccgacagcagaagauucgagaacgccgugugggaccagugcaaggaccugugccacaugcacaccggcguggugguggagaagaagaagagaggcggcaaggaggagaucaccccccacugcgcccugauggacugcaucauguucgacgccgccgugagcggcggccugaacauccccauccugagagccgugcugcccagagacaugguguucagaaccagcagccccaagguggugcugugaggacuaguaauaaggaaacuguaugaaugucugugggcaggaagugaagagauccuucuguaaagguuuuuggaauuaugucugcugaauaauaaacuuuuuugaaauaauaaaucugguagaaaaaugagaucuaaaaaaaaaaaaaaaaaaaaaaaaaaaaaaaaaaaaaaaaaaaaaaaaaaaaaaaaaaaaaaaaaaaaaaaaaaaaaaaaaaaaaaaaaaaaaaaaaaaa

SEQ ID NO: 18976 - RNA, 2088 nt, Artificial Sequence
  mRNA product Design b-4 (A100) comprising derived and/or modified sequence from LASV(GA391;Clade III)__AAA46284__SP-HsPLAT_NP(2-570) (opt4)
aggagagucccgcagucggcguccagcggcucugcuuguucgugugugugucguugcaggccuuauucaagcuuaccauggacgccaugaagagaggccugugcugcgugcugcugcugugcggcgccguguucgugagccccagcgccagcaaggaggugagaagcugccuguggacccagagccugagaagagagcugagcggcuacugcagcaacaucaagcugcagguggugaaggacgcccaggcccugcugcacggccuggacuucagcgaggugagcaacgugcagagacugaugagaaagcagaagagagacgacggcgaccugaagagacugagagaccugaaccaggccgugaacaaccugguggagcugaagagcacccagcagaagagcgugcugagagugggcacccugagcagcgacgaccugcugauccuggccgccgaccuggagaagcugaagagcaaggugaccagaaccgagagaccccugagcagcggcguguacaugggcaaccugagcagccagcagcuggaccagagaagagcccugcugaacaugaucggcaugaccggcgugagcggcggcggcaagggcgccagcaacggcaucgugagagugugggacgugaagaacgccgagcugcugaacaaccaguucggcaccaugcccagccugacccuggccugccugaccaagcagggccagguggaccugaacgacgccgugcaggcccugaccgaccugggccugaucuacaccgccaaguaccccaacagcagcgaccuggacagacugagccagagccaccccauccugaacaugaucgacaccaagaagagcagccugaacaucagcggcuacaacuucagccugggcgccgccgugaaggccggcgccugcaugcuggacggcggcaacaugcuggagaccaucaaggugagcccccagaccauggacggcauccugaagagcauccugaaggugaagaagagccugggcauguucgugagcgacacccccggcgagagaaaccccuacgagaacauccuguacaagaucugccugagcggcgacggcuggagcuacaucgccagcagaaccagcaucgugggcagagccugggagaacaccgugguggaccuggagcaggacaacaagccccagaagaucggcaacggcggcagcaacaagagccugcagagcgccggcuucgccgccggccugaucuacagccagcugaugacccugaaggacuucaagugcuucaaccugauccccaacgccaagaccuggauggacaucgagggcagacccgaggaccccguggagaucgcccuguaccagcccagcagcggcugcuacgugcacuucuucagagagcccaccgaccugaagcaguucaagcaggacgccaaguacagccacggcagagacgugaccgaccuguucgccgcccagcccggccugaccagcgccgugaucgaggcccugcccagaaacauggugaucaccugccagggcagcgaggacaucagaaagcugcuggagagccagggcagaagagacaucaagcugaucgacaucacccugagcaaggccgacagcagaaaguucgagaacgccgugugggaccaguucaaggaccugugccacaugcacaccggcguggugguggagaagaagaagagaggcggcaaggaggagaucaccccccacugcgcccugauggacugcaucauguucgacgccgccgugagcggcggccuggacgccaaggugcugagaguggugcugcccagagacaugguguucagaaccagcacccccaagguggugcugugaggacuaguaauaaggaaacuguaugaaugucugugggcaggaagugaagagauccuucuguaaagguuuuuggaauuaugucugcugaauaauaaacuuuuuugaaauaauaaaucugguagaaaaaugagaucuaaaaaaaaaaaaaaaaaaaaaaaaaaaaaaaaaaaaaaaaaaaaaaaaaaaaaaaaaaaaaaaaaaaaaaaaaaaaaaaaaaaaaaaaaaaaaaaaaaaa

SEQ ID NO: 18977 - RNA, 2085 nt, Artificial Sequence
  mRNA product Design b-4 (A100) comprising derived and/or modified sequence from LASV(Nig08-A19;Clade III)__ADU56619__SP-HsPLAT_NP(2-569) (opt4)
aggagagucccgcagucggcguccagcggcucugcuuguucgugugugugucguugcaggccuuauucaagcuuaccauggacgccaugaagagaggccugugcugcgugcugcugcugugcggcgccguguucgugagccccagcgccagcaaggaggugaagagcuuccuguggacccagagccugagaagagagcugagcggcuacugcagcaacaucaagcugcagguggugaaggacgcccaggcccugcugcacggccuggacuucagcgaggugagcaacgugcagagacugaugagaaagcagaagagagacgacggcgaccugaagagacugagagaccugaaccaggccgugaacaaccugguggagcugaagagcacccagcagaagagcgugcugagagugggcacccugagcagcgacgaccugcuggugcuggccgccgaccuggagaagcugaagagcaagguggugagaaccgagagaccccugagcagcggcaucuacaugggcaaccugagcagccagcagcuggaccagagaaaggcccugcugaacaugaucggcaugaccggcggcaacggcggcagaaacaccaccagcgacggcaucgugagagugugggacgugaagaacgccgagcugcugaacaaccaguucggcaccaugcccagccugacccuggccugccugaccaagcagggccagguggaccugaacgacgccgugcaggcccugaccgaccugggccugaucuacaccgccaaguaccccaacagcagcgaccuggacagacuggcccagagccaccccauccugaacaugaucgacaccaagaagagcagccugaacaucagcggcuacaacuucagccugggcgccgccgugaaggccggcgccugcaugcuggacggcggcaacaugcuggagaccaucaaggugagcccccagaccauggacggcauccugaagagcauccugaaggugaagagaagccugggcauguucaucagcgacacccccggcgagagaaaccccuacgagaacauccuguacaagaucugccugagcggcgacggcuggcccuacaucgccagcagaaccagcaucgugggcagagccugggagaacaccgugguggaccuggagagcgacaacaagccccagaagaccggcaacggcggcagcaacaagagccugcagagcgccggcuucgccgccggccugaccuacagccagcugaugacccugaaggacagcaugcugcagcuggaccccaacgccaagaccuggauggacaucgagggcagacccgaggaccccguggagaucgcccuguaccagcccagcagcggcugcuacauccacuucuucagagagcccaccgaccugaagcaguucaagcaggacgccaaguacagccacggcaucgacgugaccgaccuguucgccgcccagcccggccugaccagcgccgugaucgaggcccugcccagaaacauggugaucaccugccagggcagcgaggacaucagaaagcugcuggagagccagggcagaagagacaucaagcugaucgacaucagccugagcaagguggacagcagaaaguucgagaacgccgugugggaccaguucaaggaccugugccacaugcacaccggcaucgugguggagaagaagaagagaggcggcaaggaggagaucaccccccacugcgcccugauggacugcaucauguucgacgccgccgugagcggcggcguggacgccaaggugcugagagccgugcugcccagagacaugguguucagaaccagcacccccaagguggugcugugaggacuaguaauaaggaaacuguaugaaugucugugggcaggaagugaagagauccuucuguaaagguuuuuggaauuaugucugcugaauaauaaacuuuuuugaaauaauaaaucugguagaaaaaugagaucuaaaaaaaaaaaaaaaaaaaaaaaaaaaaaaaaaaaaaaaaaaaaaaaaaaaaaaaaaaaaaaaaaaaaaaaaaaaaaaaaaaaaaaaaaaaaaaaaaaaa

SEQ ID NO: 18978 - RNA, 2085 nt, Artificial Sequence
  mRNA product Design b-4 (A100) comprising derived and/or modified sequence from LASV(G1180-SLE-2010;Clade IV)__AIT17169__SP-HsPLAT_NP(2-569) (opt4)
aggagagucccgcagucggcguccagcggcucugcuuguucgugugugugucguugcaggccuuauucaagcuuaccauggacgccaugaagagaggccugugcugcgugcugcugcugugcggcgccguguucgugagccccagcgccagcaaggagaucaagagcuuccuguggacccagagccugagaagagagcugagcggcuacugcagcaacaucaagcugcagguggugaaggacgcccaggcccugcugcacggccuggacuucagcgaggugagcaacgugcagagacugaugagaaaggagagaagagacgacaacgaccugaagagacugagagaccugaaccaggccgugaacaaccugguggagcugaagagcacccagcagaagagcauccugagagugggcacccugaccagcgacgaccugcugauccuggccgccgaccuggagaagcugaagagcaaggugaucagaaccgagagaccccugagcgccggcguguacaugggcaaccugagcagccagcagcuggaccagagaagagcccugcugagcaugaucggcaugagcagcggcaaccagagagcccaggccggcagagacggcguggugagagugugggacgugaagaacguggagcugcugaacaaccaguucggcaccaugcccagccugacccuggccugccugaccaagcagggccagguggaccugaacgacgccgugcaggcccugaccgaccugggccugaucuacaccgccaaguaccccaacaccagcgaccuggacagacugacccagagccaccccauccugaacaugaucgacaccaagaagagcagccugaacaucagcggcuacaacuucagccugggcgccgccgugaaggccggcgccugcaugcuggacggcggcaacaugcuggagaccaucaaggugagcccccagaccauggacggcauccugaagagcauccugaaggugaagaaggcccugggcauguucaucagcgacacccccggcgagagaaaccccuacgagaacauccuguacaagaucugccugagcggcgacggcuggcccuacaucgccagcagaaccagcaucaccggcagagccugggagaacaccgugguggaccuggagagcgacggcaagccccagaaggccggcagcaacaacagcaacaagagccugcagagcgugggcuucaccgccggccugaccuacagccagcugaugacccugaaggacgccaugcugcagcuggaccccaacgccaagaccuggauggacaucgagggcagacccgaggaccccguggagaucgcccuguaccagcccagcagcggcugcuacauccacuucuucagagagcccaccgaccugaagcaguucaagcaggacgccaaguacagccacggcaucgacgugaccgaccuguucgccgcccagcccggccugaccagcgccgugaucgacgcccugcccagaaacauggugaucaccugccagggcagcgacgacaucagaaagcugcuggagagccagggcagaaaggacaucaagcugaucgacaucgcccugagcaagaccgacagcagaaaguacgagaacgccgugugggaccaguacaaggaccugugccacaugcacaccggcguggugguggagaagaagaagagaggcggcaaggaggagaucaccccccacugcgcccugauggacugcaucauguucgacgccgccgugagcggcggccugaacaccagcgugcugagagccgugcugcccagagacaugguguucagaaccagcacccccagaguggugcugugaggacuaguaauaaggaaacuguaugaaugucugugggcaggaagugaagagauccuucuguaaagguuuuuggaauuaugucugcugaauaauaaacuuuuuugaaauaauaaaucugguagaaaaaugagaucuaaaaaaaaaaaaaaaaaaaaaaaaaaaaaaaaaaaaaaaaaaaaaaaaaaaaaaaaaaaaaaaaaaaaaaaaaaaaaaaaaaaaaaaaaaaaaaaaaaaa

SEQ ID NO: 18979 - RNA, 2085 nt, Artificial Sequence
  mRNA product Design b-4 (A100) comprising derived and/or modified sequence from LASV(G1442-SLE-2011;Clade IV)__AIT17181__SP-HsPLAT_NP(2-569) (opt4)
aggagagucccgcagucggcguccagcggcucugcuuguucgugugugugucguugcaggccuuauucaagcuuaccauggacgccaugaagagaggccugugcugcgugcugcugcugugcggcgccguguucgugagccccagcgccagcaaggaggugaagagcuuccuguggacccagagccugagaagagagcugagcggcuacugcagcaacaucaagcugcagguggugaaggacgcccaggcccugcugcacggccuggacuucagcgaggugagcaacgugcagagacugaugagaaagcagagaagagacgacaacgaccugaagagacugagagaccugaaccaggccgugaacaaccugguggagcugaagagcacccagcagaagagcgugcugagagugggcacccugaccagcgacgaccugcuggugcuggccgccgaccuggagaagcugaagagcaaggugaucagaaccgagagaccccugagcgccggcguguacaugggcaaccugagcagccagcagcuggaccagagaagagcccugcugaacaugaucggcaugagcggcggcauccagggcaccagaaccggcagagacggcguggugagagugugggacgugaagaacgccgaccugcugaacaaccaguucggcaccaugcccagccugacccuggccugccugaccaagcagggccagguggaccugaacgacguggugcaggcccugaccgaccugggccugaucuacaccgccaaguaccccaacgccagcgaccuggacagacugacccagagccaccccauccugaacaugaucgacaccaagaagagcagccugaacaucagcggcuacaacuucagccugggcgccgccgugaaggccggcgccugcaugcuggacggcggcaacaugcuggagaccaucaaggugagcccccagaccauggacggcauccugaagagcauccugaaggugaagaagacccugggcauguucaucagcgacacccccggcgagagaaaccccuacgagaacauccuguacaagaucugccugagcggcgacggcuggcccuacaucgccagcagaaccagcaucaccggcagagccugggagaacaccgugguggaccuggagagcgacggcaagccccagaaggccggcagcaacaacagcaacaagagccugcagagcgccggcuucgccgccggccugaccuacagccagcugaugacccugaaggacgccaugcugcagcuggaccccaacgccaagaccuggauggacaucgagggcagacccgaggaccccguggagaucgcccuguaccagcccagcagcggcugcuacauccacuucuucagagagcccaccgaccugaagcaguucaagcaggacgccaaguacagccacggcaucgacgugaccgaccuguucgccgcccagcccggccugaccagcgccgugaucgaggcccugcccagaaacauggugaucaccugccagggcagcgacgacaucaagaagcugcuggagagccagggcagaaaggacaucaagcugaucgacaucgcccugagcaagaccgacagcagaaaguacgagaacgccgugugggaccaguacaaggaccugugccacaugcacaccggcguggugguggagaagaagaagagaggcggcaaggaggagaucaccccccacugcgcccugauggacugcaucauguucgacgccgccgugagcggcggccugaacacccuggugcugagagccgugcugcccagagacaugguguucagaaccagcacccccagaguggugcugugaggacuaguaauaaggaaacuguaugaaugucugugggcaggaagugaagagauccuucuguaaagguuuuuggaauuaugucugcugaauaauaaacuuuuuugaaauaauaaaucugguagaaaaaugagaucuaaaaaaaaaaaaaaaaaaaaaaaaaaaaaaaaaaaaaaaaaaaaaaaaaaaaaaaaaaaaaaaaaaaaaaaaaaaaaaaaaaaaaaaaaaaaaaaaaaaa

SEQ ID NO: 18980 - RNA, 2085 nt, Artificial Sequence
  mRNA product Design b-4 (A100) comprising derived and/or modified sequence from LASV(G3010-SLE-2013;Clade IV)__AIT17345__SP-HsPLAT_NP(2-569) (opt4)
aggagagucccgcagucggcguccagcggcucugcuuguucgugugugugucguugcaggccuuauucaagcuuaccauggacgccaugaagagaggccugugcugcgugcugcugcugugcggcgccguguucgugagccccagcgccagcaaggagaucaagagcuuccuguggacccagagccugagaagagagcugagcggcuacugcagcaacaucaagcugcagguggugaaggacgcccaggcccugcugcacggccuggacuucagcgaggugagcaacgugcagagacugaugagaaaggagagaagagacgacaacgaccugaagagacugagagaccugaaccaggccgugaacaaccugguggagcugaagagcacccagcagaagagcauccugagagugggcacccugaccagcgacgaccugcugauccuggccgccgaccuggagaagcugaagagcaaggugaccagaaccgagagaccccugagcgccggcguguacaugggcaaccugagcagccagcagcuggaccagagaagagcccugcugagcaugaucggcaugagcagcggcgugcagggcgccagagccggcagagacggcguggugagagugugggacgugaagaacgccgagcugcugaacaaccaguucggcaccaugcccagccugacccuggccugccugaccaagcagggccagguggaccugaacgacguggugcaggcccugaccgaccugggccugaucuacaccgccaaguaccccaacaccagcgaccuggacagacugacccagagccaccccauccugaacaugaucgacaccaagaagagcagccugaacaucagcggcuacaacuucagccugggcgccgccgugaaggccggcgccugcaugcuggacggcggcaacaugcuggagaccaucaaggugagcccccagaccauggacggcauccugaagagcauccugaaggugaagaaggcccugggcauguucaucagcgagacccccggcgagagaaaccccuacgagaacauccuguacaagaucugccugagcggcgacggcuggcccuacaucgccagcagaaccagcaucaccggcagagccugggagaacaccgugguggaccuggagagcgacggcaagccccagaaggccggcagcaacaacagcaacaagagccugcagagcgccggcuucaccgccggccugaccuacagccagcugaugacccugaaggacgccaugcugcagcuggaccccaacgccaagaccuggauggacaucgagggcagacccgaggaccccguggagguggcccuguaccagcccagcagcggcugcuacauccacuucuucagagagcccaccgaccugaagcaguucaagcaggacgccaaguacagccacggcaucgacgugaccgaccuguucgccgcccagcccggccugaccagcgccgugaucgacgcccugcccagaaacauggugaucaccugccagggcagcgacgacaucaagaagcugcuggagagccagggcagaaaggacaucaagcugaucgacaucgcccugagcaagaccgacagcagaaaguacgagaacgccgugugggaccaguacaaggaccugugccacaugcacaccggcguggugguggagaagaagaagagaggcggcaaggaggagaucaccccccacugcgcccugauggacugcaucauguucgacgccgccgugagcggcggccugaacaccagcgugcugagagccgugcugcccagagacaugguguucagaaccagcacccccagaguggugcugugaggacuaguaauaaggaaacuguaugaaugucugugggcaggaagugaagagauccuucuguaaagguuuuuggaauuaugucugcugaauaauaaacuuuuuugaaauaauaaaucugguagaaaaaugagaucuaaaaaaaaaaaaaaaaaaaaaaaaaaaaaaaaaaaaaaaaaaaaaaaaaaaaaaaaaaaaaaaaaaaaaaaaaaaaaaaaaaaaaaaaaaaaaaaaaaaa

SEQ ID NO: 18981 - RNA, 2085 nt, Artificial Sequence
  mRNA product Design b-4 (A100) comprising derived and/or modified sequence from LASV(G502-SLE-2009;Clade IV)__AIT17127__SP-HsPLAT_NP(2-569) (opt4)
aggagagucccgcagucggcguccagcggcucugcuuguucgugugugugucguugcaggccuuauucaagcuuaccauggacgccaugaagagaggccugugcugcgugcugcugcugugcggcgccguguucgugagccccagcgccagcaaggagaucaagagcuuccuguggacccagagccugagaagagagcugagcggcuacugcagcaacaucaagcugcagguggugaaggacgcccaggcccugcugcacggccuggacuucagcgaggugagcaacgugcagagacugaugagaaaggagagaagagacgacaacgaccugaagagacugagagaccugaaccaggccgugaacaaccugguggagcugaagagcacccagcagaagagcauccugagagugggcacccugaccagcgacgaccugcugauccuggccgccgaccuggagaagcugaagagcaaggugaucagaaccgagagaccccugagcgccggcguguacaugggcaaccugagcagccagcagcuggaccagagaagagcccugcugagcaugaucggcaugagcggcggcaaccagggcgugagagccggcaaggacggcguggugagagugugggacgugaagaacgccgagcugcugaacaaccaguucggcaccaugcccagccugacccuggccugccugaccaagcagggccagguggaccugaacgacgccgugcaggcccugaccgaccugggccugaucuacaccgccaaguaccccaacaccagcgaccuggacagacugacccagagccaccccauccugaacaugaucgacaccaagaagagcagccugaacaucagcggcuacaacuucagccugggcgccgccgugaaggccggcgccugcaugcuggacggcggcaacaugcuggagaccaucaaggugagcccccagaccauggacggcauccugaagagcauccugaaggugaagaaggcccugggcauguucaucagcgacacccccggcgagagaaaccccuacgagaacauccuguacaagaucugccugagcggcgacggcuggcccuacaucgccagcagaaccagcaucaccggcagagccugggagaacaccgugguggaccuggagagcgacggcaagccccagaaggccggcagcaacaacagcaacaagagccugcagagcgccggcuucaccgccggccugaccuacagccagcugaugacccugaaggacgccaugcugcagcuggaccccaacaccaagaccuggauggacaucgagggcagacccgaggaccccguggagaucgcccuguaccagcccagcagcggcugcuacauccacuucuucagagagcccaccgaccugaagcaguucaagcaggacgccaaguacagccacggcaucgacgugaccgaccuguucgccgcccagcccggccugaccagcgccgugaucgacgcccugcccagaaacauggugaucaccugccagggcagcgacgacaucagaaagcugcuggagagccagggcagaaaggacaucaagcugaucgacaucgcccugaacaagaccgacagcagaaaguacgagaacgccgugugggaccaguacaaggaccugugccacaugcacaccggcguggugguggagaagaagaagagaggcggcaaggaggagaucaccccccacugcgcccugauggacugcaucauguucgacgccgccgugagcggcggccugaacaccagcgugcugagagccgugcugcccagagacaugguguucagaaccagcacccccagaguggugcugugaggacuaguaauaaggaaacuguaugaaugucugugggcaggaagugaagagauccuucuguaaagguuuuuggaauuaugucugcugaauaauaaacuuuuuugaaauaauaaaucugguagaaaaaugagaucuaaaaaaaaaaaaaaaaaaaaaaaaaaaaaaaaaaaaaaaaaaaaaaaaaaaaaaaaaaaaaaaaaaaaaaaaaaaaaaaaaaaaaaaaaaaaaaaaaaaa

SEQ ID NO: 18982 - RNA, 2085 nt, Artificial Sequence
  mRNA product Design b-4 (A100) comprising derived and/or modified sequence from LASV(G733-SLE-2010;Clade IV)__AIT17155__SP-HsPLAT_NP(2-569) (opt4)
aggagagucccgcagucggcguccagcggcucugcuuguucgugugugugucguugcaggccuuauucaagcuuaccauggacgccaugaagagaggccugugcugcgugcugcugcugugcggcgccguguucgugagccccagcgccagcaaggagaucaagagcuuccuguggacccagagccugagaagagagcugagcggcuacugcagcaacaucaagcugcagguggugaaggacgcccaggcccugcugcacggccuggacuucagcgaggugagcaacgugcagagacugaugagaaaggagagaagagacgacaacgaccugaagagacugagagaccugaaccaggccgugaacaaccugguggagcugaagagcacccagcagaagagcgugcugagagugggcacccugaccagcgacgagcugcuggugcuggccgccgaccuggagaagcugaagagcaaggugaucagaaccgagagaccccugagcgccggcguguacaugggcaaccugagcagccagcagcuggaccagagaagagcccugcugagcaugaucggcaugagcggcggcaaccagggcgccagaaccggcagagacggcguggugagagugugggacgugaagaacgccgagcugcugaacaaccaguucggcaccaugcccagccugacccuggccugccugaccaagcagggccagguggaccugaacgacgccgugcaggcccugaccgaccugggccugaucuacaccgccaaguaccccaacaccagcgaccuggacagacugacccagagccaccccauccugaacaugaucgacaccaagaagagcagccugaacaucagcggcuacaacuucagccugggcgccgccgugaaggccggcgccugcaugcuggacggcggcaacaugcuggagaccaucaaggugagcccccagaccauggacggcauccugaagagcauccugaaggugaagaaggcccugggcauguucaucagcgacacccccggcgagagaaaccccuacgagaacauccuguacaagaucugccugagcggcgacggcuggcccuacaucgccagcagaaccagcaucaccggcagagccugggagaacaccgugguggaccuggagagcgacggcaagccccagaaggccggcagcaacaacagcaacaagagccugcagagcgccggcuucaccgccggccugaccuacagccagcugaugacccugaaggacgccaugcugcagcuggaccccaacgccaagaccuggauggacaucgagggcagacccgaggaccccguggagaucgcccuguaccagcccagcagcggcugcuacauccacuucuucagagagcccaccgaccugaagcaguucaagcaggacgccaaguacagccacggcaucgacgugaccgaccuguucgccgcccagcccggccugaccagcgccgugaucgacgcccugcccagaaacauggugaucaccugccagggcagcgacgacaucagaaagcugcuggagagccagggcagaaaggacaucaagcugaucgacaucgcccugagcaagaucgacagcagaaaguacgagaacgccgugugggaccaguacaaggaccugugccacaugcacaccggcguggugguggagaagaagaagagaggcggcaaggaggagaucaccccccacugcgcccugauggacugcaucauguucgacgccgccgugagcggcggccugaacagccuggugcugagagccgugcugcccagagacaugguguucagaaccagcacccccagaguggugcugugaggacuaguaauaaggaaacuguaugaaugucugugggcaggaagugaagagauccuucuguaaagguuuuuggaauuaugucugcugaauaauaaacuuuuuugaaauaauaaaucugguagaaaaaugagaucuaaaaaaaaaaaaaaaaaaaaaaaaaaaaaaaaaaaaaaaaaaaaaaaaaaaaaaaaaaaaaaaaaaaaaaaaaaaaaaaaaaaaaaaaaaaaaaaaaaaa

SEQ ID NO: 18983 - RNA, 2085 nt, Artificial Sequence
  mRNA product Design b-4 (A100) comprising derived and/or modified sequence from MOPV/LASV reassortant(IGS-1;Clade IV)__AFY05578__SP-HsPLAT_NP(2-569) (opt4)
aggagagucccgcagucggcguccagcggcucugcuuguucgugugugugucguugcaggccuuauucaagcuuaccauggacgccaugaagagaggccugugcugcgugcugcugcugugcggcgccguguucgugagccccagcgccagcaaggagaucaagagcuuccuguggacccagagccugagaagagagcugagcggcuacugcagcaacaucaagcugcagguggugaaggacgcccaggcccugcugcacggccuggacuucagcgaggugagcaacgugcagagacugaugagaaaggagagaagagacgacaacgaccugaagagacugagagaccugaaccaggccgugaacaaccugguggagcugaagagcacccagcagaagagcauccugagagugggcacccugaccagcgacgaccugcugauccuggccgccgaccuggagaagcugagaagcaaggugaucagaaccgagagaccccugagcgccggcguguacaugggcaaccugagcagccagcagcuggaccagagaagagcccugcugaacaugaucggcaugagcggcggcaaccagggcgccagagccggcagagacggcguggugagagugugggacgugaagaacgccgagcugcugagcaaccaguucggcaccaugcccagccugacccuggccugccugaccaagcagggccagguggaccugaacgacgccgugcaggcccugaccgaccugggccugaucuacaccgccaaguaccccaacaccagcgaccuggacagacugacccagagccaccccauccugaacaugaucgacaccaagaagagcagccugaacaucagcggcuacaacuucagccugggcgccgccgugaaggccggcgccugcaugcuggacggcggcaacaugcuggagaccaucaaggugagcccccagaccauggacggcauccugaagagcauccugaaggugaagaaggcccugggcauguucaucagcgacacccccggcgagagaaaccccuacgagaacauccuguacaagaucugccugagcggcgacggcuggcccuacaucgccagcagaaccagcaucaccggcagagccugggagaacaccgugguggaccuggagagcgacggcaagccccagaaggccgacagcaacaacagcagcaagagccugcagagcgccggcuucaccgccggccugaccuacagccagcugaugacccugaaggacgccaugcugcagcuggaccccaacgccaagaccuggauggacaucgagggcagacccgaggaccccguggagaucgcccuguaccagcccagcagcggcugcuacauccacuucuucagagagcccaccgaccugaagcaguucaagcaggacgccaaguacagccacggcaucgacgugaccgaccuguucgccacccagcccggccugaccagcgccgugaucgacgcccugcccagaaacauggugaucaccugccagggcagcgacgacaucagaaagcugcuggagagccagggcagaaaggacaucaagcugaucgacaucgaccugagcaagaccgacagcagaaaguacgagaacgccgugugggaccaguacaaggaccugugccacaugcacaccggcguggugguggagaagaagaagagaggcggcaaggaggagaucaccccccacugcgcccugauggacugcaucauguucgacgccgccgugagcggcggccugaacaccagcgugcugagagccgugcugcccagagacaugguguucagaaccagcacccccagaguggugcugugaggacuaguaauaaggaaacuguaugaaugucugugggcaggaagugaagagauccuucuguaaagguuuuuggaauuaugucugcugaauaauaaacuuuuuugaaauaauaaaucugguagaaaaaugagaucuaaaaaaaaaaaaaaaaaaaaaaaaaaaaaaaaaaaaaaaaaaaaaaaaaaaaaaaaaaaaaaaaaaaaaaaaaaaaaaaaaaaaaaaaaaaaaaaaaaaa

SEQ ID NO: 18984 - RNA, 2085 nt, Artificial Sequence
  mRNA product Design b-4 (A100) comprising derived and/or modified sequence from LASV(LM765-SLE-2012;Clade IV)__AIT17815__SP-HsPLAT_NP(2-569) (opt4)
aggagagucccgcagucggcguccagcggcucugcuuguucgugugugugucguugcaggccuuauucaagcuuaccauggacgccaugaagagaggccugugcugcgugcugcugcugugcggcgccguguucgugagccccagcgccagcaaggagaucaagagcuuccuguggacccagagccugagaagagagcugagcggcuacugcagcaacaucaagcugcagguggugaaggacgcccaggcccugcugcacggccuggacuucagcgaggugagcaacgugcagagacugaugagaaaggagagaagagacgacaacgaccugaagagacugagagaccugaaccaggccgugaacaaccugguggagcugaagagcacccagcagaagagcauccugagagugggcacccugaccagcgacgaccugcugauccuggccgccgaccuggagaagcugaagagcaaggugaccagaaccgagagaccccugagcgccggcguguacaugggcaaccugagcagccagcagcuggaccagagaagagcccugcuggacaugaucggcaugagcggcagcaaccagggcgccagagccggcagagacggcguggugagagugugggacgugaagaacgccgagcugcugaacaaccaguucggcaccaugcccagccugacccuggccugccugaccaagcagggccagguggaccugaacgacgccgugcaggcccugaccgaccugggccugaucuacaccgccaaguaccccaacaccagcgaccuggacagacugacccagagccaccccauccugaacaugaucgacaccaagaagagcagccugaacaucagcggcuacaacuucagccugggcgccgccgugaaggccggcgccugcaugcuggacggcggcaacaugcuggagaccaucaaggugagcccccagaccauggacggcauccugaagagcauccugaaggugaagaaggcccugggcauguucaucagcgacgcccccggcgagagaaaccccuacgagaacauccuguacaagaucugccugagcggcgacggcuggcccuacaucgccagcagaaccagcaucaccggcagagccugggagaacaccgugguggaccuggagagcgacggcaagccccagaaggccggcagcaacggcagcaacaagagccugcagagcgccggcuucaccgccggccugaccuacagccagcugaugacccugaaggacgccaugcugcagcuggaccccaacgccaagaccuggauggacaucgagggcagacccgaggaccccguggagaucgcccuguaccagcccagcagcggcugcuacauccacuucuucagagagcccaccgaccugaagcaguucaagcaggacgccaaguacagccacggcaucgacgugaccgaccuguucgccgcccagcccggccugaccagcgccgugaucgacgcccugcccagaaacauggugaucaccugccagggcagcgacgacaucagaaagcuguucgagagccagggcagaaaggacaucaagcugaucgacaucgcccugagcaagaccgacagcagaaaguacgagaacgccgugugggaccaguacaaggaccugugccacaugcacaccggcaucgugguggagaagaagaagagaggcggcaaggaggagaucaccccccacugcgcccugauggacugcaucauguucgacgccgccgugagcggcggccugaacaccagcgugcugagagccgugcugcccagagacaugguguucagaaccagcacccccagaguggugcugugaggacuaguaauaaggaaacuguaugaaugucugugggcaggaagugaagagauccuucuguaaagguuuuuggaauuaugucugcugaauaauaaacuuuuuugaaauaauaaaucugguagaaaaaugagaucuaaaaaaaaaaaaaaaaaaaaaaaaaaaaaaaaaaaaaaaaaaaaaaaaaaaaaaaaaaaaaaaaaaaaaaaaaaaaaaaaaaaaaaaaaaaaaaaaaaaa

SEQ ID NO: 18985 - RNA, 2085 nt, Artificial Sequence
  mRNA product Design b-4 (A100) comprising derived and/or modified sequence from LASV(LM776-SLE-2012;Clade IV)__AIT17825__SP-HsPLAT_NP(2-569) (opt4)
aggagagucccgcagucggcguccagcggcucugcuuguucgugugugugucguugcaggccuuauucaagcuuaccauggacgccaugaagagaggccugugcugcgugcugcugcugugcggcgccguguucgugagccccagcgccagcaaggagaucaagagcuuccuguggacccagagccugagaagagagcugagcagcuacugcagcaacaucaagcugcagguggugaaggacgcccaggcccugcugcacggccuggacuucagcgaggugagcaacgugcagagacugaugagaaaggagagaagagacgacaacgaccugaagagacugagagaccugaaccaggccgugaacaaccugguggagcugaagagcacccagcagaagagcauccugagagugggcacccugaccagcgacgaccugcugauccuggccgccgaccuggagaagcugaagagcaaggugaccagaaccgagagaccccugagcgccggcguguacaugggcaaccugagcagccagcagcuggaccagagaagagcccugcugagcaugaucggcaugagcggcagcaaccagggcgccagagccggcagagacggcguggugagagugugggacgugaagaacgccgagcugcugaacaaccaguucggcaccaugcccagccugacccuggccugccugaccaagcagggccagguggaccugaacgacgccgugcaggcccugaccgaccugggccugaucuacaccgccaaguaccccaacaccagcgaccuggacagacugacccagagccaccccauccugaacaugaucgacaccaagaagagcagccugaacaucagcggcuacaacuucagccugggcgccgccgugaaggccggcgccugcaugcuggacggcggcaacaugcuggagaccaucaaggugagcccccagaccauggacggcauccugaagagcauccugaaggugaagaaggcccugggcauguucaucagcgacacccccggcgagagaaaccccuacgagaacauccuguacaagaucugccugagcggcgacggcuggcccuacaucgccagcagaaccagcaucaccggcagagccugggagaacaccgugguggaccuggagagcgacggcaagccccagaaggccggcagcaacaacagcaacaagagccugcagagcgccggcuucaccgccggccugaccuacagccagcugaugacccugaaggacgccaugcugcagcuggaccccaacgccaagaccuggauggacaucgagggcagacccgaggaccccguggagguggcccuguaccagcccagcagcggcugcuacauccacuucuucagagagcccaccgaccugaagcaguucaagcaggacgccaaguacagccacggcaucgacgugaccgaccuguucgccgcccagcccggccugaccagcgccgugaucgacgcccugcccagaaacauggugaucaccugccagggcagcgacgacaucagaaagcugcuggagagccagggcagaaaggacaucaagcugaucgacaucgcccugagcaagaccgacagcagaaaguacgagaacgccgugugggaccaguacaaggaccugugccacaugcacaccggcguggugguggagaagaagaagagaggcggcaaggaggagaucaccccccacugcgcccugauggacugcaucauguucgacgccgccgugagcggcggccugaacaccagcgugcugagagccgugcugcccagagacaugguguucagaaccagcacccccagaguggugcugugaggacuaguaauaaggaaacuguaugaaugucugugggcaggaagugaagagauccuucuguaaagguuuuuggaauuaugucugcugaauaauaaacuuuuuugaaauaauaaaucugguagaaaaaugagaucuaaaaaaaaaaaaaaaaaaaaaaaaaaaaaaaaaaaaaaaaaaaaaaaaaaaaaaaaaaaaaaaaaaaaaaaaaaaaaaaaaaaaaaaaaaaaaaaaaaaa

SEQ ID NO: 18986 - RNA, 2085 nt, Artificial Sequence
  mRNA product Design b-4 (A100) comprising derived and/or modified sequence from LASV(Mad39;Clade IV)__ANH09723__SP-HsPLAT_NP(2-569) (opt4)
aggagagucccgcagucggcguccagcggcucugcuuguucgugugugugucguugcaggccuuauucaagcuuaccauggacgccaugaagagaggccugugcugcgugcugcugcugugcggcgccguguucgugagccccagcgccagcaaggagaucaagagcuuccuguggacccagagccugagaagagagcugagcggcuacugcagcaacaucaagcugcagguggugaaggacgcccaggcccugcugcacggccuggacuucagcgaggugagcaacgugcagagacugaugagaaagcagagaagagacgacaacgaccugaagagacugagagaccugaaccaggccgugaacaaccugguggagcugaagagcacccagcagaagagcgugcugagagugggcacccugaccagcgacgaccugcugacccuggccgccgaccuggagaagcugaagagcaaggugaccagaaccgagagaccccugaccgccggcguguacaugggcaaccugagcagccagcagcuggaccagagaagagcccugcugaacaugaucggcaugagcggcggcaaccagggcgccagaaccggcagagacggcguggugagagugugggacgugaagaacgccgagcugcugaacaaccaguucggcaccaugcccagccugacccuggccugccugaccaagcagggccagguggaccugaacgacguggugcaggcccugaccgaccugggccugaucuacaccgccaaguaccccaacaccagcgaccuggacagacugacccagagccaccccauccugaacaugaucgacaccaacaagagcagccugaacaucagcggcuacaacuucagccugggcgccgccgugaaggccggcgccugcaugcuggacggcggcaacaugcuggagaccaucaaggugagcccccagaccauggacggcauccugaagagcauccugaaggugaagaagagccugggcauguucaucagcgacacccccggcgagagaaaccccuacgagaacauccuguacaagaucugccugagcggcgacggcuggcccuacaucgccagcagaaccagcaucaccggcagagccugggagaacaccgugguggaccuggagagcggcggcaagccccagaaggccggcagcaacaacagcaacaagagccugcagagcgccggcuucgccgccggccugaccuacagccagcugaugacccugaaggacgccaugcugcagcuggaccccaacgccaagaccuggauggacaucgagggcagacccgaggaccccguggagaucgcccuguaccagcccaucagcggcugcuacauccacuucuucagagagcccaccgaccugaagcaguucaagcaggacgccaaguacagccacggcaucgacgugaccgaccuguucgccgcccagcccggccugaccagcgccgugaucgaggcccugcccagaaacauggugaucaccugccagggcagcgacgacaucagaaagcuguucgagagccagggcagaaaggacaucaagcugaucgacaucgcccugagcaagaccgacagcagaaaguacgagaacgccgugugggaccaguacaaggaccugugccacaugcacaccggcguggugguggagaagaagaagaagggcggcaaggaggagaucaccccccacugcgcccugauggacugcaucauguucgacgccgccgugagcggcggccugaacacccuggugcugagagccgugcugcccagagacaugguguucagaaccagcacccccaagguggugcugugaggacuaguaauaaggaaacuguaugaaugucugugggcaggaagugaagagauccuucuguaaagguuuuuggaauuaugucugcugaauaauaaacuuuuuugaaauaauaaaucugguagaaaaaugagaucuaaaaaaaaaaaaaaaaaaaaaaaaaaaaaaaaaaaaaaaaaaaaaaaaaaaaaaaaaaaaaaaaaaaaaaaaaaaaaaaaaaaaaaaaaaaaaaaaaaaa

SEQ ID NO: 18987 - RNA, 2085 nt, Artificial Sequence
  mRNA product Design b-4 (A100) comprising derived and/or modified sequence from LASV(Z0947-SLE-2011;Clade IV)__AIT17841__SP-HsPLAT_NP(2-569) (opt4)
aggagagucccgcagucggcguccagcggcucugcuuguucgugugugugucguugcaggccuuauucaagcuuaccauggacgccaugaagagaggccugugcugcgugcugcugcugugcggcgccguguucgugagccccagcgccagcaaggagaucaagagcuuccuguggacccagagccugagaagagagcugagcggcuacugcagcaacaucaagcugcagguggugaaggacgcccaggcccugcugcacggccuggacuucagcgaggugagcaacgugcagagacugaugagaaaggagagaagagacgacaacgaccugaagagacugagagaccugaaccaggccgugaacaaccugguggagcugaagagcacccagcagaagagcauccugagagugggcacccugaccagcgacgaccugcugauccuggccgccgaccuggagaagcugaagagcaaggugaccagaaccgagagaccccugagcgccggcguguacaugggcaaccugagcagccagcagcuggaccagagaagagcccugcugaacaugaucggcaugagcggcagcaaccagggcgccagaaccggcagagacggcguggugagagugugggacgugaagaacgccgagcugcugaacaaccaguucggcaccaugcccagccugacccuggccugccugaccaagcagggccagguggaccugaacgacgccgugcaggcccugaccgaccugggccugaucuacaccgccaaguaccccaacaccagcgaccuggacagacugacccagagccaccccauccugaacaugaucgacaccaagaagagcagccugaacaucagcggcuacaacuucagccugggcgccgccgugaaggccggcgccugcaugcuggacggcggcaacaugcuggagaccaucaaggugagcccccagaccauggacggcauccugaagagcauccugaaggugaagaaggcccugggcauguucaucagcgacgcccccggcgagagaaaccccuacgagaacauccuguacaagaucugccugagcggcgacggcuggcccuacaucgccagcagaaccagcaucaccggcagagccugggagaacaccgugguggaccuggagagcgacggcaagccccagaaggccggcagcaacggcagcaacaagagccugcagagcgccggcuucaccgccggccugaccuacagccagcugaugacccugaaggacgccaugcugcagcuggaccccaacgccaagaccuggauggacaucgagggcagacccgaggaccccguggagaucgcccuguaccagcccagcagcggcugcuacauccacuucuucagagagcccaccgaccugaagcaguucaagcaggacgccaaguacagccacggcaucgacgugaccgaccuguucgccgcccagcccggccugaccagcgccgugaucgacgcccugcccagaaacauggugaucaccugccagggcagcgacgacaucagaaagcuguucgagagccagggcagaaaggacaucaagcugaucgacaucgcccugagcaagaccgacagcagaaaguacgagaacgccgugugggaccaguacaaggaccugugccacaugcacaccggcaucgugguggagaagaagaagagaggcggcaaggaggagaucaccccccacugcgcccugauggacugcaucauguucgacgccgccgugagcggcggccugaacaccagcgugcugagagccgugcugcccagagacaugguguucagaaccagcacccccagaguggugcugugaggacuaguaauaaggaaacuguaugaaugucugugggcaggaagugaagagauccuucuguaaagguuuuuggaauuaugucugcugaauaauaaacuuuuuugaaauaauaaaucugguagaaaaaugagaucuaaaaaaaaaaaaaaaaaaaaaaaaaaaaaaaaaaaaaaaaaaaaaaaaaaaaaaaaaaaaaaaaaaaaaaaaaaaaaaaaaaaaaaaaaaaaaaaaaaaa

SEQ ID NO: 18988 - RNA, 2085 nt, Artificial Sequence
  mRNA product Design b-4 (A100) comprising derived and/or modified sequence from LASV(Josiah;Clade IV)__NP_694869__SP-HsPLAT_NP(2-569) (opt5)
aggagagucccgcagucggcguccagcggcucugcuuguucgugugugugucguugcaggccuuauucaagcuuaccauggacgccaugaagagaggccugugcugugugcuccugcuuugcggggcugucuucguuagccccagcgccuccaaggagaucaaaucuuuccuguggacccagagccucagacgggaacuguccggcuacugcucuaacauuaagcugcaaguggucaaagacgcucaggcccugcuccacgggcuggauuuuagcgagguuuccaaugugcagcgccuuaugagaaaggaacggcgcgacgauaacgaccugaaaagacuccgggaucugaaucaggcggugaacaaucuggucgagcucaagucuacacaacaaaagagcauccugcgcgugggaacgcuuaccuccgacgaucugcucauucuggcugccgaccuugaaaaacuuaagagcaaaguuaucagaacagagcggccccucucugccggcguguauauggggaaccuguccagccagcagcuggaucagcgcagagcucuccugaauaugauuggaaugucuggcgggaaccagggagcccgggcuggccgcgacggcgucgugagaguuugggaugugaagaaugccgagcuucugaacaaucaguucgggaccaugccuucccucacacuggcgugucuuaccaaacagggacaagucgaccugaacgaugccgugcaggcucucacagaccugggccugaucuacaccgccaaguauccgaauacgagcgaccucgaucggcugacccagucucaucccauccuuaacaugauugacacaaagaaauccagccugaauaucuccggguacaacuuuucucucggagcugccgugaaggcgggcgccugcaugcuggaugggggaaacaugcuugaaaccauuaaagucagcccucaaacaauggacggcauccugaaguccauucucaaaguuaagaaagcucugggcauguucaucagcgauacccccggggagcgcaauccuuaugaaaacauucuguacaagaucugucucucuggagacggcuggcccuauaucgccuccagaacgagcauuacagggcgggcuugggagaauaccgugguggaucuggagucugacggaaagccucagaaagccgauagcaacaauuccucuaagagccuucaguccgccggcuuuacagcugggcugaccuacagccagcucaugacccugaaagacgcgaugcugcaacuugauccgaacgccaagacauggauggacaucgaaggaagacccgaggacccugucgaaauugcucucuaccagcccucuuccggcugcuauauccacuucuuucgcgagccuacggaucugaaacaguucaagcaggacgccaaguacagccauggcauugaugugaccgaccuguuugccacacaacccgggcucaccucugcuguuaucgaugcccugccgcggaauauggugaucacaugucagggauccgacgauauuagaaaacuucuggaaagccagggccgcaaggacaucaaacucauugauaucgcgcuguccaagaccgacucucggaaauaugagaacgcugucugggaucaguacaaggaccugugccacaugcauacgggggugguuguggagaagaaaaagagaggaggcaaagaagagauuacaccucacugugcccuuauggauugcaucauguucgacgccgcugucagcgggggccucaauaccuccgugcugcgcgccguccugccccgggacaugguguuuagaaccucuacaccucgcguugugcucugaggacuaguaauaaggaaacuguaugaaugucugugggcaggaagugaagagauccuucuguaaagguuuuuggaauuaugucugcugaauaauaaacuuuuuugaaauaauaaaucugguagaaaaaugagaucuaaaaaaaaaaaaaaaaaaaaaaaaaaaaaaaaaaaaaaaaaaaaaaaaaaaaaaaaaaaaaaaaaaaaaaaaaaaaaaaaaaaaaaaaaaaaaaaaaaaa

SEQ ID NO: 18989 - RNA, 2085 nt, Artificial Sequence
  mRNA product Design b-4 (A100) comprising derived and/or modified sequence from LASV(LP;Clade I)__AAF86702__SP-HsPLAT_NP(2-569) (opt5)
aggagagucccgcagucggcguccagcggcucugcuuguucgugugugugucguugcaggccuuauucaagcuuaccauggacgccaugaagagaggccugugcugugugcuccugcuuugcggggcugucuucguuagccccagcaacuccaaggagaucaaaucuuuccuguggacccagagccucagacgggaacuguccggcuacugcucuaauauuaagcuccaaguggucaaagacgcccaggcucugcuccacgggcuggauuuuagcgagguuuccaacgugcagcgccuuaugagaaagcagaaacgggacgaugccgaccugaagcgccucagagaucugaaucaagcggugaacaaucuggucgaacucaagucuacacagcagaaaaacgugcugcggguuggaacgcuuagcuccgacgaucugaucacccucgcugccgaccuggagaaacuuaaaagcaaggugauucgcacagaaagaccccugucuuccggcgucuauauggggaaucucagcucucagcaacuggaucagcggcgcgcccugcucuccaugaucggaaugagcggcgggccucagggaaacagaaccggcggcgacggggugguucgggugugggaugucaaaaaugcugagcugcuuaacaaucaguucggaacaaugccgucucugacccucgccugucugacaaagcaaggccagguggaccuuaacgaugcugugcaggcccugaccgaccucgggcugauuuacacggcgaaguaucccaauuccagcgaccuggauaugcucacccaaucccauccuauccugggaauggucgacacaaagaagucuagccuuaacaucuccggcuacaauuuuagccugggggccgcuguuaaagccggagcuugcaugcucgauggcggcaacaugcuggagaccauuaaggugucuccccagacaauggacgggauccuuaaauccauucugaaggugaaacgcagccucggaauguucaucucugauaccccuggcgaaagaaaccccuaugagaauauucuguacaagaucugucugagcggggaaggauggccuuauauugccucccggacgucuaucacaggccgcgcgugggagaacacccucgucgaccuggagagcgauaauaagccgcccaaacuuaacuccgccgggagcaauaagucucugcaggcugccggacucaacgcuggccugacauacucccagcugaugacccuuaaagacugcaugcuccaacuggauccuagcucuaagaccuggaucgacauugaaggcagacccgaggauccuguggaaaucgcccuguuucagcccuccagcggguguuacauucacuucuuucgggagccgacagaccucaaacaguucaagcaggacgccaaguauucccauggaaucgauguuacggaccuguuuucuacccaaccuggccuuacaagcgcugugauugaagcgcugcccagaaauaugguccuuaccugccagggguccgaugacaucaaaaagcugcuggagucucagggacgccgggauaucaaacuuauugacaucagccucuccaaggccgauagcagaaaauucgagaacgcugugugggaccaguacaaggaucugugucacaugcauacaggcguuguggucgaaaagaaaaagcgcgggggcaaagaggaaauuaccccucacugcgcccugcucgacuguaucauguuugaugccgcuacgacaggaucucugaauauuaccacccuucgggccgugcugcccagagacauggucuuccgcacauccacccccaaggugguucucugaggacuaguaauaaggaaacuguaugaaugucugugggcaggaagugaagagauccuucuguaaagguuuuuggaauuaugucugcugaauaauaaacuuuuuugaaauaauaaaucugguagaaaaaugagaucuaaaaaaaaaaaaaaaaaaaaaaaaaaaaaaaaaaaaaaaaaaaaaaaaaaaaaaaaaaaaaaaaaaaaaaaaaaaaaaaaaaaaaaaaaaaaaaaaaaaa

SEQ ID NO: 18990 - RNA, 2085 nt, Artificial Sequence
  mRNA product Design b-4 (A100) comprising derived and/or modified sequence from LASV(803213;Clade II)__AAF86704__SP-HsPLAT_NP(2-569) (opt5)
aggagagucccgcagucggcguccagcggcucugcuuguucgugugugugucguugcaggccuuauucaagcuuaccauggacgccaugaagagaggccugugcugugugcuccugcuuugcggggcugucuucguuagccccagcgccuccaaggaggugaaaucuuuccuguggacccagagccucagacgggaacuguccggcuacugcucuaacaucaaacuucaagucguuaaggacgcucaggcccugcuccacgggcuggauuuuagcgaggugaauaacgugcagcgccuuaugagaaagcagaaacgggacgauggagaccugaagcgccucagagaucugaaucaagcggucaacaaucugguggaacucaaguccacacagcagaaaucuauucugcggguuggcacgcuuaccagcgacgaucugcucacacuggcugccgaccuugagaagcugaaauccaaggugauccgcaccgaaagaccccucagcucuggggucuauaugggaaaccuguccacacagcaacuggagcagcggcgcgcccuccugaauaugauuggcauggugggaggagcucagggcacccagccuggcagagaugggguugugcgggucugggacgugaaaaacccggaucuucugaauaaccaauucggaacaaugcccagccucacccuggccugucuuacgaagcagggccagguggaccugaaugaugcuguccucgcccugaccgaccuggggcucaucuacacagcgaaguauccuaacucuuccgaccuggaucgccuuagccaaucucaucccauucugaauaugguugacaccaaaaaguccagccucaacaucuccggauacaauuuuucucugggcgccgcugugaaagccggggcuugcaugcuugauggaggcaacaugcuggagacaaucaaggugaccccucagacgauggacggcauucucaaaagcauccugaaggucaaaagaucccuggggauguucgugagcgauacacccggagaacggaacccuuaugagaauauucucuacaagaucugucugucuggcgacggguggccguauauugccucccgcaccagcaucguugggagagcgugggaaaacacaaccguggaucuugagucugacggcaagccccagaaagucgggaccgccggaagcaauaagucccugcagucugcuggcuuuccuacaggccucacguacagccaacugaugacccugaaagauuccaugaugcagcuugaccccagcgccaagacauggauugauaucgaggggcggccugaagaccccguggagaucgcucucuaccagccgaugucuggaugcuauauucacuucuuuagagaaccuaccgaccugaaacaguucaagcaagaugccaaguacucccauggcaucgacguugccgaucuguuucccgcucagccugggcucacaagcgcggugauugaggcccugccccgcaacaugguccuuaccugucagggaucugacgauaucaaaaagcugcucgacucccagggccggagagauauuaaacugaucgacaucagccuguccaagguggauucucgcaaauucgaaaaugcugucugggaccaaugcaaggaucuuugucacaugcauacgggggugguuguggagaagaaaaagcggggcggaaaagaggaaauuacaccccacugcgcccucauggacuguaucauguuugaugccgcugucagcggcgggcugaacauuccugugcugagagccguucucccgcgcgacaugguguuccggaccuccucucccaaggucgugcugugaggacuaguaauaaggaaacuguaugaaugucugugggcaggaagugaagagauccuucuguaaagguuuuuggaauuaugucugcugaauaauaaacuuuuuugaaauaauaaaucugguagaaaaaugagaucuaaaaaaaaaaaaaaaaaaaaaaaaaaaaaaaaaaaaaaaaaaaaaaaaaaaaaaaaaaaaaaaaaaaaaaaaaaaaaaaaaaaaaaaaaaaaaaaaaaaa

SEQ ID NO: 18991 - RNA, 2088 nt, Artificial Sequence
  mRNA product Design b-4 (A100) comprising derived and/or modified sequence from LASV(GA391;Clade III)__CAA36646__SP-HsPLAT_NP(2-570) (opt5)
aggagagucccgcagucggcguccagcggcucugcuuguucgugugugugucguugcaggccuuauucaagcuuaccauggacgccaugaagagaggccugugcugugugcuccugcuuugcggggcugucuucguuagccccagcgccuccaaggaggugagaucuuuccuguggacccagagccuccggcgcgaacuguccggcuacugcucuaacaucaaacuucaagucguuaaggacgcucaggcccugcuccacgggcuggauuuuagcgagguguccaaugugcagagacuuaugcggaaacagaagcgcgacgauggagaccugaaaagacuccgggaucugaaccaagcggucaauaaccugguggaacucaagucuacacagcagaaaagcguucugcgcgugggcacgcuuuccagcgacgaucugcucauucuggcugccgaccuugagaaacugaagucuaaagucaccagaacagaacggccccucuccagcgggguguauaugggaaaucugucuucccagcaacuggaucagcgcagagcccuccugaacaugaucggcaugaccgggguuagcggaggcggcaagggggcuucugacggaauugugcgggucugggaugugaaaaaugccgagcuucugaacaaucaguucggcacaaugccuucccucacccuggcuugucuuacaaagcaggggcaaguggaccugaacgaugccguccaggcgcucaccgaccugggacugaucuacacggccaaguauccgaauagcuccgaccucgaucgccugucucagagccaucccauucuuaacaugaucgacaccaaaaaguccagccugaauaucucuggcuacaacuuuucccucggggcugccguuaaagcuggagccugcaugcuggauggcggcaauaugcuugagacaauuaaggugagcccucaaaccauggacgggauccugaaaucuauucucaaggugaaaaagagccugggaauguucgucuccgauacacccggcgaaagaaacccuuaugagaacauccuguacaagauuugucucucuggggacggauggcccuauaucgcgagccggaccuccauugugggccgcgccugggaaaauacgguuguggaucuggagcaggacaacaaaccucagaagaucgggaauggaggcagcaacaaaucucuucaguccgcuggcuuugccgcugggcugacauacagccaacucaugacccugaaggauuucaaaugcuuuaaucugaucccgaacgccaagacauggauggacauugagggaagacccgaagauccugucgagaucgcccuuuaccagcccucuuccggcuguuaugugcacuucuuucgggaaccuaccgaccucaagcaguucaaacaggacgcuaaguacagccaugggauugauguuaccgaccuguuugcggcccaacccggacugacauccgcugugaucgaggcccucccgagaaauauggucauuacgugccagggcucugaagauauccgcaaacugcuugagagccaggggcggagagacaucaagcugauugauaucacccucuccaaagccgacucucgcaaguucgagaacgcugugugggaucaguuuaaggaccugugucacaugcauacaggcgucgugguugaaaagaagaaacggggaggcaaggaggaaauuaccccucacugcgcccugauggauuguaucauguucgacgcggcugugagcgggggacuugaugccaaaguccucagagugguucugccccgcgacaugguguuccggacauccaccccuaaggucgugcugugaggacuaguaauaaggaaacuguaugaaugucugugggcaggaagugaagagauccuucuguaaagguuuuuggaauuaugucugcugaauaauaaacuuuuuugaaauaauaaaucugguagaaaaaugagaucuaaaaaaaaaaaaaaaaaaaaaaaaaaaaaaaaaaaaaaaaaaaaaaaaaaaaaaaaaaaaaaaaaaaaaaaaaaaaaaaaaaaaaaaaaaaaaaaaaaaa

SEQ ID NO: 18992 - RNA, 2085 nt, Artificial Sequence
  mRNA product Design b-4 (A100) comprising derived and/or modified sequence from LASV(AV;Clade V)__CCA30315__SP-HsPLAT_NP(2-569) (opt5)
aggagagucccgcagucggcguccagcggcucugcuuguucgugugugugucguugcaggccuuauucaagcuuaccauggacgccaugaagagaggccugugcugugugcuccugcuuugcggggcugucuucguuagccccagcgccuccaaggaggugaaaucuuuccuguggacccagagccucagacgggaacuguccggcuacugcucuaacaucaaacuucaagucguuaaggacgcucaggcccugcuccacgggcuggauuuuagcgagguguccaaugugcagcgccuuaugagaaagcagcggcgcgacgauucugaccugaaaagacuccgggaucugaaccaagcggucaauaaccugguggaacucaagagcacacagcagaaguccguucugcgcgugggaacgcuuagcucugacgaucugcucacccuggcugccgaccuugagaaacugaaguccaaagucacaagaaccgaacggccccucagcucuggcguguauauggggaaucuguccagccagcaacuggaucagcgcagagcccuccugaaccuuauuggaaugacaaauggcucucaggggucccaggcuggacgggacggcguugugcgcgucugggaugugaagaacgccgagcugcucaauaaccaauucggcaccaugccuagccugacacuugcuugucugaccaaacagggacagguggaccucaaugaugucguucaagcccugacggaccuggggcucaucuacaccgcgaaguauccgaacacauccgaccuggauagacuuacccagucucaucccauucugaauaugaucgacacaaagaaaagcucccucaacauuagcggcuacaauuuuucucugggggccgcugugaaggccggagcuugcaugcuugauggcgggaacaugcuggagaccaucaaaguguccccucagagcauggacggaauccucaagucuauucugaaagucaagcgggcccugggcauguucgugagcgauacgcccggcgaacgcaacccuuaugagaauauccucuacaaaauuugucuguccggggacggauggcccuauaucgcgucuagaacaagcauuguuggccgggccugggaaaacaccguggucgaucuugagacagacgggaagccucagaagaucggauccggcaauagcaacaaaucucugcaauccgcuggguuuagcgccggacucaccuacucucagcugaugacccugaaggaugcuaugcuucagcucgacccgaaugccaaaacauggauggauauugagggcagacccgaagacccuguggagguugcccuguaccagcccaucuccggcugcuauauccacuucuuucgcgaaccuacggaccugaagcaauucaaacaggaugcuaaguacagccaugggauugacaucgcggaucucuuugccgcucagcccggacugaccuccgccgugauugaggcccuuccgcggaacauggucaucacaugucagggcucugaagacauuaagaaacugcucgagagccaagggagaaaggauaucaaacugaucgacauugcucuguccaagaucgauucucgcaaauucgagaaugccgugugggaccaguauaaggaucuuugccacaugcauaccggagucgugguugaaaagaaaaagcggggcgggaaagaggaaauuacaccucacugugcgcucauggacugcaucauguuugaugcugccgugagcggcggacugaacacccugguccucagagccgugcugccccgcgacaugguuuuccggacguccacaccuagagugguccuuugaggacuaguaauaaggaaacuguaugaaugucugugggcaggaagugaagagauccuucuguaaagguuuuuggaauuaugucugcugaauaauaaacuuuuuugaaauaauaaaucugguagaaaaaugagaucuaaaaaaaaaaaaaaaaaaaaaaaaaaaaaaaaaaaaaaaaaaaaaaaaaaaaaaaaaaaaaaaaaaaaaaaaaaaaaaaaaaaaaaaaaaaaaaaaaaaa

SEQ ID NO: 18993 - RNA, 2085 nt, Artificial Sequence
  mRNA product Design b-4 (A100) comprising derived and/or modified sequence from LASV(Togo/2016/7082;Clade VI)__AMR44578__SP-HsPLAT_NP(2-569) (opt5)
aggagagucccgcagucggcguccagcggcucugcuuguucgugugugugucguugcaggccuuauucaagcuuaccauggacgccaugaagagaggccugugcugugugcuccugcuuugcggggcugucuucguuagccccagcaacuccaaggaggugaaaucuuuccuguggacccagagccucagacgggaacuguccggcuacugcucuaauaucaaacuucaagucguuaaagacgcccaggcucugcuccacgggcuggauuuuagcgagguguccaacgugcagcgccuuaugagaaagcagaaacgggacgauggagaccugaagcgccucagagaucugaaucaagccgucaacaaucugguggaacucaagucuguucagcagaaaagcauucugcgggugggcacacuuacguccgacgaucugcucacccuggcggcugaccuugagaagcugaaaagcaaggucacacgcaccgaaagaccccucucuuccgggguguauaugggaaaccugagcucucagcaacuggaucagcggcgcgcccuccuguccaugaucggcaugagcgggggaaaucagaacucucagccuaaaggcgacggcguugugagagucugggaugugaagaaugccgaccuucugaacaaucaauucgggacaaugccgucccucacccuggcuugucuuacaaagcagggacagguggaucugaacgacgccguccaagcucucaccgaccugggccugauuuacacggccaaauaucccaauagcuccgaucucgaccggcugucucagagccauccuauccuuaacaugauugauaccaagaaauccagccugaauaucucuggguacaacuuuucccucggagcggccaucaagacaggcgcuugcaugcuggacgggggaaacaugcuugagaccauuaaaguuacaccccagaccauggauggcauccucaagagcauucugaaagugaagcgcucucugggcauguucaucagcgacacgccuggggagagaaaucccuaugaaaacauucuguacaagaucugucucuccggagauggcuggccuuauauugccucucggacagcuaucaucgggcgcgccugggagaauaccguggucgaccuggaaagcgauuccaaaccgcagaagauuggaagcaacggcucuaauaaaucccuucaaagcgcgggguuugcccccggacugacauacucucagcucaugacccugaaggacuccaugcugcagcuugauccuaacgcuaaaaccuggaucgacauugagggcagacccgaggacccuguggaaguugcccucuuccagcccaucagcggcugcuacauucacuuuuuccgggagccgacagaucugaagcaauuuaagcaggacgcuaaauauucccaugggaucgaugugacggaccuguucgccgcccagccuggacucaccucugcugucaucgaagcgcugcccagaaauauggugcuuacaugucagggcagcgaugacauuaagaaacugcucgauucccaagggcgccgggacaucaagcugauugauguuucucugaacaaaaucgacagcagaaaguuugagaaugccgugugggaucaguacaaggaccuuugccacaugcauaccggagucguggucgaaaagaagaaaaagggcgggaaagaggagauuacaccucacugugcucuccuggauugcaucauguucgacgccgccguguccggcggacugaacgcuaccguucuccgcgccgugcugccccgggacauggucuuuagaacgagcucucccaaggugguucuuugaggacuaguaauaaggaaacuguaugaaugucugugggcaggaagugaagagauccuucuguaaagguuuuuggaauuaugucugcugaauaauaaacuuuuuugaaauaauaaaucugguagaaaaaugagaucuaaaaaaaaaaaaaaaaaaaaaaaaaaaaaaaaaaaaaaaaaaaaaaaaaaaaaaaaaaaaaaaaaaaaaaaaaaaaaaaaaaaaaaaaaaaaaaaaaaaa

SEQ ID NO: 18994 - RNA, 2085 nt, Artificial Sequence
  mRNA product Design b-4 (A100) comprising derived and/or modified sequence from LASV(KAK-428;Clade n.d. (VII))__ANH09741__SP-HsPLAT_NP(2-569) (opt5)
aggagagucccgcagucggcguccagcggcucugcuuguucgugugugugucguugcaggccuuauucaagcuuaccauggacgccaugaagagaggccugugcugugugcuccugcuuugcggggcugucuucguuagccccagcaacuccaaggaggugaaaucuuuccuguggacccagagccucagacgggaacuguccggcuacugcacaaauaucaaacuucaagucguuaaggacgcccaggcucugcuccacgggcuggauuuuucugaggugagcaacgugcagcgccuuaugagaaagcagaaacgggacgauaaugaccugaagcgccucagagaucugaaccaagccgucaauaaccugguggaacucaaguccguucagcagaaaucugugcugaaggucggaacgcuuaauagcgacgaucugcucacccuggcggcugaccuugagaaacugaaguccaaagugguucggacagaacgcccccucagcucuggcguguauauggggaaccuguccagccagcaacuggaucagagacgggcccuccugaauaugauuggaauggccggcgggucucagggaaaccagccuucccgcgacggcgucgugagagugugggaugucaagaaugcugaccuucugaacaaucaauucggcaccaugccgagccucacacuggccugucuuaccaagcaggggcagguugaucugaacgacguggugcucgcucugacagaccugggacucaucuacaccgccaaauaucccaauucuuccgaucuggaccggcuuagccaaaaccauccuguccugaacaugauugaugugaauaaguccucucucaacaucagcggcuacaauuuuucccugggggcggccguuaaagcuggagccugcaugcuugacggcgggaacaugcuggagacgauuaagaucagcccccagaccguggauggaauccucaaaucuauucugaaggucaaacgcgcucugggcauguucguguccgacacaccuggcgagagaaaucccuaugaaaacauccucuacaagguuugucugagcgggaauggauggccuuauauugccucucggaccagcaucgugggccgcgcgugggagaacacagucguggaucuugaauccaauaagaaccagccgaaagucgggaauaacggaucuaauaagaugcugcagagcuccggcuuugccaccgggcucacguacagccaacugaugacacugagagacucuaugcuucagcucgaucccaccgcuaaaacauggauugacaucgagggacggccugaggaucccguggaacuggcccuguuccagccuuccagcggcugcuacauucacuuuuucagagagcccaccgaccucaagcaguuuaaacaagacgcuaaguauucucauggcaucgauguuaacgaccuguucuccgcccagccggggcuuaccagcgccgugcuggaagcucucccucgcaauaugguccugacaugucagggauccgaugacauccggaagcugcuugauucucaggacagaaaagauauuaagcucaucgacauuagccuguccaaagcggaugcccgcaaguuugagaacgacgugugggaucaauucaaagaccugugccacaugcauacgggcaucguuguggaaaagaagaaaaagggagggaaacaggagaugacaccccacugugcucuccuggauugcauuauguuugacgccgccgucucuggcgggcuuaacgugccuacccugcgggcugugcuccccaccgacaugguuuucagaacaaucaccacgaaggucgugcugugaggacuaguaauaaggaaacuguaugaaugucugugggcaggaagugaagagauccuucuguaaagguuuuuggaauuaugucugcugaauaauaaacuuuuuugaaauaauaaaucugguagaaaaaugagaucuaaaaaaaaaaaaaaaaaaaaaaaaaaaaaaaaaaaaaaaaaaaaaaaaaaaaaaaaaaaaaaaaaaaaaaaaaaaaaaaaaaaaaaaaaaaaaaaaaaaa

SEQ ID NO: 18995 - RNA, 2085 nt, Artificial Sequence; identical to SEQ ID NO: 18989
  mRNA product Design b-4 (A100) comprising derived and/or modified sequence from LASV(Pinneo-NIG-1969;Clade I)__AIT17837__SP-HsPLAT_NP(2-569) (opt5)

SEQ ID NO: 18996 - RNA, 2085 nt, Artificial Sequence
  mRNA product Design b-4 (A100) comprising derived and/or modified sequence from LASV(ISTH0009-NIG-2011;Clade II)__AIT17405__SP-HsPLAT_NP(2-569) (opt5)
aggagagucccgcagucggcguccagcggcucugcuuguucgugugugugucguugcaggccuuauucaagcuuaccauggacgccaugaagagaggccugugcugugugcuccugcuuugcggggcugucuucguuagccccagcguguccaaggaggucaaaucuuuccuguggacccagagccucagacgggaacuguccggcuacugcucuaacaucaaacuucaaguugugaaggacgcccaggcucugcuccacgggcuggauuuuagcgagguguccaauguccagcgccuuaugagaaagcagaaacgggacgauucugaccugaagcgccucagagaucugaaccaagccgugaauaaccugguugaacucaagagcacacagcagaaauccauucugcgggugggaacgcuuaccagcgacgaucugcucacacuggcggcugaccuugagaagcugaaaucuaaggucauccgcaccgaaagaccccucuccagcggcguguauauggggaaucugucuacacagcaacuggagcagcggcgcgcccuccugaacaugauuggaaugguuggcggggcccagggaacccagccuggcagagauggcgugguccgggugugggacgugaaaaauccggaucuucugaacaaucaauucgggacaaugcccucccucacccuggcuugucuuacgaagcagggacaggucgaccugaacgaugccguucucgcucugaccgaccugggccucaucuacacagccaaguauccuaauagcucugaccuggaucgccuuucccaaagccaucccauucugaacaugguggacaucaaaaaguccucucucaauaucagcggguacaacuuuucccugggagcggccgugaaagcuggcgccugcaugcuugaugggggaaauaugcuggagaccauuaaggucacaccucagaccauggacggcauccucaaaagcauucugaaggugaaaagaucucugggcauguucguuuccgauacgcccggggaacggaacccuuaugagaacauccucuacaagauuugucugagcggagacggcuggccguauaucgcuucucgcacaagcauuguggggagagccugggaaaauaccacagucgaucuugaguccgacggaaagccccagaaagugggcucugcggggagcaacaagucccugcagagcgccggauuuccuaccggccucaccuacucucaacugaugacacugaaagauuccaugaugcagcuugaccccagcgcuaagacguggaucgauaucgagggccggccugaagaccccguugagauugcccucuaccagccgaugucugggugcuauauccacuucuuuagagaaccuaccgaccugaaacaguucaagcaagaugcuaaguacucccauggaauugacguggccgaucuguuucccgcccagccuggccucacaagcgcugucaucgaggcgcugccccgcaauauggugcuuaccugucagggguccgacgauauuaaacggcugcucgacucucagggaagacgcgauaucaagcugaucgacauugcccugagcaaagcugauucccggagauucgaaaacgccgucugggaccaaugcaaggaucuuugucacaugcauacaggcgugguuguggagaaaaagaagcgcgggggcaaagaggaaaucacgccccacugcgcccucauggacuguauuauguaugaugcugccgucucuggaggccugaauaucccugugcugcgggcgguucucccgagagacaugguguuucgcaccagcucccccaaggucgugcugugaggacuaguaauaaggaaacuguaugaaugucugugggcaggaagugaagagauccuucuguaaagguuuuuggaauuaugucugcugaauaauaaacuuuuuugaaauaauaaaucugguagaaaaaugagaucuaaaaaaaaaaaaaaaaaaaaaaaaaaaaaaaaaaaaaaaaaaaaaaaaaaaaaaaaaaaaaaaaaaaaaaaaaaaaaaaaaaaaaaaaaaaaaaaaaaaa

SEQ ID NO: 18997 - RNA, 2085 nt, Artificial Sequence
  mRNA product Design b-4 (A100) comprising derived and/or modified sequence from LASV(ISTH2010-NIG-2012;Clade II)__AIT17483__SP-HsPLAT_NP(2-569) (opt5)
aggagagucccgcagucggcguccagcggcucugcuuguucgugugugugucguugcaggccuuauucaagcuuaccauggacgccaugaagagaggccugugcugugugcuccugcuuugcggggcugucuucguuagccccagcgccuccaaggaggugaaaucuuuccuguggacccagagccucagacgggaacuguccggcuacugcucuaacaucaaacuucaagucguuaaggacgcucaggcccugcuccacgggcuggauuuuagcgagguguccaaugugcagcgccuuaugagaaagcagaaacgggacgauucugaccugaagcgccucagagaucugaaccaagcggucaauaaccugguggaacucaagagcacacagcagaaauccauucugcggguuggaacgcuuaccagcgacgaucugcucacacuggcugccgaccuugagaagcugaaaucuaaggugauccgcaccgaaagaccccucuccagcggcgucuauauggggaaucugucuacacagcaacuggagcagcggcgcgcccuccugaaccuuauuggaauggugggcggggcucagggaacccagccuggcagagauggcguugugcgggucugggacgugaaaaauccggaucugcucaacaaucaauucgggacaaugcccucccugacccuugccugucugacgaagcagggacagguggaccucaacgaugcuguccuggcccugaccgaccucggccugaucuacacagcgaaguauccuaauagcucugaccuugaucgccugucccaaagccaucccauucucaacaugguugacaccaaaaaguccucucugaauaucagcggguuuaacuucucccuuggagccgcugugaaagccggcgcuugcaugcuggaugggggaaauaugcucgagacaaucaaggugaccccucagacgauggacggcauucugaaaagcauccugaaggucaaaaagucucucggcauguuuguguccgauacacccggggaaagaaacccuuacgagaacauucuguauaagaucugucuuagcggagacggcuggccguacauugccucucggaccagcaucguugggcgcgcgugggaaaauacaaccguggaucuggaguccgacggaaaaccccacaaggucggcaccgccgggucuaacaaaagccuccaguccgcuggauucccuacaggccugacguauagccagcugaugacccuuaaggauucuaugaugcaacucgaccccuccgccaaaacauggauugauaucgagggcagaccugaagaccccguggagaucgcucuguaccagccgaugagcgggugcuacauucacuuuuuccgggaaccuaccgaccugaagcaguuuaagcaggaugccaaauauucucauggaaucgacguugccgaucucuuccccgcucaaccuggccugacauccgcggugauugaggcccuucccagaaauaugguccugaccugucaggggagcgacgauaucaagcgccuccuggacucccagggacggagagauauuaaacugaucgacaucgcucuuucuaaggccgauagccgccgguuugaaaacgccgugugggaccagugcaaagaucucugucauaugcacacgggcgucgugguugagaagaagaaaagagggggcaaggaggaaauuacaccccacugcgcucugauggacuguaucauguacgaugccgcgguguccggaggccugaauauuccuguccuccgcgcugugcugccgcgggacaugguuuucagaaccucuagccccaaagugguccuuugaggacuaguaauaaggaaacuguaugaaugucugugggcaggaagugaagagauccuucuguaaagguuuuuggaauuaugucugcugaauaauaaacuuuuuugaaauaauaaaucugguagaaaaaugagaucuaaaaaaaaaaaaaaaaaaaaaaaaaaaaaaaaaaaaaaaaaaaaaaaaaaaaaaaaaaaaaaaaaaaaaaaaaaaaaaaaaaaaaaaaaaaaaaaaaaaa

SEQ ID NO: 18998 - RNA, 2085 nt, Artificial Sequence
  mRNA product Design b-4 (A100) comprising derived and/or modified sequence from LASV(Lassa virus/H.sapiens-wt/NGA/2015/ISTH_0543;Clade II)__AVO03640__SP-HsPLAT_NP(2-569) (opt5)
aggagagucccgcagucggcguccagcggcucugcuuguucgugugugugucguugcaggccuuauucaagcuuaccauggacgccaugaagagaggccugugcugugugcuccugcuuugcggggcugucuucguuagccccagcgccuccaaggaggugaaaucuuuccuguggacccagagccucagacgggaacuguccggcuacugcucuaacaucaaacuucaagucguuaaggacgcucaggcccugcuccacgggcuggauuuuagcgagguguccaaugugcagcgccuuaugagaaagcagaaacgggacgauucugaccugaagcgccucagagaucugaaccaagcggucaauaaccugguggaacucaagagcacacagcagaaauccauucugcggguuggaacgcuuaccagcgacgaucugcucacacuggcugccgaccuugagaagcugaaaucuaaggugauccgcaccgaaagaccccucuccagcggcgucuauauggggaaucugucuacacagcaacuggagcagcggcgcgcccuccugaacaugauuggaauggugggcggggcucagggaacccagccuggcagagauggcguugugcgggucugggacgugaaaaauccggaucuucugaacaaucaauucgggacaaugcccucccucacccuggccugucuuacgaagcagggacagguggaccugaacgaugcuguccucgcccugaccgaccugggccucaucuacacagcgaaguauccuaauagcucugaccuggaucgccuuucccaaagccaucccauucugaacaugguugacaccaaaaaguccucucucaauaucagcggguacaacuuuucccugggagccgcugugaaagccggcgcuugcaugcuugaugggggaaauaugcuggagacaaucaaggugaccccucagacgauggacggcauucucaaaagcauccugaaggucaaaaagucucugggcauguucguguccgauacacccggggaaagaaacccuuaugagaacauucucuacaagaucugucugagcggagacggcuggccguauauugccucucggaccagcaucguugggcgcgcgugggaaaauacaaccguggaucuugaguccgacggaaaaccccagaaggucggcucugccgggagcaacaaaucccugcagagcgcuggauuuccuaccggccucacauacucucaacugaugacgcugaaggauuccaugaugcagcuugaccccagcgccaaaaccuggauugauaucgagggcagaccugaagaccccguggagaucgcucucuaccagccgaugucugggugcuauauucacuucuuucgggaaccuacagaccugaagcaguucaagcaagaugccaaauacucccauggaaucgacguugccgaucuguuucccgcucagccuggccucaccagcgcggugauugaggcccugcccagaaauaugguccuuacaugucagggguccgacgauaucaagcgccugcucgacucucagggacggaaagauauuaagcugaucgacaucgcucugagcaaagccgauuccagacgcuucgaaaacgccgugugggaccaaugcaaggaucuuugucacaugcauaccggcgucgugguugagaagaaaaagagagggggcaaagaggaaauuacgccccacugcgcucucauggacuguaucauguaugaugccgcggugucuggaggccugaauauuccuguccugcgggcugugcucccgcgcgacaugguuuuucggacaagcucccccaaggugguccugugaggacuaguaauaaggaaacuguaugaaugucugugggcaggaagugaagagauccuucuguaaagguuuuuggaauuaugucugcugaauaauaaacuuuuuugaaauaauaaaucugguagaaaaaugagaucuaaaaaaaaaaaaaaaaaaaaaaaaaaaaaaaaaaaaaaaaaaaaaaaaaaaaaaaaaaaaaaaaaaaaaaaaaaaaaaaaaaaaaaaaaaaaaaaaaaaa

SEQ ID NO: 18999 - RNA, 2085 nt, Artificial Sequence
  mRNA product Design b-4 (A100) comprising derived and/or modified sequence from LASV(Lassa virus/H.sapiens-wt/NGA/2016/ISTH_0009;Clade II)__AVO03572__SP-HsPLAT_NP(2-569) (opt5)
aggagagucccgcagucggcguccagcggcucugcuuguucgugugugugucguugcaggccuuauucaagcuuaccauggacgccaugaagagaggccugugcugugugcuccugcuuugcggggcugucuucguuagccccagcgccuccaaggaggugaaaucuuuccuguggacccagagccucagacgggaacuguccggcuacugcucuaacaucaaacuucaagucguuaaggacgcucaggcccugcuccacgggcuggauuuuagcgagguguccaaugugcagcgccuuaugagaaagcagaaacgggacgauucugaccugaagcgccucagagaucugaaccaagcggucaauaaccugguggaacucaagagcacacagcagaaauccauucugcggguuggaacgcuuaccagcgacgaucugcucacacuggcugccgaccuugagaagcugaaaucuaaggugauccgcaccgaaagaccccucuccagcggcgucuauauggggaaucugucuacacagcaacuggagcagcggcgcgcccuccugaacaugauuggaauggugggcggggcucagggaacccagccuggcagagauggcguugugcgggucugggacgugaaaaauccggaucuucugaacaaucaauucgggacaaugcccucccucacccuggccugucuuacgaagcagggacagguggaccugaacgaugcuguccucgcccugaccgaccugggccucaucuacacagcgaaguauccuaauagcucugaccuggaucgccuuucccaaagccaucccauucugaacaugguugacaccaaaaaguccucucucaauaucagcggguacaacuuuucccugggagccgcugugaaagccggcgcuugcaugcuugaugggggaaauaugcuggagacaaucaaggugaccccucagacgauggacggcauucucaaaagcauccugaaggucaaaaagucucugggcauguucguguccgauacacccggggaaagaaacccuuaugagaacauucucuacaagaucugucugagcggagacggcuggccguauauugccucucggaccagcaucguugggcgcgcgugggaaaauacaaccguggaucuugaguccgacggaaaaccccagaaggucggcucugccgggagcaacaaaucccugcagagcgcuggauuuccuaccggccucacauacucucaacugaugacgcugaaggauuccaugaugcagcuugaccccagcgccaaaaccuggauugauaucgagggcagaccugaagaccccguggagaucgcucucuaccagccgaugucugggugcuauauucacuucuuucgggaaccuacagaccugaagcaguucaagcaagaugccaaauacucccauggaaucgacguugccgaucuguuucccgcucagccuggccucaccagcgcggugauugaggcccugcccagaaauaugguccuuacaugucagggguccgacgauaucaagcgccugcucgacucucagggacggagagauauuaaacugaucgacaucgcucugagcaaggccgauucccgccgguucgaaaacgccgugugggaccaaugcaaagaucuuugucacaugcauaccggcgucgugguugagaagaagaaaagagggggcaaggaggaaauuacgccccacugcgcucucauggacuguaucauguaugaugccgcggugucuggaggccugaauauuccuguccugcgcgcugugcucccgcgggacaugguuuuuagaacaagcucccccaaagugguccugugaggacuaguaauaaggaaacuguaugaaugucugugggcaggaagugaagagauccuucuguaaagguuuuuggaauuaugucugcugaauaauaaacuuuuuugaaauaauaaaucugguagaaaaaugagaucuaaaaaaaaaaaaaaaaaaaaaaaaaaaaaaaaaaaaaaaaaaaaaaaaaaaaaaaaaaaaaaaaaaaaaaaaaaaaaaaaaaaaaaaaaaaaaaaaaaaa

SEQ ID NO: 19000 - RNA, 2085 nt, Artificial Sequence
  mRNA product Design b-4 (A100) comprising derived and/or modified sequence from LASV(Lassa virus/H.sapiens-wt/NGA/2016/ISTH_0017;Clade II)__AVO03568__SP-HsPLAT_NP(2-569) (opt5)
aggagagucccgcagucggcguccagcggcucugcuuguucgugugugugucguugcaggccuuauucaagcuuaccauggacgccaugaagagaggccugugcugugugcuccugcuuugcggggcugucuucguuagccccagcgccuccaaggaggugaaaucuuuccuguggacccagagccucagacgggaacuguccggcuacugcucuagcaucaaacuucaagucguuaaggacgcucaggcccugcuccacgggcuggauuuuuccgaggugucuaacgugcagcgccuuaugagaaagcagaaacgggacgauagcgaccugaagcgccucagagaucugaaucaagcggucaacaaucugguggaacucaaguccacacagcagaaaagcauucugcggguuggaacgcuuaccucugacgaucugcucacacuggcugccgaccuugagaagcugaaauccaaggugauccgcaccgaaagaccccucagcucuggcgucuauauggggaaccuguccacacagcaacuggagcagcggcgcgcccuccugaauaugauuggaauggcuggcggggcccagggaacccagccuggcagagauggcgugguucgggugugggacgucaaaaacccggaucuucugaauaaccaauucgggacaaugcccagccucacccuggcuugucuuacgaagcagggacagguggaccugaaugaugccgugcucgcgcugaccgaccugggccucaucuacacagccaaguauccuaacucuuccgaccuggaucgccuuagccaaucccaucccauucugaauauggucgacaccaaaaagucuagccucaacaucuccggguacaauuuuagccugggagcugccguuaaagcuggcgccugcaugcuugaugggggaaacaugcuggagacaaucaaggugaccccucagacgauggacggcauucucaaaucuauccugaaggugaaaagaucccugggcauguucgucagcgaugcgcccggggaacggaauccuuaugagaacauucucuacaagaucugucugucuggagacggcuggccguauauugccagccgcacauccaucguggggagagcuugggaaaacaccacaguugaucuugagucugacggaaagccccagaaagugggcgccaccgggagcaauaagucccugcagagcgcuggauuuccuaccggccucacauacucucaacugaugacgcugaaagauuccaugaugcagcuugaccccagcgccaagaccuggauugauaucgagggccggccugaagaccccgucgagguggcccucuaccagccgguuucugggugcuauauccacuucuuuagagaaccuacagaccugaaacaguucaagcaagaugcuaaguacucccauggaauugacguggcggaucuguuucccgcccagccuggccucaccagcgcugucaucgaggcccugccccgcaacauggugcuuacaugucagggguccgacgauauuaaaaagcugcucgacucucagggacggaaagauaucaagcugauugacaucgcccugagcaaagcugauuccagacgcuucgaaaaugccgucugggaccaaugcaaggaucuuugucacaugcauaccggcgugguuguggagaagaaaaagagagggggcaaagaggaaaucacgccccacugcgcgcucauggacuguauuauguaugaugcugccgucucuggaggccugaacaucccugugcugcgggccguucucccgcgcgacaugguguuucggacaagcucccccaaggucgugcugugaggacuaguaauaaggaaacuguaugaaugucugugggcaggaagugaagagauccuucuguaaagguuuuuggaauuaugucugcugaauaauaaacuuuuuugaaauaauaaaucugguagaaaaaugagaucuaaaaaaaaaaaaaaaaaaaaaaaaaaaaaaaaaaaaaaaaaaaaaaaaaaaaaaaaaaaaaaaaaaaaaaaaaaaaaaaaaaaaaaaaaaaaaaaaaaaa

SEQ ID NO: 19001 - RNA, 2085 nt, Artificial Sequence
  mRNA product Design b-4 (A100) comprising derived and/or modified sequence from LASV(Lassa virus/H.sapiens-wt/NGA/2018/ISTH_0959;Clade II)__AVV65100__SP-HsPLAT_NP(2-569) (opt5)
aggagagucccgcagucggcguccagcggcucugcuuguucgugugugugucguugcaggccuuauucaagcuuaccauggacgccaugaagagaggccugugcugugugcuccugcuuugcggggcugucuucguuagccccagcgccuccaaggaggugaaaucuuuccuguggacccagagccucagacgggaacuguccggcuacugcucuaacaucaaacuucaagucguuaaggacgcucaggcccugcuccacgggcuggauuuuagcgagguguccaaugugcagcgccuuaugagaaagcagaaacgggacgauucugaccugaagcgccucagagaucugaaccaagcggucaauaaccugguggaacucaagagcacccagcagaaauccauucugcggguuggaacgcuuaccagcgacgaucugcucacacuggcugccgaccuugagaagcugaaaucuaaggugauccgcaccgaaagaccccucuccagcggcgucuauauggggaaucugucuacacagcaacuggagcagcggcgcgcccuccugaaccuuauuggaauggugggcggggcucagggaacccagccuggcagagauggcguugugcgggucugggacgugaaaaauccggaucugcucaacaaucaauucgggacaaugcccucccugacccuugccugucugacgaagcagggacagguggaccucaacgaugucguucuggcucugaccgaccucggccugaucuacacagccaaguauccuaauagcucugaccuugaucgccugucccaaagccaucccauucucaacaugguggacaccaaaaaguccucucugaauaucagcggguuuaacuucucccuuggagcggccgugaaagcuggcgccugcaugcuggaugggggaaauaugcucgagacaaucaaggucaccccucagacgauggacggcauucugaaaagcauccugaaggugaaaaagucucucggcauguuuguuuccgauacacccggggaaagaaacccuuacgagaacauucuguauaagaucugucuuagcggagacggcuggccguacauugcuucucggaccagcaucguggggcgcgccugggaaaauacaaccgucgaucuggaguccgacggaaaaccccacaaggugggcaccgcggggucuaacaaaagccuccaguccgccggauucccuacaggccugacguauagccagcugaugacccuuaaggauucuaugaugcaacucgaccccuccgcuaaaacauggauugauaucgagggcagaccugaagaccccguugagaucgcccuguaccagccgaugagcgggugcuacauucacuuuuuccgggaaccuaccgaccugaagcaguuuaagcaggaugcuaaauauucucauggaaucgacguggccgaucucuuccccgcccaaccuggccugacauccgcugucauugaggcgcuucccagaaauauggugcugaccugucaggggagcgacgauaucaagcgccuccuggacucccagggacggaaagauauuaagcugaucgacaucgcccuuucuaaaacggauagcagacgcuuugaaaacgcugucugggaccagugcaaggaucucugucauaugcacacaggcgugguuguggagaagaaaaagagagggggcaaagaggaaauuacaccccacugcgcccugauggacuguaucauguacgaugccgcugucuccggaggccugaauauuccugugcuccgggccguucugccgcgcgacaugguguuccggaccucuagccccaaggucgugcuuugaggacuaguaauaaggaaacuguaugaaugucugugggcaggaagugaagagauccuucuguaaagguuuuuggaauuaugucugcugaauaauaaacuuuuuugaaauaauaaaucugguagaaaaaugagaucuaaaaaaaaaaaaaaaaaaaaaaaaaaaaaaaaaaaaaaaaaaaaaaaaaaaaaaaaaaaaaaaaaaaaaaaaaaaaaaaaaaaaaaaaaaaaaaaaaaaa

SEQ ID NO: 19002 - RNA, 2085 nt, Artificial Sequence
  mRNA product Design b-4 (A100) comprising derived and/or modified sequence from LASV(LASV003-NIG-2008;Clade II)__AIT17581__SP-HsPLAT_NP(2-569) (opt5)
aggagagucccgcagucggcguccagcggcucugcuuguucgugugugugucguugcaggccuuauucaagcuuaccauggacgccaugaagagaggccugugcugugugcuccugcuuugcggggcugucuucguuagccccagcgccuccaaggaggugaaaucuuuccuguggacccagagccucagacgggaacuguccggcuacugcucuagcaucaaacuucaagucguuaaggacgcucaggcccugcuccacgggcuggauuuuuccgaggugucuaacgugcagcgccuuaugagaaagcagaaacgggacgauagcgaccugaagcgccucagagaucugaaucaagcggucaacaaucugguggaacucaaguccacccagcagaaaagcguucugcgggugggaacgcuuaccucugacgaucugcucacacuggcugccgaccuugagaagcugaaauccaaggucauucgcaccgaaagaccccucagcucuggcguguauauggggaaccuguccgcccagcaacuggagcagcggcgcacacuccugaauaugaucggaaugguuggcggggcucagggaacccagccuggcagagauggcgugguccgggugugggacgugaaaaacccggaucuucugaauaaccaauucgggacaaugcccagccucacccuggccugucuuacgaagcagggacaggucgaccugaaugauguugugcucgcucugaccgaccugggccucauuuacacagccaaguauccuaacucuuccgaccuggaucgccuuagccaaucccaucccauccugucuaugguggacaccaaaaagagcucccucaauauuagcggguacaacuuuucucugggagcggccgucaaagcuggcgccugcaugcuugaugggggaaauaugcuggagacaaucaaggugaccccucagacgauggacggcauccucaaauccauucugaagguuaaaaagagccugggcauguucgugucugauacacccggggaaagaaacccuuaugagaauauccucuacaagauuugucugagcggagacggcuggccguauaucgcuucccggaccucuauugucgggcgcgccugggaaaacacaaccguggaucuugagagcgacggaaaaccccagaagguuggcaccgcgggguccaacaaaagccugcagucugccggauuuccuacaggccucacguacucccaacugaugacccugaaggauagcaugaugcagcuugaccccucugcuaaaacauggaucgauauugagggcagaccugaagaccccguggagaucgcccucuaccagccgauguccgggugcuauauccacuucuuucgggaaccuaccgaccugaagcaguucaagcaagaugcuaaauacagccauggaauugacgucacagaucuguuucccgcccagccuggccucaccuccgccgugaucgaggcucugcccagaaauaugguccuuacgugucaggggucugacgauauuaagcgccugcucgacagccagggacggagagauaucaaacugauugacaucgcgcuguccaaggccgauucucgccgguucgaaaacgcugugugggaccaaugcaaagaucuuugucacaugcauacaggcguuguggucgagaagaagaaaagagggggcaaggaggaaaucacaccccacugcgcccucauggacuguauuauguaugaugccgcugugagcggaggccugaauaucccuguucugcgcgccgugcucccgcgggacauggucuuuagaaccuccagccccaaaguggugcugugaggacuaguaauaaggaaacuguaugaaugucugugggcaggaagugaagagauccuucuguaaagguuuuuggaauuaugucugcugaauaauaaacuuuuuugaaauaauaaaucugguagaaaaaugagaucuaaaaaaaaaaaaaaaaaaaaaaaaaaaaaaaaaaaaaaaaaaaaaaaaaaaaaaaaaaaaaaaaaaaaaaaaaaaaaaaaaaaaaaaaaaaaaaaaaaaa

SEQ ID NO: 19003 - RNA, 2085 nt, Artificial Sequence
  mRNA product Design b-4 (A100) comprising derived and/or modified sequence from LASV(LASV035-NIG-2009;Clade II)__AIT17589__SP-HsPLAT_NP(2-569) (opt5)
aggagagucccgcagucggcguccagcggcucugcuuguucgugugugugucguugcaggccuuauucaagcuuaccauggacgccaugaagagaggccugugcugugugcuccugcuuugcggggcugucuucguuagccccagcgccuccaaggaggugaaaucuuuccuguggacccagagccucagacgggaacuguccggcuacugcucuagcaucaaacuucaagucguuaaagacgcucaggcccugcuccacgggcuggauuuuuccgaggugucuaacgugcagcgccuuaugagaaagcagaaacgggacgauagcgaccugaagcgccucagagaucugaaucaagcggucaacaaucugguggaacucaaguccacacagcagaaaagcauucugcggguuggaacgcuuaccucugacgaucugcucacacuggcugccgaccuugagaagcugaaauccaaggugauccgcaccgaaagaccccucagcucuggcgucuauauggggaaccuguccgcccagcaacuggagcagcggcgcgcucuccugaauaugauuggaauggugggcggggcccagggaacacagccuggcagagauggcguugugcgggucugggacgugaaaaacccggaucuucugaauaaccaauucgggaccaugcccagccucacacuggcuugucuuaccaagcagggacagguggaccugaaugaugccguccucgcgcugacggaccugggccucaucuacaccgccaaguauccuaacucuuccgaccuggaucgccuuagccaaucccaucccauucugaauaugguugacacaaagaagucuagccucaacaucuccggguacaauuuuagccugggagcugccgugaaagcuggcgccugcaugcuugaugggggaaacaugcuggagaccaucaaggugacaccucagaccauggacggcauucucaaaucuauccugaaggucaaaagaucccugggcauguucgugagcgauacgcccggggaacggaauccuuaugagaacauucucuacaagaucugucugucuggagacggcuggccguauauugcgagccgcacauccaucguugggagagccugggaaaacaccacaguggaucuugagucugacggaaagccccagaaagucggcaccaccgggagcaauaagucccugcagagcgcuggauuuccuacaggccucacguacucucaacugaugacccugaaagauuccaugaugcagcuugaccccagcgccaagacauggauugauaucgagggccggccugaagaccccguggagaucgcucucuaccagccgaugucugggugcuauauucacuucuuuagagaaccuaccgaccugaaacaguucaagcaagaugccaaguacucccauggaaucgacguugccgaucuguuucccgcucagccuggccucacaagcgcggugauugaggcccugccccgcaacaugguccuuaccugucagggguccgacgauaucaaaaagcugcucgacucucagggacggagagauauuaaacugaucgacaucgcucugagcaaggccgauucccgcaaauucgaaaaugccgugugggaccaaugcaaggaucuuugucacaugcauacgggcgucgugguugagaagaaaaagagagggggcaaagaggaaauuacaccccacugcgcucucauggacuguaucauguaugaugccgcggugucuggaggccugaacauuccuguccugcgggcugugcucccgcgcgacaugguuuuucggaccagcucccccaaggugguccugugaggacuaguaauaaggaaacuguaugaaugucugugggcaggaagugaagagauccuucuguaaagguuuuuggaauuaugucugcugaauaauaaacuuuuuugaaauaauaaaucugguagaaaaaugagaucuaaaaaaaaaaaaaaaaaaaaaaaaaaaaaaaaaaaaaaaaaaaaaaaaaaaaaaaaaaaaaaaaaaaaaaaaaaaaaaaaaaaaaaaaaaaaaaaaaaaa

SEQ ID NO: 19004 - RNA, 2085 nt, Artificial Sequence
  mRNA product Design b-4 (A100) comprising derived and/or modified sequence from LASV(LASV1000-NIG-2009;Clade II)__AIT17783__SP-HsPLAT_NP(2-569) (opt5)
aggagagucccgcagucggcguccagcggcucugcuuguucgugugugugucguugcaggccuuauucaagcuuaccauggacgccaugaagagaggccugugcugugugcuccugcuuugcggggcugucuucguuagccccagcgccuccaaggaggugaaaucuuuccuguggacccagagccucagacgggaacuguccggcuacugcucuaacaucaaacuucaagucguuaaggacgcucaggcccugcuccacgggcuggauuuuagcgagguguccaaugugcagcgccuuaugagaaagcagaaacgggacgauucugaccugaagcgccucagagaucugaaccaagcggucaauaaccugguggaacucaagagcacacagcagaaauccauucugcggguuggaacgcuuaccagcgacgaucugcucacacuggcugccgaccuugagaagcugaaaucuaaggugauccgcaccgaaagaccccucuccagcggcgucuauauggggaaucugucuacacagcaacuggagcagcggcgcgcccuccugaacaugauuggaauggugggcggggcucagggaacccagccuggcagagauggcguugugcgggucugggacgugaaaaauccggaucuucugaacaaucaauucgggacaaugcccucccucacccuggccugucuuacgaagcagggacagguggaccugaacgaugucguucucgcucugaccgaccugggccucaucuacacagccaaguauccuaauagcucugaccuggaucgccuuucccaaagccaucccauucugaacaugguggacaccaaaaaguccucucucaauaucagcggguacaacuuuucccugggagcggccgugaaagcuggcgccugcaugcuugaugggggaaauaugcuggagacaaucaaggucaccccucagacgauggacggcauucucaaaagcauccugaaggugaaaaagucucugggcauguucguuuccgauacacccggggaaagaaacccuuaugagaacauucucuacaagaucugucugagcggagacggcuggccguauauugcuucucggaccagcaucguggggcgcgccugggaaaauacaaccgucgaucuugaguccgacggaaaaccccagaaggugggcaccgcggggucuaacaaaagccugcaguccgccggauuuccuacaggccucacguacagccaacugaugacccugaaggauucuaugaugcagcuugaccccuccgcuaaaacauggauugauaucgagggcagaccugaagaccccguugagaucgcccucuaccagccggugagcgggugcuauauucacuucuuucgggaaccuaccgaccugaagcaguucaagcaagaugcuaaauacucucauggaaucgacgucgccgaucuguuucccgcccagccuggccucacauccgcugugauugaggcgcugcccagaaauaugguccuuaccugucaggggagcgacgauaucaagcgccugcucgacucccagggacggagagauauuaaacugaucgacaucgcccugucuaaggcugauagccgccgguucgaaaacgccgugugggaccaaugcaaagaucuuugucacaugcauacgggcguuguggucgagaagaagaaaagagggggcaaggaggaaauuacaccccacugcgcccucauggacuguaucauguaugaugcugccguguccggaggccugaauauuccuguucugcgcgcggugcucccgcgggacauggucuuuagaaccucuagccccaaaguggugcugugaggacuaguaauaaggaaacuguaugaaugucugugggcaggaagugaagagauccuucuguaaagguuuuuggaauuaugucugcugaauaauaaacuuuuuugaaauaauaaaucugguagaaaaaugagaucuaaaaaaaaaaaaaaaaaaaaaaaaaaaaaaaaaaaaaaaaaaaaaaaaaaaaaaaaaaaaaaaaaaaaaaaaaaaaaaaaaaaaaaaaaaaaaaaaaaaa

SEQ ID NO: 19005 - RNA, 2085 nt, Artificial Sequence
  mRNA product Design b-4 (A100) comprising derived and/or modified sequence from LASV(LASV221-NIG-2010;Clade II)__AIT17625__SP-HsPLAT_NP(2-569) (opt5)
aggagagucccgcagucggcguccagcggcucugcuuguucgugugugugucguugcaggccuuauucaagcuuaccauggacgccaugaagagaggccugugcugugugcuccugcuuugcggggcugucuucguuagccccagcgccuccaaggaggugaaaucuuuccuguggacccagagccucagacgggaacuguccggcuacugcucuagcaucaaacuucaagucguuaaggacgcucaggcccugcuccacgggcuggauuuuuccgaggugucuaacgugcagcgccuuaugagaaagcagcggcgcgacgauagcgaccugaaaagacuccgggaucugaaucaagcggucaacaaucugguggaacucaaguccacacagcaaaagagcauucugcgcguuggaacgcuuaccucugacgaucugcucacacuggcugccgaccuugagaaacugaaguccaaagugaucagaaccgaacggccccucagcucuggcgucuauauggggaaccuguccacacagcagcuggagcagcgcagagcccuccugaauaugauuggaauggugggcggggcucagggaacccagccuggccgggauggcguugugcgcgucugggacgugaagaacccggaucuucugaauaaccaauucgggacaaugcccagccucacccuggccugucuuacgaaacagggacagguggaccugaaugaugcuguccucgcccugaccgaccugggccucaucuacacagcgaaguauccuaacucuuccgaccuggauagacuuagccaaucccaucccauucugaauaugguugacaccaagaaaucuagccucaacaucuccggguacaauuuuagccugggagccgcugugaaggccggcgcuugcaugcuugaugggggaaacaugcuggagacaaucaaagugaccccucagacggucgacggcauucucaagucuauccugaaagugaagcggucccugggcauguucguuagcgauacacccggggaacgcaauccuuaugagaacauucucuacaaaaucugucugucuggagacggcuggccguauauugccagcagaaccuccaucguggggcgggcgugggaaaacacaaccgucgaucuugagucugacggaaagccccagaaggugggcaccgccgggagcaauaaaucccugcagagcgcuggauuuccuacaggccucacguacucucaacugaugacccugaaggauuccaugaugcagcuugaccccagcgccaaaacauggauugauaucgagggcagaccugaagaccccguugagaucgcucucuaccagccgaugucugggugcuauauucacuucuuucgcgaaccuaccgaccugaagcaguucaaacaagaugccaaguacucccauggaaucgacguggccgaucuguuucccgcucagccuggccucacaagcgcggucauugaggcccugccccggaacauggugcuuaccugucagggguccgacgauaucaagagacugcucgacucucagggacgccgggauauuaaacugaucgacaucgcucugagcaaggccgauuccagaaaauucgaaaaugccgucugggaccaaugcaaggaucuuugucacaugcauacgggcgugguuguggagaaaaagaagcgcgggggcaaagaggaaauuacaccccacugcgcucucauggacuguaucauguaugaugccgcggucucuggaggccugaacauuccugugcugcgggcuguucucccgagagacaugguguuucgcaccagcucccccaaggucgugcugugaggacuaguaauaaggaaacuguaugaaugucugugggcaggaagugaagagauccuucuguaaagguuuuuggaauuaugucugcugaauaauaaacuuuuuugaaauaauaaaucugguagaaaaaugagaucuaaaaaaaaaaaaaaaaaaaaaaaaaaaaaaaaaaaaaaaaaaaaaaaaaaaaaaaaaaaaaaaaaaaaaaaaaaaaaaaaaaaaaaaaaaaaaaaaaaaa

SEQ ID NO: 19006 - RNA, 2085 nt, Artificial Sequence
  mRNA product Design b-4 (A100) comprising derived and/or modified sequence from LASV(LASV237-NIG-2010;Clade II)__AIT17639__SP-HsPLAT_NP(2-569) (opt5)
aggagagucccgcagucggcguccagcggcucugcuuguucgugugugugucguugcaggccuuauucaagcuuaccauggacgccaugaagagaggccugugcugugugcuccugcuuugcggggcugucuucguuagccccagcgccuccaaggaggugaaaucuuuccuguggacccagagccucagacgggaacuguccggcuacugcucuaacaucaaacuucaagucguuaaggacgcucaggcccugcuccacgggcuggauuuuagcgagguguccaaugugcagcgccuuaugagaaagcagaaacgggacgauucugaccugaagcgccucagagaucugaaccaagcggucaauaaccugguggaacucaagagcacacagcagaaauccauucugcggguuggaacgcuuaccagcgacgaucugcucacacuggcugccgaccuugagaagcugaaaucuaaggugauccgcaccgaaagaccccucuccagcggcgucuauauggggaaucugucuacacagcaacuggagcagcggcgcgcccuccugaacaugauuggaauggugggcggggcucagggaacccagccuggcagagauggcguugugcgggucugggacgugaaaaauccggaucuucugaacaaucaauucgggacaaugcccucccucacccuggccugucuuacgaagcagggacagguggaccugaacgaugcuguccucgcccugaccgaccugggccucaucuacacagcgaaguauccuaauagcucugaccuggaucgccuuucccaaagccaucccauucugaacaugguugacaucaaaaaguccucucucaauaucagcggguacaacuuuucccugggagccgcugugaaagccggcgcuugcaugcuugaugggggaaauaugcuggagaccauuaaggugacaccucagaccauggacggcauccucaaaagcauucugaaggucaaaagaucucugggcauguucguguccgauacgcccggggaacggaacccuuaugagaacauccucuacaagauuugucugagcggagacggcuggccguauaucgccucucgcacaagcauuguugggagagcgugggaaaauaccacaguggaucuugaguccgacggaaagccccagaaagucggcucugccgggagcaacaagucccugcagagcgcuggauuuccuaccggccucaccuacucucaacugaugacacugaaagauuccaugaugcagcuugaccccagcgccaagacguggaucgauaucgagggccggccugaagaccccguggagauugcucucuaccagccgaugucugggugcuauauccacuucuuuagagaaccuaccgaccugaaacaguucaagcaagaugccaaguacucccauggaauugacguugccgaucuguuucccgcucagccuggccucacaagcgcggugaucgaggcccugccccgcaauaugguccuuaccugucagggguccgacgauauuaaacggcugcucgacucucagggaagacgcgauaucaagcugaucgacauugcucugagcaaagccgauucccggagauucgaaaacgccgugugggaccaaugcaaggaucuuugucacaugcauacaggcgucgugguugagaaaaagaagcgcgggggcaaagaggaaaucacgccccacugcgcucucauggacuguauuauguaugaugccgcggugucuggaggccugaauaucccuguccugcgggcugugcucccgagagacaugguuuuucgcaccagcucccccaaggugguccugugaggacuaguaauaaggaaacuguaugaaugucugugggcaggaagugaagagauccuucuguaaagguuuuuggaauuaugucugcugaauaauaaacuuuuuugaaauaauaaaucugguagaaaaaugagaucuaaaaaaaaaaaaaaaaaaaaaaaaaaaaaaaaaaaaaaaaaaaaaaaaaaaaaaaaaaaaaaaaaaaaaaaaaaaaaaaaaaaaaaaaaaaaaaaaaaaa

SEQ ID NO: 19007 - RNA, 2085 nt, Artificial Sequence
  mRNA product Design b-4 (A100) comprising derived and/or modified sequence from LASV(LASV253-NIG-2011;Clade II)__AIT17671__SP-HsPLAT_NP(2-569) (opt5)
aggagagucccgcagucggcguccagcggcucugcuuguucgugugugugucguugcaggccuuauucaagcuuaccauggacgccaugaagagaggccugugcugugugcuccugcuuugcggggcugucuucguuagccccagcgccuccaaggaggugaaaucuuuccuguggacccagagccucagacgggaacuguccggcuacugcucuagcaucaaacuucaagucguuaaggacgcucaggcccugcuccacgggcuggauuuuuccgaggugucuaacgugcagcgccuuaugagaaagcagaaacgggacgauagcgaccugaagcgccucagagaucugaaucaagcggucaacaaucugguggaacucaaguccacccagcagaaaagcguucugcgggugggaacgcuuaccucugacgaucugcucacacuggcugccgaccuugagaagcugaaauccaaggucauucgcaccgaaagaccccucagcucuggcguguauauggggaaccuguccacacagcaacuggagcagcggcgcgcccuccugaauaugaucggaaugguuggcggggcucagggaacccagccuggcagagauggcgugguccgggugugggacgugaaaaacccggaucuucugaauaaccaauucgggacaaugcccagccucacccuggccugucuuacgaagcagggacaggucgaccugaaugauguugugcucgcucugaccgaccugggccucauuuacacagccaaguauccuaacucuuccgaccuggaucgccuuagccaaucccaucccauccugaauaugguggacaccaaaaagucuagccucaacauuuccggguacaauuuuagccugggagcggccgucaaagcuggcgccugcaugcuugaugggggaaacaugcuggagacaaucaaggugaccccucagacgauggacggcauccucaaaucuauucugaagguuaaaaagucccugggcauguucgugagcgauacacccggggaaagaaauccuuaugagaacauccucuacaagauuugucugucuggagacggcuggccguauaucgcuagccggaccuccauugucgggcgcgccugggaaaacacaaccguggaucuugagucugacggaaaaccccagaagguuggcaccgcggggagcaauaaaucccugcagagcgccggauuuccuacaggccucacguacucucaacugaugacccugaaggauuccaugaugcagcuugaccccagcgcuaaaacauggaucgauauugagggcagaccugaagaccccguggagaucgcccucuaccagccgaugucugggugcuauauccacuucuuucgggaaccuaccgaccugaagcaguucaagcaagaugcuaaauacucccauggaauugacgucacagaucuguuucccgcccagccuggccucaccagcgccgugaucgaggcucugcccagaaacaugguccuuacgugucagggguccgacgauauuaagcgccugcucgacucucagggacggagagauaucaaacugauugacaucgcgcugagcaaggccgauucccgccgguucgaaaaugcugugugggaccaaugcaaagaucuuugucacaugcauacaggcguuguggucgagaagaagaaaagagggggcaaggaggaaaucacaccccacugcgcccucauggacuguauuauguaugaugccgcugugucuggaggccugaacaucccuguucugcgcgccgugcucccgcgggacauggucuuuagaaccagcucccccaaaguggugcugugaggacuaguaauaaggaaacuguaugaaugucugugggcaggaagugaagagauccuucuguaaagguuuuuggaauuaugucugcugaauaauaaacuuuuuugaaauaauaaaucugguagaaaaaugagaucuaaaaaaaaaaaaaaaaaaaaaaaaaaaaaaaaaaaaaaaaaaaaaaaaaaaaaaaaaaaaaaaaaaaaaaaaaaaaaaaaaaaaaaaaaaaaaaaaaaaa

SEQ ID NO: 19008 - RNA, 2085 nt, Artificial Sequence
  mRNA product Design b-4 (A100) comprising derived and/or modified sequence from LASV(LASV254-NIG-2011;Clade II)__AIT17675__SP-HsPLAT_NP(2-569) (opt5)
aggagagucccgcagucggcguccagcggcucugcuuguucgugugugugucguugcaggccuuauucaagcuuaccauggacgccaugaagagaggccugugcugugugcuccugcuuugcggggcugucuucguuagccccagcgccuccaaggaggugaaaucuuuccuguggacccagagccucagacgggaacuguccggcuacugcucuagcaucaaacuucaagucguuaaggacgcucaggcccugcuccacgggcuggauuuuuccgaggugucuaacgugcagcgccuuaugagaaagcagaaacgggacgauagcgaccugaagcgccucagagaucugaaucaagcggucaacaaucugguggaacucaaguccacacagcagaaaagcguucugcgggugggaacgcuuaccucugacgaucugcucacacuggcugccgaccuugagaagcugaaauccaaggucauucgcaccgaaagaccccucagcucuggcguguauauggggaaccuguccacacagcaacuggagcagcggcgcgcccuccugaauaugaucggaaugguuggcggggcucagggaacccagccuggcagagauggcgugguccgggugugggacgugaaaaacccggaucuucugaauaaccaauucgggacaaugcccagccucacccuggccugucuuacgaagcagggacaggucgaccugaaugaugcuguucucgcccugaccgaccugggccucauuuacacagcgaaguauccuaacucuuccgaccuggaucgccuuagccaaucccaucccauccugaauaugguggacaccaaaaagucuagccucaacauuuccggguacaauuuuagccugggagccgcugugaaagccggcgcuugcaugcuugaugggggaaacaugcuggagacaaucaaggucaccccucagacgauggacggcauccucaaaucuauucugaaggugaaaaagucccugggcauguucguuagcgauacacccggggaaagaaauccuuaugagaacauccucuacaagauuugucugucuggagacggcuggccguauaucgccagccggaccuccauuguggggcgcgcgugggaaaacacaaucgucgaucuugagucugacggaaaaccccagaaggugggcaccgccgggagcaauaaaucccugcagagcgcuggauuuccuaccggccucacauacucucaacugaugacgcugaaggauuccaugaugcagcuugaccccagcgccaaaaccuggauugauaucgagggcagaccugaagaccccguugagaucgcucucuaccagccgaugucugggugcuauauucacuucuuucgggaaccuacagaccugaagcaguucaagcaagaugccaaauacucccauggaaucgacguggccgaucuguuucccgcucagccuggccucaccagcgcggucauugaggcccugcccagaaacauggugcuuacaugucagggguccgacgauaucaagcgccugcucgacucucagggacggagagauauuaaacugaucgacaucgcucugagcaaggccgauucccgccgguucgaaaaugccgucugggaccaaugcaaagaucuuugucacaugcauaccggcgugguuguggagaagaagaaaagagggggcaaggaggaaauuacgccccacugcgcucucauggacuguaucauguaugaugccgcggucucuggaggccugaacauuccugugcugcgcgcuguucucccgcgggacaugguguuuagaacaagcucccccaaagucgugcugugaggacuaguaauaaggaaacuguaugaaugucugugggcaggaagugaagagauccuucuguaaagguuuuuggaauuaugucugcugaauaauaaacuuuuuugaaauaauaaaucugguagaaaaaugagaucuaaaaaaaaaaaaaaaaaaaaaaaaaaaaaaaaaaaaaaaaaaaaaaaaaaaaaaaaaaaaaaaaaaaaaaaaaaaaaaaaaaaaaaaaaaaaaaaaaaaa

SEQ ID NO: 19009 - RNA, 2085 nt, Artificial Sequence
  mRNA product Design b-4 (A100) comprising derived and/or modified sequence from LASV(Nig08-04;Clade II)__ADU56611__SP-HsPLAT_NP(2-569) (opt5)
aggagagucccgcagucggcguccagcggcucugcuuguucgugugugugucguugcaggccuuauucaagcuuaccauggacgccaugaagagaggccugugcugugugcuccugcuuugcggggcugucuucguuagccccagcgccuccaaggaggugaaaucuuuccuguggacccagagccucagacgggaacuguccggcuacugcucuaacaucaaacuucaagucguuaaggacgcucaggcccugcuccacgggcuggauuuuagcgagguguccaaugugcagcgccuuaugagaaagcagaaacgggacgauggagaccugaagcgccucagagaucugaaccaagcggucaauaaccugguggaacucaagucuacccagcagaaaagcguucugcgggugggcacgcuuaccuccgacgaucugcucacacuggcugccgaccuugagaagcugaaaagcaaggucauucgcaccgaaagaccccucucuuccgggguguauaugggaaaucugagcacacagcaacuggagcagcggaaagcccuccugucuaugaucggcaugguugggggagcucagggcacccagccuggccgcgaugggguggucagagugugggacgugaagaacccggaucuucugaauaaccaauucggaacaaugcccucccucacccuggccugucuuacgaagcagggccaggucgaccugaaugaugcuguucucgcccugaccgaccuggggcucauuuacacagcgaaauauccuaacagcucugaccuggaucggcuuucccaaagccaucccauccugaauaugguggacaccaagaaauccucucucaacauuagcggauacaauuuuucccugggcgccgcugugaaggccggggcuugcaugcuugauggaggcaacaugcuggagacaaucaaagucaccccucagacgauggacggcauccucaagagcauucugaaagugaagcgcucucuggggauguucguuuccgauacacccggagaaagaaauccuuaugagaacauccucuacaagauuugucugagcggcgacggguggccguauaucgccucucggaccagcauugugggacgcgcgugggaaaacacaaccgucgaucuugaguccgacggcaaaccccagaagguggggaccgccggaucuaauaaaagccugcaguccgcuggcuuuccuacaggccucacguacagccaacugaugacccugaaggauucuaugaugcagcuugaccccuccgccaaaacauggaucgauauugaggggagaccugaagaccccguugagaucgcucucuaccagccgaugagcggaugcuauauccacuucuuucgggaaccuaccgaccugaagcaguucaagcaagaugccaaauacucucauggcauugacgugacagaucuguuuuccgcccagcccgggcucaccagcgcugucaucgaggcgcugccuagaaacauggugcuuacgugucagggauccgacgauauuaagaaacugcucgacucucagggccgccgggauaucaagcugauugacaucagccugaauaaagccgauuccagacgcuucgaaaacgcugucugggaccaaugcaaggaucuuugucacaugcauacaggggugguuguggagaagaaaaagcggggcggaaaagaggaaaucacaccccacugcgcccucauggacuguauuauguuugaugccgcugucucuggcgggcugaauauccccauucugagagccgugcucccucgcgacaugguuuuccggaccagcuccccgaaggugguccugugaggacuaguaauaaggaaacuguaugaaugucugugggcaggaagugaagagauccuucuguaaagguuuuuggaauuaugucugcugaauaauaaacuuuuuugaaauaauaaaucugguagaaaaaugagaucuaaaaaaaaaaaaaaaaaaaaaaaaaaaaaaaaaaaaaaaaaaaaaaaaaaaaaaaaaaaaaaaaaaaaaaaaaaaaaaaaaaaaaaaaaaaaaaaaaaaa

SEQ ID NO: 19010 - RNA, 2088 nt, Artificial Sequence
  mRNA product Design b-4 (A100) comprising derived and/or modified sequence from LASV(GA391;Clade III)__AAA46284__SP-HsPLAT_NP(2-570) (opt5)
aggagagucccgcagucggcguccagcggcucugcuuguucgugugugugucguugcaggccuuauucaagcuuaccauggacgccaugaagagaggccugugcugugugcuccugcuuugcggggcugucuucguuagccccagcgccuccaaggaggugagaucuugccuguggacccagagccuccggcgcgaacuguccggcuacuguucuaacaucaaacuucaagucguuaaggacgcucaggcccugcuccacgggcuggauuucagcgagguguccaaugugcagagacuuaugcggaaacagaagcgcgacgauggagaccugaaaagacuccgggaucugaaccaagcggucaauaaccugguggaacucaagucuacacagcagaaaagcguucugcgcgugggcacgcuuuccagcgacgaucugcucauucuggcugccgaccuugagaaacugaagucuaaagucaccagaacagaacggccccucuccagcgggguguauaugggaaaucugucuucccagcaacuggaucagcgcagagcccuccugaacaugaucggcaugaccgggguuagcggaggcggcaagggggcuucuaauggaauugugcgggucugggacgugaaaaacgccgagcuucugaauaaccaguuuggcacaaugccuucccucacccuggcuugccuuacaaagcaggggcaaguggaucugaaugacgccguccaggcgcucaccgaucugggacugaucuacacggccaaguauccgaacagcuccgaccucgaccgccugucucagagccaucccauucuuaauaugaucgauaccaaaaaguccagccugaacaucucuggcuacaauuucucccucggggcugccguuaaagcuggagccuguaugcuggacggcggcaacaugcuugagacaauuaaggugagcccucaaaccauggaugggauccugaaaucuauucucaaggugaaaaagagccugggaauguuugucuccgacacacccggcgaaagaaacccuuaugagaauauccuguacaagauuugccucucuggggauggauggagcuauaucgcgucccggaccagcauugugggccgcgccugggaaaacacgguuguggaccuggagcaggauaauaaaccccagaagaucgggaacggaggcucuaauaaaucccuucagagcgcuggcuucgccgcugggcugaucuacucucaacucaugacacugaaggacuuuaaauguuucaaccugauuccuaaugccaagaccuggauggauaucgagggaagaccggaagaccccgucgagauugcccuuuaccagccuuccagcggcugcuaugugcacuuuuuccgggaacccacagaucucaagcaguuuaaacaggacgcuaaguacucccaugggagagacguuaccgaucuguucgcggcccaaccuggacugaccucugcugugaucgaggcccucccccgcaacauggucauuacaugucagggcagcgaagacauccggaaacugcuugagucccaggggagacgcgauaucaagcugauugacaucacgcucucuaaagccgauagccggaaguuugagaaugcugugugggaccaguucaaggaucugugccacaugcauaccggcgucgugguugaaaagaagaaaagaggaggcaaggaggaaauuacaccgcacugugcccugauggacugcaucauguuugaugcggcuguguccgggggacuugacgccaaaguccuccgcgugguucugccucgggauaugguguucagaaccagcacacccaaggucgugcugugaggacuaguaauaaggaaacuguaugaaugucugugggcaggaagugaagagauccuucuguaaagguuuuuggaauuaugucugcugaauaauaaacuuuuuugaaauaauaaaucugguagaaaaaugagaucuaaaaaaaaaaaaaaaaaaaaaaaaaaaaaaaaaaaaaaaaaaaaaaaaaaaaaaaaaaaaaaaaaaaaaaaaaaaaaaaaaaaaaaaaaaaaaaaaaaaa

SEQ ID NO: 19011 - RNA, 2085 nt, Artificial Sequence
  mRNA product Design b-4 (A100) comprising derived and/or modified sequence from LASV(Nig08-A19;Clade III)__ADU56619__SP-HsPLAT_NP(2-569) (opt5)
aggagagucccgcagucggcguccagcggcucugcuuguucgugugugugucguugcaggccuuauucaagcuuaccauggacgccaugaagagaggccugugcugugugcuccugcuuugcggggcugucuucguuagccccagcgccuccaaggaggugaaaucuuuccuguggacccagagccucagacgggaacuguccggcuacugcucuaacaucaaacuucaagucguuaaggacgcucaggcccugcuccacgggcuggauuuuagcgagguguccaaugugcagcgccuuaugagaaagcagaaacgggacgauggagaccugaagcgccucagagaucugaaccaagcggucaauaaccugguggaacucaagucuacacagcagaaaagcguucugcgggugggcacgcuuuccagcgacgaucugcucguccuggcugccgaccuugagaagcugaaaucuaaggugguucgcaccgaaagaccccucuccagcgggauuuauaugggaaaucugucuucccagcaacuggaucagcggaaagcccuccugaacaugaucggcaugacagggggaaauggcggccgcaacaccacaagcgacgggauugugagagucugggaugugaagaaugcugagcuucugaacaaucaguucggaaccaugccuucucucacacuggccugucuuaccaagcagggccaaguggaccugaacgaugcuguccaggcccucacggaccuggggcugaucuacaccgcgaaauaucccaauuccagcgaccucgaucggcuggcccagucccauccgauucuuaacaugaucgacacaaagaaaucuagccugaauaucuccggauacaacuuuagccucggcgcugccguuaaggcuggggccugcaugcuggauggaggcaacaugcuugagaccauuaaagugucuccucaaacaauggacggcauccugaaguccauucucaaagugaagcgcagccuggggauguucaucucugauacccccggagaaagaaauccuuaugagaacauucuguacaagaucugucucagcggcgacggguggcccuauauugcgucccggacgucuaucgucggacgcgccugggaaaauacagugguugaucuggagagcgacaacaaaccucagaagaccggcaaugggggauccaacaaaagccuucagucugcuggcuuugccgcuggccugacauacucccagcucaugacccugaaggauagcaugcugcaacuugacccgaaugccaaaaccuggauggauaucgaggggagacccgaagacccuguggagauugcccucuaccagcccucuuccggaugcuauauccacuucuuucgggaaccuacagaccugaagcaguucaagcaggaugcuaaauacagccauggcauugacgucacggaucuguuugcggcccaacccgggcucaccuccgcugugaucgaggcccugccgagaaacaugguuauuacaugucagggaucugaagacauccgcaaacuucuggagagccagggccggagagauaucaagcucauugacaucucccugucuaagguggauagccgcaaauucgagaaugccgucugggaccaguuuaaggaucugugccacaugcauaccgggauuguggucgaaaagaaaaagcggggcggaaaagaggaaaucacaccucacugugcucuuauggacugcauuauguucgaugccgcgguguccggcgggguugacgcuaaggugcucagagccguccugccccgcgauaugguguuucggaccagcacgccuaaaguugugcugugaggacuaguaauaaggaaacuguaugaaugucugugggcaggaagugaagagauccuucuguaaagguuuuuggaauuaugucugcugaauaauaaacuuuuuugaaauaauaaaucugguagaaaaaugagaucuaaaaaaaaaaaaaaaaaaaaaaaaaaaaaaaaaaaaaaaaaaaaaaaaaaaaaaaaaaaaaaaaaaaaaaaaaaaaaaaaaaaaaaaaaaaaaaaaaaaa

SEQ ID NO: 19012 - RNA, 2085 nt, Artificial Sequence
  mRNA product Design b-4 (A100) comprising derived and/or modified sequence from LASV(G1180-SLE-2010;Clade IV)__AIT17169__SP-HsPLAT_NP(2-569) (opt5)
aggagagucccgcagucggcguccagcggcucugcuuguucgugugugugucguugcaggccuuauucaagcuuaccauggacgccaugaagagaggccugugcugugugcuccugcuuugcggggcugucuucguuagccccagcgccuccaaggagaucaaaucuuuccuguggacccagagccucagacgggaacuguccggcuacugcucuaacauuaagcugcaaguggucaaagacgcucaggcccugcuccacgggcuggauuuuagcgagguuuccaaugugcagcgccuuaugagaaaggaacggcgcgacgauaacgaccugaaaagacuccgggaucugaaucaggcggugaacaaucuggucgagcucaagucuacacaacaaaagagcauccugcgcgugggaacgcuuaccuccgacgaucugcucauucuggcugccgaccuugaaaaacuuaagagcaaaguuaucagaacagagcggccccucucugccggcguguauauggggaaccuguccagccagcagcuggaucagcgcagagcucuccugucuaugauuggaauguccagcggcaaucagcgggcccaggcugggcgcgacggagucgugagaguuugggaugugaagaacgucgagcuucugaauaaccaguucggcaccaugccuucucucacacuggccugucuuaccaaacaaggccagguggaccugaaugaugcggugcaggcccucacagaccuggggcugaucuacaccgcuaaguauccgaacacguccgaccucgaucggcugacccaaagccaucccauccuuaauaugauugacacaaagaaauccucucugaacaucagcggauacaauuuuucccucggcgccgcugucaaggccggggcgugcaugcuggauggaggcaacaugcuugaaaccauuaaaguuagcccucagacaauggacgggauccugaagucuauucucaaagugaagaaagcccugggaauguucaucuccgauacccccggcgagcgcaacccuuaugaaaauauucuguacaagaucugucucagcggcgacggguggcccuauaucgcuucuagaacgagcauuacaggacgggccugggagaacaccguggucgaucuggaguccgacggcaagccucagaaagcugggucuaauaacagcaauaagucccuucagagcgugggauuuacagccggccugaccuacucucaacucaugacccugaaagaugccaugcugcagcuugacccgaacgcuaagacauggauggauaucgaagggagacccgaggacccuguugaaauugcgcucuaccagcccuccagcggaugcuauauccacuucuuucgcgagccuacggaccugaaacaguucaagcaagaugccaaguacucucauggcauugacgugaccgaucuguuugcugcccagcccggccucacauccgccgucaucgacgcucugccgcggaauauggugaucaccugucaggggagcgaugacauuagaaaacuucuggaaucccagggacgcaaggauaucaaacucauugacaucgcccugucuaagacagauagccggaaauaugagaacgcgguuugggaccaauacaaggaucugugccacaugcauaccggcguggucguggagaagaaaaagagagggggaaaagaagagauuacgccucacugugcucuuauggacugcaucauguucgaugccgccgucuccggcgggcucaauacaucugugcugcgcgcuguucugccccgggacaugguguuuagaaccagcaccccucgcgucgugcucugaggacuaguaauaaggaaacuguaugaaugucugugggcaggaagugaagagauccuucuguaaagguuuuuggaauuaugucugcugaauaauaaacuuuuuugaaauaauaaaucugguagaaaaaugagaucuaaaaaaaaaaaaaaaaaaaaaaaaaaaaaaaaaaaaaaaaaaaaaaaaaaaaaaaaaaaaaaaaaaaaaaaaaaaaaaaaaaaaaaaaaaaaaaaaaaaa

SEQ ID NO: 19013 - RNA, 2085 nt, Artificial Sequence
  mRNA product Design b-4 (A100) comprising derived and/or modified sequence from LASV(G1442-SLE-2011;Clade IV)__AIT17181__SP-HsPLAT_NP(2-569) (opt5)
aggagagucccgcagucggcguccagcggcucugcuuguucgugugugugucguugcaggccuuauucaagcuuaccauggacgccaugaagagaggccugugcugugugcuccugcuuugcggggcugucuucguuagccccagcgccuccaaggaggugaaaucuuuccuguggacccagagccucagacgggaacuguccggcuacugcucuaacaucaaacuucaagucguuaaggacgcucaggcccugcuccacgggcuggauuuuagcgagguguccaaugugcagcgccuuaugagaaagcagcggcgcgacgauaacgaccugaaaagacuccgggaucugaaucaagcggucaacaaucugguggaacucaagucuacacagcaaaagagcguucugcgcgugggaacgcuuaccuccgacgaucugcucguccuggcugccgaccuugagaaacuuaagagcaaagugauuagaacagaacggccccucucugccggcguuuauauggggaaccuguccagccagcagcuggaucagcgcagagcucuccugaauaugaucggaaugucuggcgggauucagggaacccggacaggccgcgacggcguggucagagugugggaugugaagaacgccgaccuucugaauaaccaguucgggaccaugccuucccucacacuggcuugucuuaccaaacaaggacaggucgaucugaaugacguugugcaggcccucacggaccugggccugaucuacaccgcgaaguauccgaacgccagcgaucucgaccggcugacacaaucucaucccauucuuaauaugaucgauaccaagaaauccagccugaacaucuccggguacaauuuuucucucggagcugccgugaaggcuggcgccugcaugcuggacgggggaaacaugcuugagacaauuaaagucagcccucagaccauggauggcauccugaaguccauucucaaagugaagaaaacgcugggcauguucaucagcgacacacccggggagcgcaacccuuaugaaaauauucuguacaagaucugucucucuggagauggcuggcccuauauugcguccagaaccagcaucacagggcgggccugggagaacaccguuguggaccuggaaucugauggaaagccucagaaagcuggcagcaauaacuccaauaagucucuucagagcgccggguuugcugccggacugaccuacucccaacucaugacacugaaagacgccaugcugcagcuugauccgaacgcuaagacguggauggacaucgagggcagacccgaggacccugucgaaauugcgcucuaccagcccagcucuggcugcuauauccacuucuuucgcgagccuaccgaucugaaacaguucaagcaagacgccaaguacucccaugggauugaugugacagaccuguuugcugcccagcccggacucaccagcgccguuaucgaagcucugccgcggaauauggugauuacaugucagggcucugaugacaucaaaaagcugcuggagucccaggggagaaaagauaucaagcucauugacaucgcccugagcaaaaccgauucccgcaaguaugaaaacgcggucugggaccaauacaaggaucugugccacaugcauacgggaguggucguggagaaaaagaaacggggcgggaaggaggaaauuacaccucacugugcucuuauggacugcaucauguucgaugccgccguuucuggcggacucaauacccuggugcugagagcuguccucccccgcgacaugguguuucggaccagcacaccuagaguugugcugugaggacuaguaauaaggaaacuguaugaaugucugugggcaggaagugaagagauccuucuguaaagguuuuuggaauuaugucugcugaauaauaaacuuuuuugaaauaauaaaucugguagaaaaaugagaucuaaaaaaaaaaaaaaaaaaaaaaaaaaaaaaaaaaaaaaaaaaaaaaaaaaaaaaaaaaaaaaaaaaaaaaaaaaaaaaaaaaaaaaaaaaaaaaaaaaaa

SEQ ID NO: 19014 - RNA, 2085 nt, Artificial Sequence
  mRNA product Design b-4 (A100) comprising derived and/or modified sequence from LASV(G3010-SLE-2013;Clade IV)__AIT17345__SP-HsPLAT_NP(2-569) (opt5)
aggagagucccgcagucggcguccagcggcucugcuuguucgugugugugucguugcaggccuuauucaagcuuaccauggacgccaugaagagaggccugugcugugugcuccugcuuugcggggcugucuucguuagccccagcgccuccaaggagaucaaaucuuuccuguggacccagagccucagacgggaacuguccggcuacugcucuaacauuaaacuucaaguggucaaagacgcucaggcccugcuccacgggcuggauuuuagcgagguuuccaaugugcagcgccuuaugagaaaggaacggcgcgacgauaacgaccugaaaagacuccgggaucugaaucaggcggugaacaaucuggucgagcucaagucuacacaacaaaagagcauccugcgcgugggaacgcuuaccuccgacgaucugcucauucuggcugccgaccuugaaaaacuuaagagcaaaguuacaagaaccgagcggccccucucugccggcguguauauggggaaccuguccagccagcagcuggaucagcgcagagcucuccugucuaugaucggaauguccagcggcguccagggggcccgggcuggacgcgacggcgugguuagagugugggaugucaagaaugccgagcuucugaacaaucaguucggcacaaugccuucucucacccuggcgugucuuacaaaacaggggcaaguggaccugaacgaugugguccaggcccucaccgaccugggacugauuuacacggcuaaguauccgaauaccuccgaccucgaucggcugacacagagccaucccauccuuaacaugaucgacaccaagaaauccucucugaauauuagcggcuacaacuuuucccucggggccgcuguuaaggccggagcgugcaugcuggauggcgggaauaugcuugaaacaaucaaagugagcccucaaaccauggacggcauucugaagucuauccucaaagugaagaaagcccugggaauguucauuuccgagacgcccggcgaacgcaacccuuaugagaacauccuguacaagauuugucucagcggggauggauggcccuauaucgcuucuagaacaagcaucaccggccgggccugggagaauacagucguggaccuggaauccgaugggaagccucagaaagcuggaucuaacaauagcaacaagucccuucagagcgccggcuuuaccgccgggcugaccuacucucagcucaugacacugaaagacgcuaugcugcaacuugauccgaaugcgaagacguggauggacauugagggaagacccgaagauccuguugagguggcccucuaccagcccuccagcggcugcuauauccacuucuuucgcgaaccuaccgaccugaaacaguucaagcaggacgcuaaguacucucauggcauugaugucacagaccuguuugccgcccaacccgggcucaccuccgcugugaucgaugcccugccgcggaacaugguuauuacaugucagggaagcgacgauaucaaaaagcugcuggagucccagggcagaaaagacaucaagcucauugauaucgcgcugucuaaaaccgacagccgcaaguaugagaaugcugugugggaucaguacaaggaccugugccacaugcauacgggggucguggucgaaaagaagaaacggggaggcaaggaggaaauuacaccucacugugcccuuauggauugcaucauguucgacgccgcuguguccgggggccucaacaccucuguucugagagccgugcugccccgcgauauggucuuucggaccagcacaccuagagugguucucugaggacuaguaauaaggaaacuguaugaaugucugugggcaggaagugaagagauccuucuguaaagguuuuuggaauuaugucugcugaauaauaaacuuuuuugaaauaauaaaucugguagaaaaaugagaucuaaaaaaaaaaaaaaaaaaaaaaaaaaaaaaaaaaaaaaaaaaaaaaaaaaaaaaaaaaaaaaaaaaaaaaaaaaaaaaaaaaaaaaaaaaaaaaaaaaaa

SEQ ID NO: 19015 - RNA, 2085 nt, Artificial Sequence
  mRNA product Design b-4 (A100) comprising derived and/or modified sequence from LASV(G502-SLE-2009;Clade IV)__AIT17127__SP-HsPLAT_NP(2-569) (opt5)
aggagagucccgcagucggcguccagcggcucugcuuguucgugugugugucguugcaggccuuauucaagcuuaccauggacgccaugaagagaggccugugcugugugcuccugcuuugcggggcugucuucguuagccccagcgccuccaaggagaucaaaucuuuccuguggacccagagccucagacgggaacuguccggcuacugcucuaacauuaagcugcaaguggucaaagacgcucaggcccugcuccacgggcuggauuuuagcgagguuuccaaugugcagcgccuuaugagaaaggaacggcgcgacgauaacgaccugaaaagacuccgggaucugaaucaggcggugaacaaucuggucgagcucaagucuacacaacaaaagagcauccugcgcgugggaacgcuuaccuccgacgaucugcucauucuggcugccgaccuugaaaaacuuaagagcaaaguuaucagaacagagcggccccucucugccggcguguauauggggaaccuguccagccagcagcuggaucagcgcagagcucuccugucuaugauuggaauguccggcgggaaucagggaguccgggccggcaaggacggcgugguucgcgugugggaugucaaaaacgcugagcuucugaauaaccaguucgggaccaugccuagccucacacuggccugucuuaccaagcagggacaaguggaccugaaugaugcggugcaggcccucacagaccugggccugaucuacaccgcuaaguauccgaacacgucugaccucgauagacugacccagucccaucccauccuuaauaugauugacaccaaaaagagcucccugaacaucucuggguacaauuuuagccucggagccgcugucaaagccggcgcgugcaugcuggaugggggaaacaugcuugaaacaauuaagguuuccccucaaacaauggacggcauccugaaaagcauucucaaggugaaaaaggcccugggcauguucaucucugauacccccggggagcggaacccuuaugaaaauauucuguacaagaucugucucuccggagacggcuggcccuauaucgcuagccgcacgucuauuacagggagagccugggagaacaccguggucgaucuggagagcgacggaaaaccucagaaggcuggcuccaauaacucuaauaaaagccuucaguccgccggguuuacagccggacugaccuacagccagcucaugacccugaaggaugcuaugcugcaacuugacccgaacacaaaaacguggauggauaucgaaggccggcccgaggacccuguggaaauugcgcucuaccagcccucuuccggcugcuauauccacuucuuuagagagccuaccgaccugaagcaguucaagcaggaugccaaauacagccaugggauugacguuacagaucuguuugcugcccaacccggacucaccucugccgugaucgacgcucugccgcgcaauauggucaucacaugucagggcuccgaugacauucggaaacuucuggaaagccaggggagaaaggauaucaagcucauugacaucgcccugaacaaaaccgauucccgcaaguaugagaaugcggugugggaccaguacaaggaucugugccacaugcauacgggaguuguggucgagaaaaagaaacggggcgggaaggaagagauuacaccucacugugcucuuauggacugcaucauguucgaugccgccgugucuggcggacucaacaccagcguccugagagcugugcugccccgcgacaugguuuuucggaccuccacaccuagagugguccucugaggacuaguaauaaggaaacuguaugaaugucugugggcaggaagugaagagauccuucuguaaagguuuuuggaauuaugucugcugaauaauaaacuuuuuugaaauaauaaaucugguagaaaaaugagaucuaaaaaaaaaaaaaaaaaaaaaaaaaaaaaaaaaaaaaaaaaaaaaaaaaaaaaaaaaaaaaaaaaaaaaaaaaaaaaaaaaaaaaaaaaaaaaaaaaaaa

SEQ ID NO: 19016 - RNA, 2085 nt, Artificial Sequence
  mRNA product Design b-4 (A100) comprising derived and/or modified sequence from LASV(G733-SLE-2010;Clade IV)__AIT17155__SP-HsPLAT_NP(2-569) (opt5)
aggagagucccgcagucggcguccagcggcucugcuuguucgugugugugucguugcaggccuuauucaagcuuaccauggacgccaugaagagaggccugugcugugugcuccugcuuugcggggcugucuucguuagccccagcgccuccaaggagaucaaaucuuuccuguggacccagagccucagacgggaacuguccggcuacugcucuaacauuaagcugcaaguggucaaagacgcucaggcccugcuccacgggcuggauuuuagcgagguuuccaaugugcagcgccuuaugagaaaggaacggcgcgacgauaacgaccugaaaagacuccgggaucugaaucaggcggugaacaaucuggucgagcucaagucuacacaacaaaagagcgugcugcgcguuggaacgcuuaccuccgacgaacugcucgugcuggcugccgaucuugagaaacuuaagagcaaagucaucagaacagagcggccccucucugccggcguguauauggggaaccuguccagccagcagcuggaccagcgcagagcucuccugucuaugauuggaauguccggcgggaaucagggagcccggaccggccgcgauggcguugugagagucugggacgugaagaacgcugaacuucugaauaaccaguucgggacaaugccuagccucacccuggccugucuuacaaaacagggacaaguggaucugaaugacgcgguccaggcccucaccgaucugggccugaucuacacggcuaaguauccgaacaccucugaccucgaccggcugacacagucccaucccauucuuaauaugaucgauaccaagaaaagcucccugaacaucucuggguacaauuuuagccucggagccgcuguuaaggccggcgcgugcaugcuggacgggggaaacaugcuugagacaauuaaaguguccccucaaaccauggauggcauccucaagagcauucugaaagugaagaaagcccugggcauguucaucucugacacgcccggggaacgcaacccuuaugagaauauucuguacaagaucugucucuccggagauggcuggcccuauauugcuagcagaacaucuaucaccgggcgggccugggagaacacagucguggaccuggaaagcgauggaaagccucagaaagcuggcuccaauaacucuaauaagagccuucaguccgccggguuuaccgccggacugaccuacagccagcucaugacacugaaagacgcuaugcugcaacuugauccgaacgcgaagacguggauggacaucgagggcagacccgaagauccuguugagauugcccucuaccagcccucuuccggcugcuauauccacuucuuucgcgaaccuaccgaccugaaacaguucaagcaggacgcuaaguacagccaugggauugaugugacagaccuguuugccgcccaacccggacucaccucugcugucaucgaugcccugccgcggaauauggugauuacaugucagggcuccgacgauaucagaaaacuucuggagagccaggggcgcaaggacaucaaacucauugauaucgcgcuguccaagauugacucucggaaauaugagaacgcuguuugggaucaguacaaggaccugugccacaugcauaccggaguggucguggaaaagaaaaagagaggcgggaaagaggaaaucacgccucacugugcccuuauggauugcauuauguucgacgccgcugucagcggcggacucaauucccuggugcugcgcgccguucucccccgggauaugguguuuagaacaucuaccccucgcgucgugcugugaggacuaguaauaaggaaacuguaugaaugucugugggcaggaagugaagagauccuucuguaaagguuuuuggaauuaugucugcugaauaauaaacuuuuuugaaauaauaaaucugguagaaaaaugagaucuaaaaaaaaaaaaaaaaaaaaaaaaaaaaaaaaaaaaaaaaaaaaaaaaaaaaaaaaaaaaaaaaaaaaaaaaaaaaaaaaaaaaaaaaaaaaaaaaaaaa

SEQ ID NO: 19017 - RNA, 2085 nt, Artificial Sequence
  mRNA product Design b-4 (A100) comprising derived and/or modified sequence from MOPV/LASV reassortant(IGS-1;Clade IV)__AFY05578__SP-HsPLAT_NP(2-569) (opt5)
aggagagucccgcagucggcguccagcggcucugcuuguucgugugugugucguugcaggccuuauucaagcuuaccauggacgccaugaagagaggccugugcugugugcuccugcuuugcggggcugucuucguuagccccagcgccuccaaggagaucaaaucuuuccuguggacccagagccucagacgggaacuguccggcuacugcucuaacauuaaacuucaaguggucaaggacgcucaggcccugcuccacgggcuggauuuuagcgagguuuccaaugugcagcgccuuaugagaaaggaacggcgcgacgauaacgaccugaaaagacuccgggaucugaaucaggcggugaacaaucuggucgagcucaagucuacacaacaaaagagcauccugcgcgugggaacgcuuaccuccgacgaucugcucauucuggcugccgaccuugaaaaacugagaagcaagguuauccggacagagcgcccccucucugccggcguguauauggggaaccuguccagccagcagcuggaucagagacgggcucuccugaauaugauuggaaugucuggcgggaaccagggagcccgcgcuggcagagacggcgucgugcggguuugggaugugaaaaaugccgagcuucuguccaaccaguucgggaccaugccuagccucacacuggcgugucuuaccaagcagggacaagucgaccugaaugaugccgugcaggcucucacagaccugggccugaucuacaccgccaaauauccgaacacgucugaccucgaucgccugacccagucccaucccauccuuaauaugauugacacaaagaaaagcucccugaacaucucuggguacaauuuuagccucggagcugccgugaaggcgggcgccugcaugcuggaugggggaaacaugcuugaaaccauuaaggucuccccucaaacaauggacggcauccugaaaagcauucucaagguuaaaaaggcucugggcauguucaucucugauacccccggggagagaaacccuuaugaaaauauucuguacaaaaucugucucuccggagacggcuggcccuauaucgccagccggacgucuauuacagggagagcuugggagaacaccgugguggaucuggagagcgacggaaagccucagaaggccgauuccaauaacucuagcaaaucccuucagagcgccggcuuuacagcugggcugaccuacucucagcucaugacccugaaggacgcgaugcugcaacuugauccgaaugccaaaacauggauggacaucgaaggacgccccgaggacccugucgaaauugcucucuaccagcccuccagcggcugcuauauccacuucuuucgggagccuacggaucugaagcaguucaaacaggacgccaaguacucucauggcauugaugugaccgaccuguuugccacacaacccgggcucaccuccgcuguuaucgaugcccugccgagaaacauggugaucacaugucagggaagcgacgauauucgcaaacuucuggaaucccagggccggaaggacaucaagcucauugauaucgaccugucuaaaaccgauagcagaaaguaugagaaugcggucugggaccaguacaaagaucugugccacaugcauacgggggugguuguggagaagaagaaacgcggaggcaaggaagagauuacaccucacugugcucuuauggacugcaucauguucgacgccgccgucuccgggggccucaacaccucugugcugcgggcuguccugcccagagauaugguguuucgcaccagcacaccucggguugugcucugaggacuaguaauaaggaaacuguaugaaugucugugggcaggaagugaagagauccuucuguaaagguuuuuggaauuaugucugcugaauaauaaacuuuuuugaaauaauaaaucugguagaaaaaugagaucuaaaaaaaaaaaaaaaaaaaaaaaaaaaaaaaaaaaaaaaaaaaaaaaaaaaaaaaaaaaaaaaaaaaaaaaaaaaaaaaaaaaaaaaaaaaaaaaaaaaa

SEQ ID NO: 19018 - RNA, 2085 nt, Artificial Sequence
  mRNA product Design b-4 (A100) comprising derived and/or modified sequence from LASV(LM765-SLE-2012;Clade IV)__AIT17815__SP-HsPLAT_NP(2-569) (opt5)
aggagagucccgcagucggcguccagcggcucugcuuguucgugugugugucguugcaggccuuauucaagcuuaccauggacgccaugaagagaggccugugcugugugcuccugcuuugcggggcugucuucguuagccccagcgccuccaaggagaucaaaucuuuccuguggacccagagccucagacgggaacuguccggcuacugcucuaacauuaagcugcaaguggucaaagacgcucaggcccugcuccacgggcuggauuuuagcgagguuuccaaugugcagcgccuuaugagaaaggaacggcgcgacgauaacgaccugaaaagacuccgggaucugaaucaggcggugaacaaucuggucgagcucaagucuacacaacaaaagagcauccugcgcgugggaacgcuuaccuccgacgaucugcucauucuggcugccgaccuugaaaaacuuaagagcaaaguuacaagaaccgagcggccccucucugccggcguguauauggggaaccuguccagccagcagcuggaucagcgcagagcucuccuggacaugaucggaaugucuggcuccaaucagggggcccgggcuggacgcgauggcgucgugagaguuugggacgugaagaacgccgagcuucugaauaaccaguucggcacaaugccuagccucacccuggcgugucuuacaaaacaggggcaagucgaucugaaugacgccgugcaggcucucaccgaccugggacugauuuacacggccaaguauccgaacaccucugaucucgaccggcugacacagucccaucccauccuuaauaugaucgauaccaagaaaagcucccugaacauuucuggcuacaauuuuagccucggggcugccgugaaggcgggagccugcaugcuggacggcgggaacaugcuugaaacaaucaaagucuccccucaaaccauggauggcauucucaagagcauccugaaaguuaagaaagcucugggaauguucauuucugacgcccccggcgagcgcaacccuuaugaaaauauccuguacaagauuugucucuccggggauggauggcccuauaucgcuagcagaacgucuaucacaggccgggccugggagaacaccgugguggaccuggagagcgaugggaagccucagaaagccggauccaauggcucuaacaagagccuucaguccgcuggguuuacagcgggacugaccuacagccagcucaugacccugaaagacgccaugcugcaacuugauccgaaugcuaagacauggauggacauugaaggcagacccgaggacccugucgaaaucgcccucuaccagcccucuuccggcugcuauauucacuucuuucgcgagccuacggaucugaaacaguucaagcaggacgccaaguacagccaugggaucgaugugaccgaccuguuugcugcccaacccggacucacaucugcgguuauugaugcucugccgcggaacauggugaucaccugucagggcuccgacgauaucagaaaacuuuucgaaagccaggggcgcaaggacauuaaacugaucgauauugcccucuccaagacagacucucggaaauaugagaaugccgucugggaucaguacaaggaccugugccacaugcauaccggaaucgugguugagaagaaaaagagaggcgggaaagaagagauuacgccucacugugcucugauggauugcaucauguuugacgccgcugugagcggcggacuuaacacauccguccuccgcgccgugcugccccgggacauggucuucagaaccucuaccccucgcgugguucugugaggacuaguaauaaggaaacuguaugaaugucugugggcaggaagugaagagauccuucuguaaagguuuuuggaauuaugucugcugaauaauaaacuuuuuugaaauaauaaaucugguagaaaaaugagaucuaaaaaaaaaaaaaaaaaaaaaaaaaaaaaaaaaaaaaaaaaaaaaaaaaaaaaaaaaaaaaaaaaaaaaaaaaaaaaaaaaaaaaaaaaaaaaaaaaaaa

SEQ ID NO: 19019 - RNA, 2085 nt, Artificial Sequence
  mRNA product Design b-4 (A100) comprising derived and/or modified sequence from LASV(LM776-SLE-2012;Clade IV)__AIT17825__SP-HsPLAT_NP(2-569) (opt5)
aggagagucccgcagucggcguccagcggcucugcuuguucgugugugugucguugcaggccuuauucaagcuuaccauggacgccaugaagagaggccugugcugugugcuccugcuuugcggggcugucuucguuagccccagcgccuccaaggagaucaaaucuuuccuguggacccagagccucagacgggaacuguccucuuacugcagcaacauuaaacuucaaguggucaaggacgcucaggcccugcuccacggccuggauuuuuccgagguuucuaaugugcagcgccuuaugagaaaggaacggcgcgacgauaacgaccugaaaagacuccgggaucugaaucaggcggugaacaaucuggucgagcucaagagcacacaacagaaguccauccugcgcguggggacgcuuaccagcgacgaucugcucauucuggcugccgaccuugaaaaacugaagucuaaaguuacaagaaccgagcggccccucuccgccggaguguauaugggcaaccugagcucucagcagcuggaucaacgcagagcucuccuguccaugaucgggaugagcggaucuaaucagggcgcccgggcugggcgcgacggagucgugagaguuugggaugugaagaacgccgagcuucugaauaaccaguucggcacaaugccuucccucacccuggcgugucuuacaaaacagggccaagucgaccugaaugaugccgugcaggcucucaccgaccuggggcugauuuacacggccaaguauccgaacaccagcgaccucgaucggcugacacagucccaucccauccuuaauaugaucgacaccaagaaaucuagccugaacauuuccggauacaauuuuagccucggcgcugccgugaaggcgggggccugcaugcuggauggaggcaacaugcuugaaacaaucaaagucucuccucaaaccauggacgggauucugaaguccauccucaaaguuaagaaagcucugggaauguucauuagcgauacgcccggcgagcgcaacccuuaugaaaauauccuguacaagauuugucucucuggcgacggguggcccuauaucgccagcagaacauccaucaccggacgggcuugggagaacacagugguggaucuggagucugacggcaagccucagaaagccgggagcaauaacuccaauaagagccuucagucugccggauuuaccgcuggccugaccuacucccagcucaugacacugaaagaugcgaugcugcaacuugacccgaacgccaagacguggauggauauugaagggagacccgaggacccugucgaaguggcucucuaccagcccagcucuggaugcuauauccacuucuuucgcgagccuaccgaccugaaacaguucaagcaggaugccaaguacucccauggcauugacguuacagaucuguuugccgcucaacccggccucaccagcgccgugaucgacgcgcugccgcggaauauggucauuacaugucagggguccgaugacaucagaaaacuucuggaaucucagggacgcaaggauaucaaacucauugacaucgcucugagcaagaccgauucccggaaauaugagaacgccgugugggaccaguacaaggaucugugccacaugcauacgggcguuguggucgagaagaaaaagagagggggaaaagaagagauuacaccucacugugcccuuauggacugcaucauguucgaugcugccgugucuggcgggcucaauaccagcguccugcgcgcugugcugccccgggacaugguuuuuagaaccuccacaccucgcgugguccucugaggacuaguaauaaggaaacuguaugaaugucugugggcaggaagugaagagauccuucuguaaagguuuuuggaauuaugucugcugaauaauaaacuuuuuugaaauaauaaaucugguagaaaaaugagaucuaaaaaaaaaaaaaaaaaaaaaaaaaaaaaaaaaaaaaaaaaaaaaaaaaaaaaaaaaaaaaaaaaaaaaaaaaaaaaaaaaaaaaaaaaaaaaaaaaaaa

SEQ ID NO: 19020 - RNA, 2085 nt, Artificial Sequence
  mRNA product Design b-4 (A100) comprising derived and/or modified sequence from LASV(Mad39;Clade IV)__ANH09723__SP-HsPLAT_NP(2-569) (opt5)
aggagagucccgcagucggcguccagcggcucugcuuguucgugugugugucguugcaggccuuauucaagcuuaccauggacgccaugaagagaggccugugcugugugcuccugcuuugcggggcugucuucguuagccccagcgccuccaaggagaucaaaucuuuccuguggacccagagccucagacgggaacuguccggcuacugcucuaacauuaagcugcaaguggucaaagacgcucaggcccugcuccacgggcuggauuuuagcgagguuuccaaugugcagcgccuuaugagaaagcagcggcgcgacgauaacgaccugaaaagacuccgggaucugaaucaagcggugaacaaucuggucgaacucaagucuacacagcaaaagagcgugcugcgcguuggaacgcuuaccuccgacgaucugcucacacuggcugccgaccuugagaaacuuaagagcaaagugaccagaacagaacggccccucaccgccggcgucuauauggggaaccugucuucccagcagcuggaucagcgcagagcucuccugaauaugaucggaaugagcggcgggaaccagggagcccggacaggccgcgacggcgugguuagagugugggaugucaagaaugcugagcuucugaacaaucaguucgggaccaugccuucucucacgcuggccugucuuaccaaacaaggacagguggaccugaacgaugugguccaggcgcucacagaccugggccugauuuacaccgccaaguauccgaauacauccgaccucgaucggcugacccaaagccaucccauccuuaacaugauugacacgaauaagucuucccugaacaucagcggguacaacuuuucccucggagcugccguuaaagcuggcgccugcaugcuggaugggggaaauaugcuugagacaaucaaggugucuccucagaccauggacggcauucugaaaagcauccucaaggugaaaaagucccugggcauguucauuagcgauacacccggggaacgcaacccuuaugagaauauccuguacaaaauuugucucucuggagacggcuggcccuauaucgcguccagaaccagcauuaccgggcgggccugggaaaacacagucguggaucuggagucuggaggcaagccucagaaggcugggagcaauaacuccaauaaaucucuucagagcgccggauuugcugccggccugacguacucccaacucaugacccugaaggacgccaugcugcagcuugauccgaacgcuaaaacauggauggacaucgagggcagacccgaagauccuguugagaucgcgcucuaccagcccauuagcgggugcuauauccacuucuuucgcgaaccuaccgaccugaagcaguucaaacaagacgccaaguacucucauggaauugaugugacagaccuguuugcugcccagcccggccucaccuccgccgucaucgaggcucugccgcggaauauggugauuacgugucaggggagcgaugacaucagaaaacuuuucgaaucucagggacgcaaggauaucaagcugauugacaucgcccucuccaaaacagauagccggaaguaugagaacgcgguuugggaccaauacaaagaucugugccacaugcauaccggcguggucguggagaagaagaaaaagggcgggaaagaagagauuaccccucacugugcucugauggacugcaucauguuugaugccgccgucuccggaggccuuaauacacucgugcugagagcuguucugccccgcgacaugguguuccggaccucuacaccuaaggucgugcucugaggacuaguaauaaggaaacuguaugaaugucugugggcaggaagugaagagauccuucuguaaagguuuuuggaauuaugucugcugaauaauaaacuuuuuugaaauaauaaaucugguagaaaaaugagaucuaaaaaaaaaaaaaaaaaaaaaaaaaaaaaaaaaaaaaaaaaaaaaaaaaaaaaaaaaaaaaaaaaaaaaaaaaaaaaaaaaaaaaaaaaaaaaaaaaaaa

SEQ ID NO: 19021 - RNA, 2085 nt, Artificial Sequence
  mRNA product Design b-4 (A100) comprising derived and/or modified sequence from LASV(Z0947-SLE-2011;Clade IV)__AIT17841__SP-HsPLAT_NP(2-569) (opt5)
aggagagucccgcagucggcguccagcggcucugcuuguucgugugugugucguugcaggccuuauucaagcuuaccauggacgccaugaagagaggccugugcugugugcuccugcuuugcggggcugucuucguuagccccagcgccuccaaggagaucaaaucuuuccuguggacccagagccucagacgggaacuguccggcuacugcucuaacauuaagcugcaaguggucaaagacgcucaggcccugcuccacgggcuggauuuuagcgagguuuccaaugugcagcgccuuaugagaaaggaacggcgcgacgauaacgaccugaaaagacuccgggaucugaaucaggcggugaacaaucuggucgagcucaagucuacacaacaaaagagcauccugcgcgugggaacgcuuaccuccgacgaucugcucauucuggcugccgaccuugaaaaacuuaagagcaaaguuacaagaaccgagcggccccucucugccggcguguauauggggaaccuguccagccagcagcuggaucagcgcagagcucuccugaauaugaucggaaugucuggcuccaaccagggggcccggacaggacgcgacggcgucgugagaguuugggaugugaagaaugcugagcuucugaacaaucaguucggcaccaugccuagccucacacuggccugucuuaccaaacaggggcaagucgaccugaacgaugcggugcaggcccucacggaccugggacugauuuacaccgcuaaguauccgaauacaucugaccucgaucggcugacccagucccaucccauccuuaacaugaucgacacaaagaaaagcucccugaauauuucuggcuacaacuuuagccucggggccgcugugaaggccggagcgugcaugcuggauggcgggaacaugcuugaaaccaucaaagucuccccucaaacgauggacggcauucucaagagcauccugaaaguuaagaaagcccugggaauguucauuucugaugcucccggcgagcgcaauccuuaugaaaacauccuguacaagauuugucucuccggggacggauggcccuauaucgccagcagaacaucuaucaccggccgggcuugggagaauacagugguggaucuggagagcgacgggaagccucagaaagccggauccaacggcucuaauaagagccuucaguccgccggguuuaccgcuggacugaccuacagccagcucaugacacugaaagaugcgaugcugcaacuugacccgaacgccaagacguggauggauauugaaggcagacccgaggacccugucgaaaucgcucucuaccagcccucuuccggcugcuauauucacuucuuucgcgagccuaccgaccugaaacaguucaagcaggaugccaaguacagccaugggaucgacgugacagaucuguuugccgcucaacccggacucaccucugccguuauugacgcgcugccgcggaauauggugaucacaugucagggcuccgaugacaucagaaaacuuuucgaaagccaggggcgcaaggauauuaaacugaucgacauugcucucuccaagaccgauucucggaaauaugagaacgccgucugggaccaguacaaggaucugugccacaugcauacgggaaucgugguugagaagaaaaagagaggcgggaaagaagagauuacaccucacugugcccugauggacugcaucauguuugaugcugccgugagcggcggacuuaauaccuccguccuccgcgcugugcugccccgggacauggucuucagaaccucuacaccucgcgugguucugugaggacuaguaauaaggaaacuguaugaaugucugugggcaggaagugaagagauccuucuguaaagguuuuuggaauuaugucugcugaauaauaaacuuuuuugaaauaauaaaucugguagaaaaaugagaucuaaaaaaaaaaaaaaaaaaaaaaaaaaaaaaaaaaaaaaaaaaaaaaaaaaaaaaaaaaaaaaaaaaaaaaaaaaaaaaaaaaaaaaaaaaaaaaaaaaaa

SEQ ID NO: 19022 - RNA, 1955 nt, Artificial Sequence
  mRNA product Design i-3 (hSL-A64-N5) comprising derived and/or modified sequence from LASV(Josiah;Clade IV)__NP_694869__SP-HsPLAT_NP(2-569) (opt1)
aggagaaagcuuaccauggacgccaugaagcgcggccugugcugcgugcuccugcugugcggggccgucuucgugagccccagcgccuccaaggagaucaagagcuuccuguggacccagucccuccgccgggagcugagcggcuacugcuccaacaucaagcuccagguggucaaggacgcccaggcgcugcugcacgggcuggacuucagcgagguguccaacgugcagcgccucaugcggaaggagcgccgggacgacaacgaccugaagcgccugcgggaccucaaccaggccgucaacaaccugguggagcucaagagcacccagcagaaguccauccugcgcgugggcacccugaccagcgacgaccugcucauccuggccgccgaccuggagaagcucaaguccaaggucauccggaccgagcgcccccugagcgccgggguguacaugggcaaccuguccagccagcagcucgaccagcggcgcgcgcugcugaacaugaucgggauguccggcggcaaccagggggcccgggccggccgcgacggggugguccgggugugggacgugaagaacgccgagcuccugaacaaccaguucggcaccaugccgagccugacgcucgcgugccugaccaagcaggggcaggucgaccugaacgacgccgugcaggcccucaccgaccugggccugaucuacaccgccaaguaccccaacacguccgaccucgaccgccugacccagagccaccccauccugaacaugaucgacaccaagaaguccagccucaacaucagcggcuacaacuucucccugggggccgcggugaaggccggcgccugcaugcuggacgggggcaacaugcucgagaccaucaaggucagcccccagacgauggacggcauccugaaguccauccugaaggugaagaaggcccucgggauguucaucagcgacaccccgggcgagcggaaccccuacgagaacauccuguacaagaucugccuguccggggacggcuggcccuacaucgccagccgcaccuccaucaccgggcgggcgugggagaacacgguggucgaccucgagagcgacggcaagccccagaaggccgacuccaacaacagcuccaagagccugcaguccgccggcuucaccgccgggcugaccuacagccagcucaugacccugaaggacgccaugcugcagcuggacccgaacgcgaagacguggauggacaucgagggccgccccgaggaccccguggagaucgcccucuaccagcccuccagcgggugcuacauccacuucuuccgggagccgaccgaccugaagcaguucaagcaggacgccaaguacucccacggcaucgacgugaccgaccuguucgccacccagcccgggcucacgagcgccgucaucgacgcgcugccccgcaacauggugaucacgugccagggcuccgacgacauccgcaagcugcucgagagccagggccggaaggacaucaagcugaucgacaucgcccugagcaagaccgacucccgcaaguacgagaacgccgugugggaccaguacaaggaccucugccacaugcacaccggggucguggucgagaagaagaagcggggcgggaaggaggagaucaccccgcacugcgcccugauggacugcaucauguucgacgcggccgugagcggcgggcugaacaccuccgugcuccgcgccguccugccccgggacaugguguuccgcaccagcacgccccgggugguccugugaggacuaguuauaagacugacuagcccgaugggccucccaacgggcccuccuccccuccuugcaccgagauuaaucaaaggcucuuuucagagccaccaaaaaaaaaaaaaaaaaaaaaaaaaaaaaaaaaaaaaaaaaaaaaaaaaaaaaaaaaaaaaaaaagaauu

SEQ ID NO: 19023 - RNA, 1955 nt, Artificial Sequence
  mRNA product Design i-3 (hSL-A64-N5) comprising derived and/or modified sequence from LASV(LP;Clade I)__AAF86702__SP-HsPLAT_NP(2-569) (opt1)
aggagaaagcuuaccauggacgccaugaagcgcggccugugcugcgugcuccugcugugcggggccgucuucgugagccccagcaacuccaaggagaucaagagcuuccuguggacccagucccuccgccgggagcugagcggcuacugcuccaacaucaagcuccagguggucaaggacgcccaggcccugcugcacgggcuggacuucagcgagguguccaacgugcagcgccucaugcggaagcagaagcgcgacgacgcggaccugaagcggcugcgcgaccucaaccaggccgucaacaaccugguggagcucaagagcacccagcagaagaacgugcugcgggucggcacgcuguccagcgacgaccugaucacccucgccgccgaccuggagaagcugaaguccaaggugauccgcaccgagcggccccucagcuccgggguguacaugggcaaccugagcucccagcagcuggaccagcgccgggcccuccugagcaugaucgggauguccggcggcccgcaggggaaccgcaccggcggggacggcgucgugcgggugugggacgucaagaacgcggagcugcucaacaaccaguucgggacgaugcccagccugacccuggccugccucaccaagcagggccagguggaccugaacgacgccgugcaggcccugaccgaccucggccugaucuacacggcgaaguaccccaacuccagcgaccuggacaugcucacccagagccaccccauccuggggauggucgacaccaagaaguccagccugaacaucuccggcuacaacuucagccucggggccgccgugaaggccggcgccugcaugcuggacggcgggaacaugcuggagaccaucaagguguccccgcagacgauggacggcauccucaagagcauccugaaggucaagcgcucccuggggauguucaucagcgacacccccggcgagcggaaccccuacgagaacauccucuacaagaucugccuguccggggagggcuggcccuacaucgcgagccgcaccuccaucaccggccgggccugggagaacacgcugguggaccucgagagcgacaacaagccgcccaagcugaacuccgccgggagcaacaagucccugcaggccgccggccucaacgcggggcugaccuacagccagcugaugacccugaaggacugcaugcuccagcuggaccccuccagcaagaccuggaucgacaucgagggccgccccgaggacccgguggagaucgcccuguuccagcccuccagcgggugcuacauccacuucuuccgggagcccacggaccucaagcaguucaagcaggacgccaaguacagccacggcaucgacgucaccgaccuguucuccacccagcccggccugaccagcgccgugaucgaggcccucccgcgcaacauggugcugacgugccagggguccgacgacaucaagaagcugcucgagagccagggccggcgcgacaucaagcugaucgacaucucccugagcaaggcggacucccgcaaguucgagaacgccgucugggaccaguacaaggaccucugccacaugcacaccgggguggucguggagaagaagaagcggggcgggaaggaggagaucacgccccacugcgcccugcuggacugcaucauguucgacgccgccaccaccggcagccucaacaucaccacccugcgcgcggugcugccccgggacauggucuuccgcaccuccacgcccaagguggugcucugaggacuaguuauaagacugacuagcccgaugggccucccaacgggcccuccuccccuccuugcaccgagauuaaucaaaggcucuuuucagagccaccaaaaaaaaaaaaaaaaaaaaaaaaaaaaaaaaaaaaaaaaaaaaaaaaaaaaaaaaaaaaaaaaagaauu

SEQ ID NO: 19024 - RNA, 1955 nt, Artificial Sequence
  mRNA product Design i-3 (hSL-A64-N5) comprising derived and/or modified sequence from LASV(803213;Clade II)__AAF86704__SP-HsPLAT_NP(2-569) (opt1)
aggagaaagcuuaccauggacgccaugaagcgcggccugugcugcgugcuccugcugugcggggccgucuucgugagccccagcgccuccaaggaggugaaguccuuccuguggacccagagccuccgccgggagcugagcggcuacugcuccaacaucaagcugcaggucgugaaggacgcccaggcgcuccugcacgggcuggacuucagcgaggugaacaacguccagcgccucaugcggaagcagaagcgcgacgacggcgaccugaagcggcugcgcgaccucaaccaggccgugaacaaccugguggagcugaaguccacccagcagaaguccauccuccgggucgggacgcugaccagcgacgaccugcucacccuggccgccgaccuggagaagcucaagagcaaggugauccgcaccgagcggccccuguccagcggcguguacauggggaaccuguccacgcagcagcucgagcagcgccgggcccugcugaacaugaucggcauggucggcggggcgcagggcacccagccggggcgcgacggcguggugcgggucugggacgugaagaaccccgaccuccugaacaaccaguucgggaccaugcccagccugacccucgccugccugacgaagcagggccagguggaccugaacgacgccguccucgcccugaccgaccugggccucaucuacaccgcgaaguaccccaacuccagcgaccuggaccgccugucccagagccacccgauccucaacaugguggacaccaagaaguccagccugaacaucagcggguacaacuucucccugggcgccgccgugaaggccggggccugcaugcucgacggcggcaacaugcuggagacgaucaaggucacgccccagaccauggacgggauccucaagagcauccugaaggugaagcggucccugggcauguucgugagcgacacccccggggagcgcaaccccuacgagaacauccuguacaagaucugccucuccggcgacggguggccguacaucgcgagccggaccuccaucgucggccgcgccugggagaacaccaccguggaccuggagagcgacggcaagccccagaagguggggaccgccggcuccaacaagagccugcaguccgccggguuccccacgggccucaccuacagccagcugaugacccugaaggacuccaugaugcagcuggaccccagcgccaagaccuggaucgacaucgaggggcggccggaggaccccgucgagaucgcgcucuaccagcccauguccggcugcuacauccacuucuuccgcgagcccacggaccugaagcaguucaagcaggacgccaaguacagccacggcaucgacguggccgaccuguucccggcccagcccgggcucaccuccgccgucaucgaggcgcugccccggaacauggugcugaccugccagggcagcgacgacaucaagaagcuccuggacucccaggggcgccgcgacaucaagcugaucgacaucagccucagcaagguggacucccggaaguucgagaacgccgucugggaccagugcaaggaccugugccacaugcacaccggcgugguggucgagaagaagaagcgcgggggcaaggaggagaucacgccccacugcgcccugauggacugcaucauguucgacgccgccgugagcggcgggcucaacaucccggugcugcgggcgguccugccccgcgacaugguguuccggaccuccagccccaaggugguccucugaggacuaguuauaagacugacuagcccgaugggccucccaacgggcccuccuccccuccuugcaccgagauuaaucaaaggcucuuuucagagccaccaaaaaaaaaaaaaaaaaaaaaaaaaaaaaaaaaaaaaaaaaaaaaaaaaaaaaaaaaaaaaaaaagaauu

SEQ ID NO: 19025 - RNA, 1958 nt, Artificial Sequence
  mRNA product Design i-3 (hSL-A64-N5) comprising derived and/or modified sequence from LASV(GA391;Clade III)__CAA36646__SP-HsPLAT_NP(2-570) (opt1)
aggagaaagcuuaccauggacgccaugaagcgcggccugugcugcgugcuccugcugugcggggccgucuucgugagccccagcgccuccaaggaggugcgcagcuuccuguggacccagucccuccggcgcgagcugagcggcuacugcuccaacaucaagcugcaggucgugaaggacgcccaggcgcuccugcacgggcuggacuucagcgagguguccaacguccagcggcucaugcgcaagcagaagcgggacgacggcgaccugaagcgccugcgggaccucaaccaggccgugaacaaccugguggagcucaagagcacccagcagaaguccguccugcgcguggggacccugagcuccgacgaccugcucauccuggccgccgaccuggagaagcucaagagcaaggugacccggaccgagcgcccccuguccagcggcgucuacauggggaaccuguccagccagcagcucgaccagcggcgcgcccugcugaacaugaucggcaugaccggcguguccgggggcgggaagggcgcgagcgacgggaucgugcgggucugggacgugaagaacgccgagcuccugaacaaccaguucggcacgaugccgucccugacccucgccugccugaccaagcagggccagguggaccugaacgacgccguccaggcgcucaccgaccuggggcugaucuacacggccaaguaccccaacagcagcgaccucgaccgccugucccagagccaccccauccugaacaugaucgacaccaagaaguccagccucaacaucuccggcuacaacuucagccugggggccgccgugaaggccggcgcgugcaugcuggacggcgggaacaugcucgagaccaucaaggugagcccccagaccauggacggcauccucaaguccauccugaaggucaagaagucccuggggauguucgugagcgacacgccgggcgagcggaaccccuacgagaacauccuguacaagaucugccuguccggggacggcuggcccuacaucgccagccgcaccuccaucgugggccgggccugggagaacaccgucguggaccucgagcaggacaacaagccccagaagaucgggaacggcgggagcaacaagucccugcagagcgccggcuucgccgcggggcugaccuacucccagcucaugacgcugaaggacuucaagugcuucaaccugaucccgaacgccaagaccuggauggacaucgagggccgccccgaggaccccguggagaucgcccuguaccagcccagcuccggcugcuacguccacuucuuccgggagccgaccgaccucaagcaguucaagcaggacgccaaguacagccacgggaucgacgugaccgaccuguucgccgcgcagcccggccugacgagcgccgucaucgaggcccucccccgcaacauggugaucacgugccagggguccgaggacauccggaagcugcuggagagccagggccgccgcgacaucaagcucaucgacaucacccuguccaaggccgacagccggaaguucgagaacgccgugugggaccaguucaaggaccugugccacaugcacaccggggucgugguggagaagaagaagcgcggcggcaaggaggagaucacgccccacugcgcgcucauggacugcaucauguucgacgccgccgucuccgggggccuggacgccaaggugcugcgggugguccucccgcgcgacaugguguuccggaccagcacccccaaggugguccugugaggacuaguuauaagacugacuagcccgaugggccucccaacgggcccuccuccccuccuugcaccgagauuaaucaaaggcucuuuucagagccaccaaaaaaaaaaaaaaaaaaaaaaaaaaaaaaaaaaaaaaaaaaaaaaaaaaaaaaaaaaaaaaaaagaauu

SEQ ID NO: 19026 - RNA, 1955 nt, Artificial Sequence
  mRNA product Design i-3 (hSL-A64-N5) comprising derived and/or modified sequence from LASV(AV;Clade V)__CCA30315__SP-HsPLAT_NP(2-569) (opt1)
aggagaaagcuuaccauggacgccaugaagcgcggccugugcugcgugcuccugcugugcggggccgucuucgugagccccagcgccuccaaggaggugaaguccuuccuguggacccagagccuccgccgggagcugagcggcuacugcuccaacaucaagcugcaggucgugaaggacgcccaggcgcuccugcacgggcuggacuucagcgagguguccaacguccagcgccucaugcggaagcagcgccgggacgacagcgaccugaagcgccugcgggaccucaaccaggccgugaacaaccugguggagcugaaguccacccagcagaaguccguccuccgcgugggcacgcugagcagcgacgaccugcucacccuggccgccgaccuggagaagcucaaguccaaggugacccggaccgagcgcccccugagcuccggggucuacaugggcaaccugagcucccagcagcucgaccagcggcgcgcccugcugaaccucaucgggaugacgaacggcagccagggcucccaggcggggcgggacggcguggugcgcgucugggacgugaagaacgccgagcugcugaacaaccaguucgggaccaugccgagccucacccuggccugccugaccaagcagggccagguggaccucaacgacgucgugcaggcccugacggaccuggggcucaucuacaccgcgaaguaccccaacaccagcgaccuggaccggcugacccagucccaccccauccucaacaugaucgacacgaagaaguccagccugaacaucagcggcuacaacuucucccugggcgccgccgugaaggccggggccugcaugcucgacggcgggaacaugcuggagaccaucaaggucagcccccaguccauggacggcauccucaagagcauccugaaggugaagcgcgcgcugggcauguucguguccgacaccccgggggagcggaaccccuacgagaacauccuguacaagaucugccucagcggcgacggguggcccuacaucgccucccgcaccagcaucgucggccgggccugggagaacacggugguggaccuggagaccgacgggaagccccagaagaucggcuccggcaacagcaacaagucccugcagagcgccggguucuccgccggccucaccuacagccagcugaugacccugaaggacgcgaugcugcagcucgacccgaacgccaagacguggauggacaucgaggggcgccccgaggaccccgucgagguggcccuguaccagcccaucuccggcugcuacauccacuucuuccgggagccgaccgaccugaagcaguucaagcaggacgccaaguacagccacgggaucgacaucgccgaccucuucgcggcccagcccggccugaccagcgccgucaucgaggcccugccccgcaacauggugaucacgugccagggcuccgaggacaucaagaagcuccuggagagccaggggcgcaaggacaucaagcugaucgacaucgcccucuccaagaucgacagccggaaguucgagaacgcggugugggaccaguacaaggaccugugccacaugcacaccggcgucgugguggagaagaagaagcgcgggggcaaggaggagaucaccccgcacugcgcccugauggacugcaucauguucgacgccgccgucuccgggggccucaacacccuggugcugcgggcggugcucccccgcgacauggucuuccggaccagcacgccccgcguggugcugugaggacuaguuauaagacugacuagcccgaugggccucccaacgggcccuccuccccuccuugcaccgagauuaaucaaaggcucuuuucagagccaccaaaaaaaaaaaaaaaaaaaaaaaaaaaaaaaaaaaaaaaaaaaaaaaaaaaaaaaaaaaaaaaaagaauu

SEQ ID NO: 19027 - RNA, 1955 nt, Artificial Sequence
  mRNA product Design i-3 (hSL-A64-N5) comprising derived and/or modified sequence from LASV(Togo/2016/7082;Clade VI)__AMR44578__SP-HsPLAT_NP(2-569) (opt1)
aggagaaagcuuaccauggacgccaugaagcgcggccugugcugcgugcuccugcugugcggggccgucuucgugagccccagcaacuccaaggaggugaaguccuuccuguggacccagagccuccgccgggagcugagcggcuacugcuccaacaucaagcugcaggucgugaaggacgcccaggcccuccugcacgggcuggacuucagcgagguguccaacguccagcgccucaugcggaagcagaagcgcgacgacggcgaccugaagcggcugcgcgaccucaaccaggcggugaacaaccugguggagcucaagagcguccagcagaaguccauccugcggguggggacccugaccagcgacgaccugcucacccuggccgccgaccuggagaagcucaaguccaaggugacccgcaccgagcggccccugagcuccggcgucuacauggggaaccugagcucccagcagcucgaccagcgccgggcccugcugagcaugaucggcauguccggcgggaaccagaacagccagccgaagggcgacgggguggugcgcgucugggacgugaagaacgccgaccuccugaacaaccaguucggcacgaugcccucccugacccucgcgugccugaccaagcagggccagguggaccugaacgacgccguccaggcccucaccgaccuggggcugaucuacacggccaaguaccccaacagcagcgaccucgaccggcugucccagagccaccccauccugaacaugaucgacaccaagaaguccagccucaacaucuccggcuacaacuucagccugggggcggccaucaagaccggcgccugcaugcuggacgggggcaacaugcucgagaccaucaaggugacgccgcagaccauggacggcauccugaaguccauccugaaggugaagcgcagccucgggauguucaucuccgacacccccggcgagcggaaccccuacgagaacauccuguacaagaucugccugagcggggacggcuggcccuacaucgccucccgcaccgccaucaucgggcgggcgugggagaacacggucguggaccucgagagcgacuccaagccgcagaagaucggcagcaacggcuccaacaagagccugcaguccgccggguucgcccccggccugaccuacagccagcucaugacccugaaggacuccaugcugcagcuggaccccaacgccaagaccuggaucgacaucgaggggcgccccgaggacccgguggaggucgcccucuuccagcccaucagcggcugcuacauccacuucuuccgggagcccacggaccugaagcaguucaagcaggacgcgaaguacagccacgggaucgacgugaccgaccuguucgccgcccagcccggccucaccuccgccgugaucgaggcccugccgcgcaacaugguccugaccugccagggcagcgacgacaucaagaagcuccuggacucccaggggcggcgcgacaucaagcugaucgacgugagccucaacaagaucgacucccgcaaguucgagaacgcggucugggaccaguacaaggaccugugccacaugcacacgggcgugguggucgagaagaagaagaagggcgggaaggaggagaucacgccccacugcgcccugcucgacugcaucauguucgacgccgccgugagcgggggccugaacgccaccgugcugcgggcgguccucccccgcgacaugguguuccggaccuccagccccaaggugguccugugaggacuaguuauaagacugacuagcccgaugggccucccaacgggcccuccuccccuccuugcaccgagauuaaucaaaggcucuuuucagagccaccaaaaaaaaaaaaaaaaaaaaaaaaaaaaaaaaaaaaaaaaaaaaaaaaaaaaaaaaaaaaaaaaagaauu

SEQ ID NO: 19028 - RNA, 1955 nt, Artificial Sequence
  mRNA product Design i-3 (hSL-A64-N5) comprising derived and/or modified sequence from LASV(KAK-428;Clade n.d. (VII))__ANH09741__SP-HsPLAT_NP(2-569) (opt1)
aggagaaagcuuaccauggacgccaugaagcgcggccugugcugcgugcuccugcugugcggggccgucuucgugagccccagcaacuccaaggaggugaaguccuuccuguggacccagagccuccgccgggagcugagcggcuacugcaccaacaucaagcugcaggucgugaaggacgcccaggcccuccugcacgggcuggacuucuccgaggugagcaacguccagcgccucaugcggaagcagaagcgcgacgacaacgaccugaagcggcugcgcgaccucaaccaggcggugaacaaccugguggagcugaaguccguccagcagaaguccgugcucaaggugggcacgcugaacagcgacgaccugcucacccuggccgccgaccuggagaagcucaagagcaaggucgugcggaccgagcgcccccuguccagcgggguguacaugggcaaccuguccagccagcagcucgaccagcggcgcgcccugcugaacaugaucgggauggccggcggcucccaggggaaccagccgagccgggacggcgucgugcgcgugugggacgucaagaacgcggaccuccugaacaaccaguucgggaccaugcccucccugacgcucgccugccugaccaagcagggccagguggaccugaacgacgugguccucgcccugaccgaccuggggcucaucuacaccgccaaguaccccaacagcuccgaccuggaccggcugagccagaaccaccccgugcucaacaugaucgacgugaacaagagcucccugaacaucagcggcuacaacuucucccugggcgcggccgucaaggccggggccugcaugcucgacggcgggaacaugcuggagacgaucaagaucagcccgcagaccguggacggcauccugaaguccauccucaaggugaagcgcgcccugggcauguucgucagcgacacccccggggagcggaaccccuacgagaacauccuguacaaggugugccucuccggcaacggguggcccuacaucgcgagccgcaccuccaucgucggccgggccugggagaacacggugguggaccuggagagcaacaagaaccagccgaaggucgggaacaacggcuccaacaagaugcugcagagcuccggcuucgccaccgggcucaccuacagccagcugaugacccugcgcgacuccaugcugcagcucgaccccacggccaagaccuggaucgacaucgagggccggcccgaggaccccguggagcuggcccuguuccagccgagcuccgggugcuacauccacuucuuccgcgagcccaccgaccucaagcaguucaagcaggacgcgaaguacagccacggcaucgacgugaacgaccuguucuccgcccagcccgggcugaccagcgccguccucgaggcccugccccggaacauggugcugacgugccagggcagcgacgacauccgcaagcuccuggacucccaggaccgcaaggacaucaagcugaucgacaucagccucuccaaggccgacgcgcggaaguucgagaacgacgugugggaccaguucaaggaccugugccacaugcacaccggcaucgucguggagaagaagaagaagggcgggaagcaggagaugaccccgcacugcgcccugcucgacugcaucauguucgacgccgccgugagcgggggccugaacguccccacccugcgcgccgugcuccccacggacaugguguuccggaccaucaccaccaaggucgugcugugaggacuaguuauaagacugacuagcccgaugggccucccaacgggcccuccuccccuccuugcaccgagauuaaucaaaggcucuuuucagagccaccaaaaaaaaaaaaaaaaaaaaaaaaaaaaaaaaaaaaaaaaaaaaaaaaaaaaaaaaaaaaaaaaagaauu

SEQ ID NO: 19029 - RNA, 1955 nt, Artificial Sequence; identical to SEQ ID NO: 19023
  mRNA product Design i-3 (hSL-A64-N5) comprising derived and/or modified sequence from LASV(Pinneo-NIG-1969;Clade I)__AIT17837__SP-HsPLAT_NP(2-569) (opt1)

SEQ ID NO: 19030 - RNA, 1955 nt, Artificial Sequence
  mRNA product Design i-3 (hSL-A64-N5) comprising derived and/or modified sequence from LASV(ISTH0009-NIG-2011;Clade II)__AIT17405__SP-HsPLAT_NP(2-569) (opt1)
aggagaaagcuuaccauggacgccaugaagcgcggccugugcugcgugcuccugcugugcggggccgucuucgugagccccagcguguccaaggaggucaagagcuuccuguggacccagucccuccgccgggagcugagcggcuacugcuccaacaucaagcuccagguggugaaggacgcccaggcccugcugcacgggcuggacuucagcgaggucuccaacgugcagcgccucaugcggaagcagaagcgcgacgacagcgaccugaagcggcugcgcgaccucaaccaggcggugaacaaccuggucgagcugaaguccacccagcagaaguccauccuccgggugggcacccugaccagcgacgaccugcucacccuggccgccgaccuggagaagcucaagagcaaggugauccgcaccgagcggccccuguccagcggggucuacaugggcaaccuguccacgcagcagcucgagcagcgccgggcccugcugaacaugaucgggauggugggcggcgcccaggggacccagccgggccgcgacggggugguccgggugugggacgugaagaaccccgaccuccugaacaaccaguucggcaccaugcccagccugacccucgcgugccugacgaagcaggggcaggucgaccugaacgacgccgugcucgcccugaccgaccugggccucaucuacaccgccaaguaccccaacuccagcgaccuggaccgccugucccagagccacccgauccucaacaugguggacaucaagaaguccagccugaacaucagcggcuacaacuucucccugggggcggccgucaaggccggcgccugcaugcucgacgggggcaacaugcuggagaccaucaaggugacgccccagaccauggacggcauccucaagagcauccugaaggugaagcggucccuggggauguucgucagcgacacccccggcgagcgcaaccccuacgagaacauccuguacaagaucugccucuccggggacggcuggccguacaucgccagccggaccuccaucguggggcgcgcgugggagaacacgaccguggaccuggagagcgacggcaagccccagaaggucggcuccgccgggagcaacaagucccugcagagcgccggcuuccccaccgggcucaccuacucccagcugaugacgcugaaggacagcaugaugcagcuggaccccuccgccaagaccuggaucgacaucgagggccggccggaggaccccguggagaucgcccucuaccagcccaugagcgggugcuacauccacuucuuccgcgagcccaccgaccugaagcaguucaagcaggacgcgaaguacucccacggcaucgacgucgccgaccuguucccggcccagcccggccucaccagcgccgugaucgaggcccugccccggaacauggugcugacgugccaggggagcgacgacaucaagcgccuccuggacucccagggccgccgggacaucaagcugaucgacaucgcgcucagcaaggccgacucccgccgguucgagaacgccgucugggaccagugcaaggaccugugccacaugcacaccggggugguggucgagaagaagaagcgcggcgggaaggaggagaucacgccccacugcgcccugauggacugcaucauguacgacgccgcggugagcggcggccucaacaucccggugcugcgggccguccugccccgcgacaugguguuccggaccuccagccccaaggugguccucugaggacuaguuauaagacugacuagcccgaugggccucccaacgggcccuccuccccuccuugcaccgagauuaaucaaaggcucuuuucagagccaccaaaaaaaaaaaaaaaaaaaaaaaaaaaaaaaaaaaaaaaaaaaaaaaaaaaaaaaaaaaaaaaaagaauu

SEQ ID NO: 19031 - RNA, 1955 nt, Artificial Sequence
  mRNA product Design i-3 (hSL-A64-N5) comprising derived and/or modified sequence from LASV(ISTH2010-NIG-2012;Clade II)__AIT17483__SP-HsPLAT_NP(2-569) (opt1)
aggagaaagcuuaccauggacgccaugaagcgcggccugugcugcgugcuccugcugugcggggccgucuucgugagccccagcgccuccaaggaggugaaguccuuccuguggacccagagccuccgccgggagcugagcggcuacugcuccaacaucaagcugcaggucgugaaggacgcccaggcgcuccugcacgggcuggacuucagcgagguguccaacguccagcgccucaugcggaagcagaagcgcgacgacagcgaccugaagcggcugcgcgaccucaaccaggccgugaacaaccugguggagcugaaguccacccagcagaaguccauccuccgggucggcacgcugaccagcgacgaccugcucacccuggccgccgaccuggagaagcucaagagcaaggugauccgcaccgagcggccccuguccagcgggguguacaugggcaaccuguccacgcagcagcucgagcagcgccgggcccugcugaaccucaucgggauggucggcggcgcgcaggggacccagccgggccgcgacgggguggugcgggucugggacgugaagaaccccgaccugcugaacaaccaguucggcaccaugcccagccucacccuggccugccugacgaagcagggccagguggaccucaacgacgccguccuggcccugaccgaccucgggcugaucuacaccgcgaaguaccccaacuccagcgaccuggaccgccucucccagagccacccgauccugaacaugguggacaccaagaaguccagccugaacaucagcggcuucaacuucucccucggggccgccgugaaggccggcgccugcaugcuggacgggggcaacaugcuggagacgaucaaggucacgccccagaccauggacggcauccucaagagcauccugaaggugaagaagucccuggggauguucgugagcgacacccccggcgagcggaaccccuacgagaacauccucuacaagaucugccuguccggggacggcuggccguacaucgcgagccgcaccuccaucgucgggcgggccugggagaacaccaccguggaccuggagagcgacggcaagccccacaaggugggcaccgccggguccaacaagagccuccaguccgccggcuuccccacggggcugaccuacagccagcugaugacccugaaggacuccaugaugcagcucgaccccagcgccaagaccuggaucgacaucgagggccgcccggaggaccccgucgagaucgcgcuguaccagcccauguccgggugcuacauccacuucuuccgggagcccacggaccugaagcaguucaagcaggacgccaaguacagccacggcaucgacguggccgaccucuucccggcccagcccggccugaccuccgccgucaucgaggcgcugccccgcaacauggugcugaccugccaggggagcgacgacaucaagcggcuccuggacagccagggccgccgcgacaucaagcucaucgacaucgcccuguccaaggccgacagccggcgcuucgagaacgccgugugggaccagugcaaggaccugugccacaugcacaccggggucgugguggagaagaagaagcggggcgggaaggaggagaucacgccccacugcgcccucauggacugcaucauguacgacgcggccgucuccggcggccugaacaucccggugcugcgcgccgugcucccccgggacauggucuuccgcaccagcucccccaagguggugcugugaggacuaguuauaagacugacuagcccgaugggccucccaacgggcccuccuccccuccuugcaccgagauuaaucaaaggcucuuuucagagccaccaaaaaaaaaaaaaaaaaaaaaaaaaaaaaaaaaaaaaaaaaaaaaaaaaaaaaaaaaaaaaaaaagaauu

SEQ ID NO: 19032 - RNA, 1955 nt, Artificial Sequence
  mRNA product Design i-3 (hSL-A64-N5) comprising derived and/or modified sequence from LASV(Lassa virus/H.sapiens-wt/NGA/2015/ISTH_0543;Clade II)__AVO03640__SP-HsPLAT_NP(2-569) (opt1)
aggagaaagcuuaccauggacgccaugaagcgcggccugugcugcgugcuccugcugugcggggccgucuucgugagccccagcgccuccaaggaggugaaguccuuccuguggacccagagccuccgccgggagcugagcggcuacugcuccaacaucaagcugcaggucgugaaggacgcccaggcgcuccugcacgggcuggacuucagcgagguguccaacguccagcgccucaugcggaagcagaagcgcgacgacagcgaccugaagcggcugcgcgaccucaaccaggccgugaacaaccugguggagcugaaguccacccagcagaaguccauccuccgggucggcacgcugaccagcgacgaccugcucacccuggccgccgaccuggagaagcucaagagcaaggugauccgcaccgagcggccccuguccagcgggguguacaugggcaaccuguccacgcagcagcucgagcagcgccgggcccugcugaacaugaucgggauggucggcggcgcgcaggggacccagccgggccgcgacgggguggugcgggucugggacgugaagaaccccgaccuccugaacaaccaguucggcaccaugcccagccugacccucgccugccugacgaagcagggccagguggaccugaacgacgccguccucgcccugaccgaccuggggcucaucuacaccgcgaaguaccccaacuccagcgaccuggaccgccugucccagagccacccgauccucaacaugguggacaccaagaaguccagccugaacaucagcggcuacaacuucucccugggggccgccgugaaggccggcgccugcaugcucgacgggggcaacaugcuggagacgaucaaggucacgccccagaccauggacggcauccucaagagcauccugaaggugaagaagucccuggggauguucgugagcgacacccccggcgagcggaaccccuacgagaacauccuguacaagaucugccucuccggggacggcuggccguacaucgcgagccgcaccuccaucgucgggcgggccugggagaacaccaccguggaccuggagagcgacggcaagccccagaaggugggcuccgccgggagcaacaagucccugcagagcgccggcuuccccaccgggcucacguacucccagcugaugacccugaaggacagcaugaugcagcuggaccccuccgccaagaccuggaucgacaucgagggccgcccggaggaccccgucgagaucgcgcucuaccagcccaugagcgggugcuacauccacuucuuccgggagcccaccgaccugaagcaguucaagcaggacgccaaguacucccacggcaucgacguggccgaccuguucccggcccagcccggccucacgagcgccgucaucgaggcgcugccccgcaacauggugcugaccugccaggggagcgacgacaucaagcggcuccuggacucccagggccgcaaggacaucaagcugaucgacaucgcccucagcaaggccgacucccgccgguucgagaacgccgugugggaccagugcaaggaccugugccacaugcacaccggggucgugguggagaagaagaagcgcggcgggaaggaggagaucacgccccacugcgcccugauggacugcaucauguacgacgcggccgucagcggcggccucaacaucccggugcugcgggccgugcugccccgcgacauggucuuccggaccuccagccccaagguggugcucugaggacuaguuauaagacugacuagcccgaugggccucccaacgggcccuccuccccuccuugcaccgagauuaaucaaaggcucuuuucagagccaccaaaaaaaaaaaaaaaaaaaaaaaaaaaaaaaaaaaaaaaaaaaaaaaaaaaaaaaaaaaaaaaaagaauu

SEQ ID NO: 19033 - RNA, 1955 nt, Artificial Sequence
  mRNA product Design i-3 (hSL-A64-N5) comprising derived and/or modified sequence from LASV(Lassa virus/H.sapiens-wt/NGA/2016/ISTH_0009;Clade II)__AVO03572__SP-HsPLAT_NP(2-569) (opt1)
aggagaaagcuuaccauggacgccaugaagcgcggccugugcugcgugcuccugcugugcggggccgucuucgugagccccagcgccuccaaggaggugaaguccuuccuguggacccagagccuccgccgggagcugagcggcuacugcuccaacaucaagcugcaggucgugaaggacgcccaggcgcuccugcacgggcuggacuucagcgagguguccaacguccagcgccucaugcggaagcagaagcgcgacgacagcgaccugaagcggcugcgcgaccucaaccaggccgugaacaaccugguggagcugaaguccacccagcagaaguccauccuccgggucggcacgcugaccagcgacgaccugcucacccuggccgccgaccuggagaagcucaagagcaaggugauccgcaccgagcggccccuguccagcgggguguacaugggcaaccuguccacgcagcagcucgagcagcgccgggcccugcugaacaugaucgggauggucggcggcgcgcaggggacccagccgggccgcgacgggguggugcgggucugggacgugaagaaccccgaccuccugaacaaccaguucggcaccaugcccagccugacccucgccugccugacgaagcagggccagguggaccugaacgacgccguccucgcccugaccgaccuggggcucaucuacaccgcgaaguaccccaacuccagcgaccuggaccgccugucccagagccacccgauccucaacaugguggacaccaagaaguccagccugaacaucagcggcuacaacuucucccugggggccgccgugaaggccggcgccugcaugcucgacgggggcaacaugcuggagacgaucaaggucacgccccagaccauggacggcauccucaagagcauccugaaggugaagaagucccuggggauguucgugagcgacacccccggcgagcggaaccccuacgagaacauccuguacaagaucugccucuccggggacggcuggccguacaucgcgagccgcaccuccaucgucgggcgggccugggagaacaccaccguggaccuggagagcgacggcaagccccagaaggugggcuccgccgggagcaacaagucccugcagagcgccggcuuccccaccgggcucacguacucccagcugaugacccugaaggacagcaugaugcagcuggaccccuccgccaagaccuggaucgacaucgagggccgcccggaggaccccgucgagaucgcgcucuaccagcccaugagcgggugcuacauccacuucuuccgggagcccaccgaccugaagcaguucaagcaggacgccaaguacucccacggcaucgacguggccgaccuguucccggcccagcccggccucacgagcgccgucaucgaggcgcugccccgcaacauggugcugaccugccaggggagcgacgacaucaagcggcuccuggacucccagggccgccgcgacaucaagcugaucgacaucgcccucagcaaggccgacucccggcgcuucgagaacgccgugugggaccagugcaaggaccugugccacaugcacaccggggucgugguggagaagaagaagcggggcgggaaggaggagaucacgccccacugcgcccugauggacugcaucauguacgacgcggccgucagcggcggccucaacaucccggugcugcgcgccgugcugccccgggacauggucuuccgcaccuccagccccaagguggugcucugaggacuaguuauaagacugacuagcccgaugggccucccaacgggcccuccuccccuccuugcaccgagauuaaucaaaggcucuuuucagagccaccaaaaaaaaaaaaaaaaaaaaaaaaaaaaaaaaaaaaaaaaaaaaaaaaaaaaaaaaaaaaaaaaagaauu

SEQ ID NO: 19034 - RNA, 1955 nt, Artificial Sequence
  mRNA product Design i-3 (hSL-A64-N5) comprising derived and/or modified sequence from LASV(Lassa virus/H.sapiens-wt/NGA/2016/ISTH_0017;Clade II)__AVO03568__SP-HsPLAT_NP(2-569) (opt1)
aggagaaagcuuaccauggacgccaugaagcgcggccugugcugcgugcuccugcugugcggggccgucuucgugagccccagcgccuccaaggaggugaaguccuuccuguggacccagagccuccgccgggagcugagcggcuacugcuccagcaucaagcugcaggucgugaaggacgcccaggcgcuccugcacgggcuggacuucuccgaggugagcaacguccagcgccucaugcggaagcagaagcgcgacgacuccgaccugaagcggcugcgcgaccucaaccaggccgugaacaaccugguggagcucaagagcacccagcagaaguccauccugcgggucggcacgcugaccagcgacgaccugcucacccuggccgccgaccuggagaagcucaaguccaaggugauccgcaccgagcggccccugagcuccgggguguacaugggcaaccugagcacgcagcagcucgagcagcgccgggcccugcugaacaugaucgggauggcgggcggcgcccaggggacccagccgggccgcgacggggucgugcgggugugggacgucaagaaccccgaccuccugaacaaccaguucggcaccaugcccucccugacccucgccugccugacgaagcagggccagguggaccugaacgacgccgugcucgcgcugaccgaccuggggcucaucuacaccgccaaguaccccaacagcuccgaccuggaccgccugagccagagccacccgauccucaacauggucgacaccaagaaguccagccugaacaucuccggcuacaacuucagccugggggccgccgugaaggccggcgcgugcaugcucgacgggggcaacaugcuggagacgaucaaggugacgccccagaccauggacggcauccugaaguccauccucaaggucaagcggagccuggggauguucguguccgacgcccccggcgagcgcaaccccuacgagaacauccuguacaagaucugccucagcggggacggcuggccguacaucgccucccggaccagcaucguggggcgcgccugggagaacaccaccgucgaccuggaguccgacggcaagccccagaaggugggcgccaccgggagcaacaagucccugcagagcgcgggcuuccccaccgggcucacguacucccagcugaugacccugaaggacagcaugaugcagcuggaccccuccgccaagaccuggaucgacaucgagggccggccggaggaccccguggaggucgcccucuaccagcccgugagcgggugcuacauccacuucuuccgcgagcccaccgaccugaagcaguucaagcaggacgccaaguacucccacggcaucgacgucgccgaccuguucccggcgcagcccggccucacgagcgccgugaucgaggcccugccccggaacauggugcugaccugccaggggagcgacgacaucaagaagcuccuggacucccagggccgcaaggacaucaagcugaucgacaucgcccucagcaaggccgacucccgccgguucgagaacgcggucugggaccagugcaaggaccugugccacaugcacaccggggugguggucgagaagaagaagcgcggcgggaaggaggagaucacgccccacugcgcccugauggacugcaucauguacgacgccgccgugagcggcggccucaacaucccggugcugcgggcgguccugccccgcgacaugguguuccggaccuccagccccaaggugguccucugaggacuaguuauaagacugacuagcccgaugggccucccaacgggcccuccuccccuccuugcaccgagauuaaucaaaggcucuuuucagagccaccaaaaaaaaaaaaaaaaaaaaaaaaaaaaaaaaaaaaaaaaaaaaaaaaaaaaaaaaaaaaaaaaagaauu

SEQ ID NO: 19035 - RNA, 1955 nt, Artificial Sequence
  mRNA product Design i-3 (hSL-A64-N5) comprising derived and/or modified sequence from LASV(Lassa virus/H.sapiens-wt/NGA/2018/ISTH_0959;Clade II)__AVV65100__SP-HsPLAT_NP(2-569) (opt1)
aggagaaagcuuaccauggacgccaugaagcgcggccugugcugcgugcuccugcugugcggggccgucuucgugagccccagcgccuccaaggaggugaaguccuuccuguggacccagagccuccgccgggagcugagcggcuacugcuccaacaucaagcugcaggucgugaaggacgcccaggcgcuccugcacgggcuggacuucagcgagguguccaacguccagcgccucaugcggaagcagaagcgcgacgacagcgaccugaagcggcugcgcgaccucaaccaggccgugaacaaccugguggagcugaaguccacccagcagaaguccauccuccgggucggcacccugaccagcgacgaccugcucacccuggccgccgaccuggagaagcucaagagcaaggugauccgcaccgagcggccccuguccagcgggguguacaugggcaaccuguccacgcagcagcucgagcagcgccgggcccugcugaaccucaucgggauggucggcggcgcgcaggggacccagccgggccgcgacgggguggugcgggucugggacgugaagaaccccgaccugcugaacaaccaguucggcaccaugcccagccucacccuggccugccugacgaagcagggccagguggaccucaacgacgucgugcuggcccugaccgaccucgggcugaucuacaccgccaaguaccccaacuccagcgaccuggaccgccucucccagagccacccgauccugaacaugguggacaccaagaaguccagccugaacaucagcggcuucaacuucucccucggggcggccgucaaggccggcgccugcaugcuggacgggggcaacaugcuggagacgaucaaggugacgccccagaccauggacggcauccucaagagcauccugaaggugaagaagucccuggggauguucgucagcgacacccccggcgagcggaaccccuacgagaacauccucuacaagaucugccuguccggggacggcuggccguacaucgccagccgcaccuccaucguggggcgggcgugggagaacaccaccguggaccuggagagcgacggcaagccccacaaggucggcaccgccggguccaacaagagccuccaguccgccggcuuccccacggggcugaccuacagccagcugaugacccugaaggacuccaugaugcagcucgaccccagcgccaagaccuggaucgacaucgagggccgcccggaggaccccguggagaucgcccuguaccagcccauguccgggugcuacauccacuucuuccgggagcccacggaccugaagcaguucaagcaggacgcgaaguacagccacggcaucgacgucgccgaccucuucccggcccagcccggccugaccuccgccgugaucgaggcccugccccgcaacauggugcugaccugccaggggagcgacgacaucaagcggcuccuggacagccagggccgcaaggacaucaagcucaucgacaucgcgcuguccaagaccgacagccgccgguucgagaacgccgucugggaccagugcaaggaccugugccacaugcacacgggggugguggucgagaagaagaagcgcggcgggaaggaggagaucacgccccacugcgcccucauggacugcaucauguacgacgccgccguguccggcggccugaacaucccggugcugcgggcgguccucccccgcgacaugguguuccggaccagcucccccaaggugguccugugaggacuaguuauaagacugacuagcccgaugggccucccaacgggcccuccuccccuccuugcaccgagauuaaucaaaggcucuuuucagagccaccaaaaaaaaaaaaaaaaaaaaaaaaaaaaaaaaaaaaaaaaaaaaaaaaaaaaaaaaaaaaaaaaagaauu

SEQ ID NO: 19036 - RNA, 1955 nt, Artificial Sequence
  mRNA product Design i-3 (hSL-A64-N5) comprising derived and/or modified sequence from LASV(LASV003-NIG-2008;Clade II)__AIT17581__SP-HsPLAT_NP(2-569) (opt1)
aggagaaagcuuaccauggacgccaugaagcgcggccugugcugcgugcuccugcugugcggggccgucuucgugagccccagcgccuccaaggaggugaaguccuuccuguggacccagagccuccgccgggagcugagcggcuacugcuccagcaucaagcugcaggucgugaaggacgcccaggcgcuccugcacgggcuggacuucuccgaggugagcaacguccagcgccucaugcggaagcagaagcgcgacgacuccgaccugaagcggcugcgcgaccucaaccaggccgugaacaaccugguggagcucaagagcacccagcagaaguccguccugcgggugggcacccugaccagcgacgaccugcucacccuggccgccgaccuggagaagcucaaguccaaggugauccgcaccgagcggccccugagcuccggggucuacaugggcaaccugagcgcccagcagcucgagcagcgccggacgcugcugaacaugaucgggauggugggcggcgcgcaggggacccagccgggccgcgacggggugguccgggugugggacgugaagaaccccgaccuccugaacaaccaguucggcaccaugcccucccugacccucgccugccugacgaagcaggggcaggucgaccugaacgacguggugcucgcccugaccgaccugggccucaucuacaccgccaaguaccccaacagcuccgaccuggaccgccugagccagagccacccgauccucuccauggucgacaccaagaaguccagccugaacaucagcggcuacaacuucucccugggggcggccgugaaggccggcgccugcaugcucgacgggggcaacaugcuggagacgaucaaggugacgccccagaccauggacggcauccucaagagcauccugaaggucaagaagucccuggggauguucgugagcgacacccccggcgagcggaaccccuacgagaacauccuguacaagaucugccucuccggggacggcuggccguacaucgccagccgcaccuccaucguggggcgggcgugggagaacaccaccgucgaccuggagagcgacggcaagccccagaaggugggcaccgccggguccaacaagagccugcaguccgccggcuuccccacggggcucaccuacagccagcugaugacccugaaggacuccaugaugcagcuggaccccagcgccaagaccuggaucgacaucgagggccgcccggaggaccccgucgagaucgcccucuaccagcccauguccgggugcuacauccacuucuuccgggagcccacggaccugaagcaguucaagcaggacgcgaaguacagccacggcaucgacgugaccgaccuguucccggcccagcccggccucaccagcgccgugaucgaggcccugccccgcaacaugguccugaccugccagggguccgacgacaucaagcggcuccuggacagccagggccgccgcgacaucaagcugaucgacaucgcccucuccaaggcggacagccggcgcuucgagaacgccgugugggaccagugcaaggaccugugccacaugcacacggggguggucguggagaagaagaagcggggcgggaaggaggagaucacgccccacugcgcccugauggacugcaucauguacgacgccgccguguccggcggccucaacaucccgguccugcgcgcggugcugccccgggacaugguguuccgcaccagcucccccaaggucgugcucugaggacuaguuauaagacugacuagcccgaugggccucccaacgggcccuccuccccuccuugcaccgagauuaaucaaaggcucuuuucagagccaccaaaaaaaaaaaaaaaaaaaaaaaaaaaaaaaaaaaaaaaaaaaaaaaaaaaaaaaaaaaaaaaaagaauu

SEQ ID NO: 19037 - RNA, 1955 nt, Artificial Sequence
  mRNA product Design i-3 (hSL-A64-N5) comprising derived and/or modified sequence from LASV(LASV035-NIG-2009;Clade II)__AIT17589__SP-HsPLAT_NP(2-569) (opt1)
aggagaaagcuuaccauggacgccaugaagcgcggccugugcugcgugcuccugcugugcggggccgucuucgugagccccagcgccuccaaggaggugaaguccuuccuguggacccagagccuccgccgggagcugagcggcuacugcuccagcaucaagcugcaggucgugaaggacgcccaggcgcuccugcacgggcuggacuucuccgaggugagcaacguccagcgccucaugcggaagcagaagcgcgacgacuccgaccugaagcggcugcgcgaccucaaccaggccgugaacaaccugguggagcucaagagcacccagcagaaguccauccugcgggucggcacgcugaccagcgacgaccugcucacccuggccgccgaccuggagaagcucaaguccaaggugauccgcaccgagcggccccugagcuccgggguguacaugggcaaccugagcgcccagcagcucgagcagcgccgggcgcugcugaacaugaucgggauggucggcggcgcccaggggacgcagccgggccgcgacgggguggugcgggucugggacgugaagaaccccgaccuccugaacaaccaguucggcaccaugcccucccugacccucgccugccugaccaagcagggccagguggaccugaacgacgccguccucgcgcugacggaccuggggcucaucuacaccgccaaguaccccaacagcuccgaccuggaccgccugagccagagccacccgauccucaacaugguggacaccaagaaguccagccugaacaucuccggcuacaacuucagccugggggccgccgugaaggccggcgcgugcaugcucgacgggggcaacaugcuggagaccaucaaggucacgccccagaccauggacggcauccugaaguccauccucaaggugaagcggagccuggggauguucguguccgacacccccggcgagcgcaaccccuacgagaacauccuguacaagaucugccucagcggggacggcuggccguacaucgccucccggaccagcaucgucgggcgcgccugggagaacacgaccguggaccuggaguccgacggcaagccccagaaggugggcaccaccgggagcaacaagucccugcagagcgccggcuuccccacggggcucaccuacucccagcugaugacccugaaggacagcaugaugcagcuggaccccuccgccaagaccuggaucgacaucgagggccggccggaggaccccgucgagaucgcgcucuaccagcccaugagcgggugcuacauccacuucuuccgcgagcccacggaccugaagcaguucaagcaggacgccaaguacucccacggcaucgacguggccgaccuguucccggcccagcccggccucaccagcgccgucaucgaggcgcugccccggaacauggugcugaccugccaggggagcgacgacaucaagaagcuccuggacucccagggccgccgcgacaucaagcugaucgacaucgcccucagcaaggccgacucccggaaguucgagaacgccgugugggaccagugcaaggaccugugccacaugcacaccggggucgugguggagaagaagaagcgcggcgggaaggaggagaucacgccccacugcgcccugauggacugcaucauguacgacgcggccgucagcggcggccucaacaucccggugcugcgggccgugcugccccgcgacauggucuuccggaccuccagccccaagguggugcucugaggacuaguuauaagacugacuagcccgaugggccucccaacgggcccuccuccccuccuugcaccgagauuaaucaaaggcucuuuucagagccaccaaaaaaaaaaaaaaaaaaaaaaaaaaaaaaaaaaaaaaaaaaaaaaaaaaaaaaaaaaaaaaaaagaauu

SEQ ID NO: 19038 - RNA, 1955 nt, Artificial Sequence
  mRNA product Design i-3 (hSL-A64-N5) comprising derived and/or modified sequence from LASV(LASV1000-NIG-2009;Clade II)__AIT17783__SP-HsPLAT_NP(2-569) (opt1)
aggagaaagcuuaccauggacgccaugaagcgcggccugugcugcgugcuccugcugugcggggccgucuucgugagccccagcgccuccaaggaggugaaguccuuccuguggacccagagccuccgccgggagcugagcggcuacugcuccaacaucaagcugcaggucgugaaggacgcccaggcgcuccugcacgggcuggacuucagcgagguguccaacguccagcgccucaugcggaagcagaagcgcgacgacagcgaccugaagcggcugcgcgaccucaaccaggccgugaacaaccugguggagcugaaguccacccagcagaaguccauccuccgggucggcacgcugaccagcgacgaccugcucacccuggccgccgaccuggagaagcucaagagcaaggugauccgcaccgagcggccccuguccagcgggguguacaugggcaaccuguccacgcagcagcucgagcagcgccgggcccugcugaacaugaucgggauggucggcggcgcgcaggggacccagccgggccgcgacgggguggugcgggucugggacgugaagaaccccgaccuccugaacaaccaguucggcaccaugcccagccugacccucgccugccugacgaagcagggccagguggaccugaacgacgucgugcucgcccugaccgaccuggggcucaucuacaccgccaaguaccccaacuccagcgaccuggaccgccugucccagagccacccgauccucaacaugguggacaccaagaaguccagccugaacaucagcggcuacaacuucucccugggggcggccgucaaggccggcgccugcaugcucgacgggggcaacaugcuggagacgaucaaggugacgccccagaccauggacggcauccucaagagcauccugaaggugaagaagucccuggggauguucgucagcgacacccccggcgagcggaaccccuacgagaacauccuguacaagaucugccucuccggggacggcuggccguacaucgccagccgcaccuccaucguggggcgggcgugggagaacaccaccguggaccuggagagcgacggcaagccccagaaggucggcaccgccggguccaacaagagccugcaguccgccggcuuccccacggggcucaccuacagccagcugaugacccugaaggacuccaugaugcagcuggaccccagcgccaagaccuggaucgacaucgagggccgcccggaggaccccguggagaucgcccucuaccagcccgucuccgggugcuacauccacuucuuccgggagcccacggaccugaagcaguucaagcaggacgcgaaguacagccacggcaucgacguggccgaccuguucccggcccagcccggccucaccuccgccgugaucgaggcccugccccgcaacaugguccugaccugccaggggagcgacgacaucaagcggcuccuggacagccagggccgccgcgacaucaagcugaucgacaucgcgcucuccaaggccgacagccggcgcuucgagaacgccgugugggaccagugcaaggaccugugccacaugcacaccgggguggucguggagaagaagaagcggggcgggaaggaggagaucacgccccacugcgcccugauggacugcaucauguacgacgccgcgguguccggcggccucaacaucccgguccugcgcgccgugcugccccgggacaugguguuccgcaccagcucccccaaggucgugcucugaggacuaguuauaagacugacuagcccgaugggccucccaacgggcccuccuccccuccuugcaccgagauuaaucaaaggcucuuuucagagccaccaaaaaaaaaaaaaaaaaaaaaaaaaaaaaaaaaaaaaaaaaaaaaaaaaaaaaaaaaaaaaaaaagaauu

SEQ ID NO: 19039 - RNA, 1955 nt, Artificial Sequence
  mRNA product Design i-3 (hSL-A64-N5) comprising derived and/or modified sequence from LASV(LASV221-NIG-2010;Clade II)__AIT17625__SP-HsPLAT_NP(2-569) (opt1)
aggagaaagcuuaccauggacgccaugaagcgcggccugugcugcgugcuccugcugugcggggccgucuucgugagccccagcgccuccaaggaggugaaguccuuccuguggacccagagccuccgccgggagcugagcggcuacugcuccagcaucaagcugcaggucgugaaggacgcccaggcgcuccugcacgggcuggacuucuccgaggugagcaacguccagcgccucaugcggaagcagcgccgggacgacuccgaccugaagcgccugcgggaccucaaccaggccgugaacaaccugguggagcucaagagcacccagcagaaguccauccugcgcgucggcacgcugaccagcgacgaccugcucacccuggccgccgaccuggagaagcucaaguccaaggugauccggaccgagcgcccccugagcuccgggguguacaugggcaaccugagcacgcagcagcucgagcagcggcgcgcccugcugaacaugaucgggauggucggcggcgcgcaggggacccagccgggccgggacgggguggugcgcgucugggacgugaagaaccccgaccuccugaacaaccaguucggcaccaugcccucccugacccucgccugccugacgaagcagggccagguggaccugaacgacgccguccucgcccugaccgaccuggggcucaucuacaccgcgaaguaccccaacagcuccgaccuggaccggcugagccagagccacccgauccucaacaugguggacaccaagaaguccagccugaacaucuccggcuacaacuucagccugggggccgccgugaaggccggcgccugcaugcucgacgggggcaacaugcuggagacgaucaaggucacgccccagaccguggacggcauccugaaguccauccucaaggugaagcgcagccuggggauguucgucuccgacacccccggcgagcggaaccccuacgagaacauccuguacaagaucugccucagcggggacggcuggccguacaucgcgucccgcaccagcaucguggggcgggccugggagaacaccaccguggaccuggaguccgacggcaagccccagaaggucggcaccgccgggagcaacaagucccugcagagcgccggcuuccccacggggcucaccuacucccagcugaugacccugaaggacagcaugaugcagcuggaccccuccgccaagaccuggaucgacaucgagggccgcccggaggaccccguggagaucgcgcucuaccagcccaugagcgggugcuacauccacuucuuccgggagcccacggaccugaagcaguucaagcaggacgccaaguacucccacggcaucgacgucgccgaccuguucccggcccagcccggccucaccagcgccgugaucgaggcgcugccccgcaacauggugcugaccugccaggggagcgacgacaucaagcgccuccuggacucccagggccggcgcgacaucaagcugaucgacaucgcccucagcaaggccgacucccggaaguucgagaacgccgucugggaccagugcaaggaccugugccacaugcacaccggggugguggucgagaagaagaagcgcggcgggaaggaggagaucacgccccacugcgcccugauggacugcaucauguacgacgcggccgugagcggcggccucaacaucccggugcugcgggccguccugccccgcgacaugguguuccggaccuccagccccaaggugguccucugaggacuaguuauaagacugacuagcccgaugggccucccaacgggcccuccuccccuccuugcaccgagauuaaucaaaggcucuuuucagagccaccaaaaaaaaaaaaaaaaaaaaaaaaaaaaaaaaaaaaaaaaaaaaaaaaaaaaaaaaaaaaaaaaagaauu

SEQ ID NO: 19040 - RNA, 1955 nt, Artificial Sequence
  mRNA product Design i-3 (hSL-A64-N5) comprising derived and/or modified sequence from LASV(LASV237-NIG-2010;Clade II)__AIT17639__SP-HsPLAT_NP(2-569) (opt1)
aggagaaagcuuaccauggacgccaugaagcgcggccugugcugcgugcuccugcugugcggggccgucuucgugagccccagcgccuccaaggaggugaaguccuuccuguggacccagagccuccgccgggagcugagcggcuacugcuccaacaucaagcugcaggucgugaaggacgcccaggcgcuccugcacgggcuggacuucagcgagguguccaacguccagcgccucaugcggaagcagaagcgcgacgacagcgaccugaagcggcugcgcgaccucaaccaggccgugaacaaccugguggagcugaaguccacccagcagaaguccauccuccgggucggcacccugaccagcgacgaccugcucacccuggccgccgaccuggagaagcucaagagcaaggugauccgcaccgagcggccccuguccagcgggguguacaugggcaaccuguccacgcagcagcucgagcagcgccgggcccugcugaacaugaucgggauggucggcggcgcgcaggggacccagccgggccgcgacgggguggugcgggucugggacgugaagaaccccgaccuccugaacaaccaguucggcaccaugcccagccugacccucgccugccugacgaagcagggccagguggaccugaacgacgccguccucgcccugaccgaccuggggcucaucuacaccgcgaaguaccccaacuccagcgaccuggaccgccugucccagagccacccgauccucaacaugguggacaucaagaaguccagccugaacaucagcggcuacaacuucucccugggggccgccgugaaggccggcgccugcaugcucgacgggggcaacaugcuggagaccaucaaggucacgccccagaccauggacggcauccucaagagcauccugaaggugaagcggucccuggggauguucgugagcgacacccccggcgagcgcaaccccuacgagaacauccuguacaagaucugccucuccggggacggcuggccguacaucgcgagccggaccuccaucgucgggcgcgccugggagaacacgaccguggaccuggagagcgacggcaagccccagaaggugggcuccgccgggagcaacaagucccugcagagcgccggcuuccccaccgggcucaccuacucccagcugaugacgcugaaggacagcaugaugcagcuggaccccuccgccaagaccuggaucgacaucgagggccggccggaggaccccgucgagaucgcgcucuaccagcccaugagcgggugcuacauccacuucuuccgcgagcccaccgaccugaagcaguucaagcaggacgccaaguacucccacggcaucgacguggccgaccuguucccggcccagcccggccucaccagcgccgucaucgaggcgcugccccggaacauggugcugacgugccaggggagcgacgacaucaagcgccuccuggacucccagggccgccgggacaucaagcugaucgacaucgcccucagcaaggccgacucccgccgguucgagaacgccgugugggaccagugcaaggaccugugccacaugcacaccggggucgugguggagaagaagaagcgcggcgggaaggaggagaucacgccccacugcgcccugauggacugcaucauguacgacgcggccgucagcggcggccucaacaucccggugcugcgggccgugcugccccgcgacauggucuuccggaccuccagccccaagguggugcucugaggacuaguuauaagacugacuagcccgaugggccucccaacgggcccuccuccccuccuugcaccgagauuaaucaaaggcucuuuucagagccaccaaaaaaaaaaaaaaaaaaaaaaaaaaaaaaaaaaaaaaaaaaaaaaaaaaaaaaaaaaaaaaaaagaauu

SEQ ID NO: 19041 - RNA, 1955 nt, Artificial Sequence
  mRNA product Design i-3 (hSL-A64-N5) comprising derived and/or modified sequence from LASV(LASV253-NIG-2011;Clade II)__AIT17671__SP-HsPLAT_NP(2-569) (opt1)
aggagaaagcuuaccauggacgccaugaagcgcggccugugcugcgugcuccugcugugcggggccgucuucgugagccccagcgccuccaaggaggugaaguccuuccuguggacccagagccuccgccgggagcugagcggcuacugcuccagcaucaagcugcaggucgugaaggacgcccaggcgcuccugcacgggcuggacuucuccgaggugagcaacguccagcgccucaugcggaagcagaagcgcgacgacuccgaccugaagcggcugcgcgaccucaaccaggccgugaacaaccugguggagcucaagagcacccagcagaaguccguccugcgggugggcacccugaccagcgacgaccugcucacccuggccgccgaccuggagaagcucaaguccaaggugauccgcaccgagcggccccugagcuccggggucuacaugggcaaccugagcacgcagcagcucgagcagcgccgggcccugcugaacaugaucgggauggugggcggcgcgcaggggacccagccgggccgcgacggggugguccgggugugggacgugaagaaccccgaccuccugaacaaccaguucggcaccaugcccucccugacccucgccugccugacgaagcaggggcaggucgaccugaacgacguggugcucgcccugaccgaccugggccucaucuacaccgccaaguaccccaacagcuccgaccuggaccgccugagccagagccacccgauccucaacauggucgacaccaagaaguccagccugaacaucuccggcuacaacuucagccugggggcggccgugaaggccggcgccugcaugcucgacgggggcaacaugcuggagacgaucaaggugacgccccagaccauggacggcauccugaaguccauccucaaggucaagaagucccuggggauguucgugagcgacacccccggcgagcggaaccccuacgagaacauccuguacaagaucugccucagcggggacggcuggccguacaucgccucccgcaccagcaucguggggcgggcgugggagaacaccaccgucgaccuggaguccgacggcaagccccagaaggugggcaccgccgggagcaacaagucccugcagagcgccggcuuccccacggggcucaccuacucccagcugaugacccugaaggacagcaugaugcagcuggaccccuccgccaagaccuggaucgacaucgagggccgcccggaggaccccgucgagaucgcccucuaccagcccaugagcgggugcuacauccacuucuuccgggagcccacggaccugaagcaguucaagcaggacgcgaaguacucccacggcaucgacgugaccgaccuguucccggcccagcccggccucaccagcgccgugaucgaggcccugccccgcaacaugguccugaccugccaggggagcgacgacaucaagcggcuccuggacucccagggccgccgcgacaucaagcugaucgacaucgcccucagcaaggcggacucccggcgcuucgagaacgccgugugggaccagugcaaggaccugugccacaugcacacggggguggucguggagaagaagaagcggggcgggaaggaggagaucacgccccacugcgcccugauggacugcaucauguacgacgccgccgugagcggcggccucaacaucccgguccugcgcgcggugcugccccgggacaugguguuccgcaccuccagccccaaggucgugcucugaggacuaguuauaagacugacuagcccgaugggccucccaacgggcccuccuccccuccuugcaccgagauuaaucaaaggcucuuuucagagccaccaaaaaaaaaaaaaaaaaaaaaaaaaaaaaaaaaaaaaaaaaaaaaaaaaaaaaaaaaaaaaaaaagaauu

SEQ ID NO: 19042 - RNA, 1955 nt, Artificial Sequence
  mRNA product Design i-3 (hSL-A64-N5) comprising derived and/or modified sequence from LASV(LASV254-NIG-2011;Clade II)__AIT17675__SP-HsPLAT_NP(2-569) (opt1)
aggagaaagcuuaccauggacgccaugaagcgcggccugugcugcgugcuccugcugugcggggccgucuucgugagccccagcgccuccaaggaggugaaguccuuccuguggacccagagccuccgccgggagcugagcggcuacugcuccagcaucaagcugcaggucgugaaggacgcccaggcgcuccugcacgggcuggacuucuccgaggugagcaacguccagcgccucaugcggaagcagaagcgcgacgacuccgaccugaagcggcugcgcgaccucaaccaggccgugaacaaccugguggagcucaagagcacccagcagaaguccguccugcgggugggcacgcugaccagcgacgaccugcucacccuggccgccgaccuggagaagcucaaguccaaggugauccgcaccgagcggccccugagcuccggggucuacaugggcaaccugagcacgcagcagcucgagcagcgccgggcccugcugaacaugaucgggauggugggcggcgcgcaggggacccagccgggccgcgacggggugguccgggugugggacgugaagaaccccgaccuccugaacaaccaguucggcaccaugcccucccugacccucgccugccugacgaagcaggggcaggucgaccugaacgacgccgugcucgcccugaccgaccugggccucaucuacaccgcgaaguaccccaacagcuccgaccuggaccgccugagccagagccacccgauccucaacaugguggacaccaagaaguccagccugaacaucuccggcuacaacuucagccugggggccgccgucaaggccggcgccugcaugcucgacgggggcaacaugcuggagacgaucaaggugacgccccagaccauggacggcauccugaaguccauccucaaggugaagaagucccuggggauguucgucagcgacacccccggcgagcggaaccccuacgagaacauccuguacaagaucugccucagcggggacggcuggccguacaucgcgucccgcaccagcaucguggggcgggccugggagaacaccaucguggaccuggaguccgacggcaagccccagaaggucggcaccgccgggagcaacaagucccugcagagcgccggcuuccccaccgggcucacguacucccagcugaugacccugaaggacagcaugaugcagcuggaccccuccgccaagaccuggaucgacaucgagggccgcccggaggaccccguggagaucgcgcucuaccagcccaugagcgggugcuacauccacuucuuccgggagcccaccgaccugaagcaguucaagcaggacgccaaguacucccacggcaucgacgucgccgaccuguucccggcccagcccggccucacgagcgccgugaucgaggcgcugccccgcaacauggugcugaccugccaggggagcgacgacaucaagcggcuccuggacucccagggccgccgcgacaucaagcugaucgacaucgcccucagcaaggccgacucccggcgcuucgagaacgccgucugggaccagugcaaggaccugugccacaugcacaccggggugguggucgagaagaagaagcggggcgggaaggaggagaucacgccccacugcgcccugauggacugcaucauguacgacgcggccgugagcggcggccucaacaucccggugcugcgcgccguccugccccgggacaugguguuccgcaccuccagccccaaggugguccucugaggacuaguuauaagacugacuagcccgaugggccucccaacgggcccuccuccccuccuugcaccgagauuaaucaaaggcucuuuucagagccaccaaaaaaaaaaaaaaaaaaaaaaaaaaaaaaaaaaaaaaaaaaaaaaaaaaaaaaaaaaaaaaaaagaauu

SEQ ID NO: 19043 - RNA, 1955 nt, Artificial Sequence
  mRNA product Design i-3 (hSL-A64-N5) comprising derived and/or modified sequence from LASV(Nig08-04;Clade II)__ADU56611__SP-HsPLAT_NP(2-569) (opt1)
aggagaaagcuuaccauggacgccaugaagcgcggccugugcugcgugcuccugcugugcggggccgucuucgugagccccagcgccuccaaggaggugaaguccuuccuguggacccagagccuccgccgggagcugagcggcuacugcuccaacaucaagcugcaggucgugaaggacgcccaggcgcuccugcacgggcuggacuucagcgagguguccaacguccagcgccucaugcggaagcagaagcgcgacgacggcgaccugaagcggcugcgcgaccucaaccaggccgugaacaaccugguggagcucaagagcacccagcagaaguccguccugcggguggggacccugaccagcgacgaccugcucacccuggccgccgaccuggagaagcucaaguccaaggugauccgcaccgagcggccccugagcuccggcgucuacauggggaaccugagcacgcagcagcucgagcagcgcaaggcccugcuguccaugaucggcauggugggcggggcgcagggcacccagccggggcgggacggcgugguccgcgugugggacgugaagaaccccgaccuccugaacaaccaguucgggaccaugcccagccugacccucgccugccugacgaagcagggccaggucgaccugaacgacgccgugcucgcccugaccgaccugggccucaucuacaccgcgaaguaccccaacuccagcgaccuggaccggcugucccagagccacccgauccucaacaugguggacaccaagaaguccagccugaacaucagcggguacaacuucucccugggcgccgccgucaaggccggggccugcaugcucgacggcggcaacaugcuggagacgaucaaggugacgccccagaccauggacgggauccucaagagcauccugaaggugaagcgcucccugggcauguucgucagcgacacccccggggagcggaaccccuacgagaacauccuguacaagaucugccucuccggcgacggguggccguacaucgcgagccgcaccuccaucgugggccgggccugggagaacaccaccguggaccuggagagcgacggcaagccccagaaggucgggaccgccggcuccaacaagagccugcaguccgccggguuccccacgggccucaccuacagccagcugaugacccugaaggacuccaugaugcagcuggaccccagcgccaagaccuggaucgacaucgaggggcgcccggaggaccccguggagaucgcgcucuaccagcccauguccggcugcuacauccacuucuuccgggagcccacggaccugaagcaguucaagcaggacgccaaguacagccacggcaucgacgucaccgaccuguucuccgcccagccggggcucaccagcgccgugaucgaggcccugccccgcaacauggugcugaccugccagggcagcgacgacaucaagaagcuccuggacucccaggggcggcgcgacaucaagcugaucgacaucagccucaacaaggcggacucccgccgguucgagaacgccgucugggaccagugcaaggaccugugccacaugcacacgggcgugguggucgagaagaagaagcgcgggggcaaggaggagaucacgccccacugcgcccugauggacugcaucauguucgacgccgccgugagcggcgggcucaacauccccauccugcgggcggugcugccgcgcgacauggucuuccggaccuccagccccaagguggugcucugaggacuaguuauaagacugacuagcccgaugggccucccaacgggcccuccuccccuccuugcaccgagauuaaucaaaggcucuuuucagagccaccaaaaaaaaaaaaaaaaaaaaaaaaaaaaaaaaaaaaaaaaaaaaaaaaaaaaaaaaaaaaaaaaagaauu

SEQ ID NO: 19044 - RNA, 1958 nt, Artificial Sequence
  mRNA product Design i-3 (hSL-A64-N5) comprising derived and/or modified sequence from LASV(GA391;Clade III)__AAA46284__SP-HsPLAT_NP(2-570) (opt1)
aggagaaagcuuaccauggacgccaugaagcgcggccugugcugcgugcuccugcugugcggggccgucuucgugagccccagcgccuccaaggaggugcgcagcugccuguggacccagucccuccggcgcgagcugagcggcuacugcuccaacaucaagcugcaggucgugaaggacgcccaggcgcuccugcacgggcuggacuucagcgagguguccaacguccagcggcucaugcgcaagcagaagcgggacgacggcgaccugaagcgccugcgggaccucaaccaggccgugaacaaccugguggagcugaaguccacccagcagaaguccguccuccgcguggggacgcugagcuccgacgaccugcucauccuggccgccgaccuggagaagcucaagagcaaggugacccggaccgagcgcccccuguccagcggcgucuacauggggaaccuguccagccagcagcucgaccagcggcgcgcccugcugaacaugaucggcaugaccggcguguccgggggcgggaagggcgcgagcaacgggaucgugcgggucugggacgugaagaacgccgagcuccugaacaaccaguucggcacgaugccgucccugacccucgccugccugaccaagcagggccagguggaccugaacgacgccguccaggcgcucaccgaccuggggcugaucuacacggccaaguaccccaacagcagcgaccucgaccgccugucccagagccaccccauccugaacaugaucgacaccaagaaguccagccucaacaucuccggcuacaacuucagccugggggccgccgugaaggccggcgcgugcaugcuggacggcgggaacaugcucgagaccaucaaggugagcccccagaccauggacggcauccucaagagcauccugaaggucaagaagucccuggggauguucgugagcgacacgccgggcgagcggaaccccuacgagaacauccuguacaagaucugccuguccggggacggcuggagcuacaucgccucccgcaccagcaucgugggccgggccugggagaacaccgucguggaccucgagcaggacaacaagccccagaagaucgggaacggcggguccaacaagagccugcaguccgccggcuucgccgcggggcugaucuacagccagcucaugacccugaaggacuucaagugcuucaaccugauccccaacgccaagacguggauggacaucgagggccgcccggaggaccccguggagaucgcccuguaccagcccuccagcggcugcuacguccacuucuuccgggagcccaccgaccucaagcaguucaagcaggacgccaaguacagccacgggcgcgacgugaccgaccuguucgccgcgcagccgggccugaccuccgccgucaucgaggcccucccccggaacauggugaucacgugccaggggagcgaggacauccgcaagcugcuggagucccagggccgccgggacaucaagcucaucgacaucacccugagcaaggccgacucccgcaaguucgagaacgccgugugggaccaguucaaggaccugugccacaugcacaccggggucgugguggagaagaagaagcggggcggcaaggaggagaucacgccccacugcgcgcucauggacugcaucauguucgacgccgccgucagcgggggccuggacgccaaggugcugcgcgugguccucccccgggacaugguguuccgcaccuccaccccgaaggugguccugugaggacuaguuauaagacugacuagcccgaugggccucccaacgggcccuccuccccuccuugcaccgagauuaaucaaaggcucuuuucagagccaccaaaaaaaaaaaaaaaaaaaaaaaaaaaaaaaaaaaaaaaaaaaaaaaaaaaaaaaaaaaaaaaaagaauu

SEQ ID NO: 19045 - RNA, 1955 nt, Artificial Sequence
  mRNA product Design i-3 (hSL-A64-N5) comprising derived and/or modified sequence from LASV(Nig08-A19;Clade III)__ADU56619__SP-HsPLAT_NP(2-569) (opt1)
aggagaaagcuuaccauggacgccaugaagcgcggccugugcugcgugcuccugcugugcggggccgucuucgugagccccagcgccuccaaggaggugaaguccuuccuguggacccagucccuccgccgggagcugagcggcuacugcuccaacaucaagcugcaggucgugaaggacgcccaggcgcuccugcacgggcuggacuucagcgagguguccaacguccagcgccucaugcggaagcagaagcgcgacgacggcgaccugaagcggcugcgcgaccucaaccaggccgugaacaaccugguggagcucaagagcacccagcagaaguccguccugcggguggggacccugagcuccgacgaccugcucgugcuggccgccgaccuggagaagcucaagagcaaggucgugcgcaccgagcggccccuguccagcggcaucuacauggggaaccuguccagccagcagcucgaccagcgcaaggcccugcugaacaugaucggcaugaccggcgggaacggcgggcggaacaccacguccgacggcaucgugcgcgucugggacgugaagaacgcggagcuccugaacaaccaguucgggaccaugccgagccugacccucgccugccugaccaagcagggccagguggaccugaacgacgccguccaggcccucacggaccugggccugaucuacaccgcgaaguaccccaacuccagcgaccucgaccggcuggcccagagccaccccauccugaacaugaucgacaccaagaaguccagccucaacaucuccggguacaacuucagccugggcgccgccgugaaggccggggcgugcaugcuggacggcggcaacaugcucgagaccaucaaggugagcccccagacgauggacgggauccucaagagcauccugaaggucaagcgcucccugggcauguucaucagcgacaccccgggggagcggaaccccuacgagaacauccuguacaagaucugccuguccggcgacggguggcccuacaucgccagccgcaccuccaucgugggccgggccugggagaacaccguggucgaccucgagagcgacaacaagccccagaagacgggcaacgggggcuccaacaagagccugcaguccgccggguucgccgcgggccugaccuacagccagcucaugacccugaaggacuccaugcugcagcuggacccgaacgccaagaccuggauggacaucgaggggcgccccgaggaccccguggagaucgcccucuaccagcccagcuccggcugcuacauccacuucuuccgggagccgacggaccugaagcaguucaagcaggacgccaaguacagccacggcaucgacgugaccgaccuguucgccgcgcagcccgggcucaccagcgccgucaucgaggcccugccccgcaacauggugaucacgugccagggcuccgaggacauccggaagcugcucgagagccaggggcgccgcgacaucaagcugaucgacaucucccugagcaaggucgacucccggaaguucgagaacgccgugugggaccaguucaaggaccucugccacaugcacaccggcaucguggucgagaagaagaagcgcgggggcaaggaggagaucacgccccacugcgcccugauggacugcaucauguucgacgcggccgugagcggcgggguggacgccaagguccugcgggccgugcucccgcgcgacaugguguuccggaccuccacccccaaggucgugcugugaggacuaguuauaagacugacuagcccgaugggccucccaacgggcccuccuccccuccuugcaccgagauuaaucaaaggcucuuuucagagccaccaaaaaaaaaaaaaaaaaaaaaaaaaaaaaaaaaaaaaaaaaaaaaaaaaaaaaaaaaaaaaaaaagaauu

SEQ ID NO: 19046 - RNA, 1955 nt, Artificial Sequence
  mRNA product Design i-3 (hSL-A64-N5) comprising derived and/or modified sequence from LASV(G1180-SLE-2010;Clade IV)__AIT17169__SP-HsPLAT_NP(2-569) (opt1)
aggagaaagcuuaccauggacgccaugaagcgcggccugugcugcgugcuccugcugugcggggccgucuucgugagccccagcgccuccaaggagaucaagagcuuccuguggacccagucccuccgccgggagcugagcggcuacugcuccaacaucaagcuccagguggucaaggacgcccaggcgcugcugcacgggcuggacuucagcgagguguccaacgugcagcgccucaugcggaaggagcgccgggacgacaacgaccugaagcgccugcgggaccucaaccaggccgucaacaaccugguggagcucaagagcacccagcagaaguccauccugcgcgugggcacccugaccagcgacgaccugcucauccuggccgccgaccuggagaagcucaaguccaaggucauccggaccgagcgcccccugagcgccgggguguacaugggcaaccuguccagccagcagcucgaccagcggcgcgcgcugcuguccaugaucgggaugagcuccggcaaccagcgggcccaggccggccgcgacggggugguccgggugugggacgugaagaacgucgagcuccugaacaaccaguucggcaccaugccgagccugacgcucgccugccugaccaagcagggccagguggaccugaacgacgcggugcaggcccucaccgaccuggggcugaucuacaccgccaaguaccccaacacguccgaccucgaccgccugacccagagccaccccauccugaacaugaucgacaccaagaaguccagccucaacaucagcggguacaacuucucccugggcgccgccgucaaggcgggcgccugcaugcuggacgggggcaacaugcucgagaccaucaaggugagcccccagacgauggacgggauccugaaguccauccugaaggugaagaaggcccucggcauguucaucagcgacaccccgggcgagcggaaccccuacgagaacauccuguacaagaucugccuguccggggacggcuggcccuacaucgccagccgcaccuccaucaccgggcgggccugggagaacacggucguggaccucgagagcgacggcaagccccagaaggcgggguccaacaacagcaacaagucccugcagagcgugggcuucaccgccggccugaccuacucccagcucaugacccugaaggacgccaugcugcagcuggacccgaacgccaagacguggauggacaucgaggggcgccccgaggaccccgucgagaucgcccucuaccagcccagcuccggcugcuacauccacuucuuccgggagccgaccgaccugaagcaguucaagcaggacgcgaaguacagccacgggaucgacgugaccgaccuguucgccgcccagcccggccucaccuccgccgugaucgacgcccugccccgcaacauggucaucacgugccaggggagcgacgacauccgcaagcugcucgagagccagggccggaaggacaucaagcugaucgacaucgcgcuguccaagaccgacagccgcaaguacgagaacgccgugugggaccaguacaaggaccucugccacaugcacaccggcgucgugguggagaagaagaagcgcgggggcaaggaggagaucacgccccacugcgcccugauggacugcaucauguucgacgccgcggucuccgggggccugaacaccagcgugcuccgggccgugcugccgcgggacauggucuuccgcaccuccacgccccggguggugcugugaggacuaguuauaagacugacuagcccgaugggccucccaacgggcccuccuccccuccuugcaccgagauuaaucaaaggcucuuuucagagccaccaaaaaaaaaaaaaaaaaaaaaaaaaaaaaaaaaaaaaaaaaaaaaaaaaaaaaaaaaaaaaaaaagaauu

SEQ ID NO: 19047 - RNA, 1955 nt, Artificial Sequence
  mRNA product Design i-3 (hSL-A64-N5) comprising derived and/or modified sequence from LASV(G1442-SLE-2011;Clade IV)__AIT17181__SP-HsPLAT_NP(2-569) (opt1)
aggagaaagcuuaccauggacgccaugaagcgcggccugugcugcgugcuccugcugugcggggccgucuucgugagccccagcgccuccaaggaggugaaguccuuccuguggacccagagccuccgccgggagcugagcggcuacugcuccaacaucaagcugcaggucgugaaggacgcccaggcgcuccugcacgggcuggacuucagcgagguguccaacguccagcgccucaugcggaagcagcgccgggacgacaacgaccugaagcgccugcgggaccucaaccaggccgugaacaaccugguggagcucaagagcacccagcagaaguccguccugcgcgugggcacccugaccagcgacgaccugcucgugcuggccgccgaccuggagaagcucaaguccaaggucauccggaccgagcgcccccugagcgccgggguguacaugggcaaccuguccagccagcagcucgaccagcggcgcgcgcugcugaacaugaucgggauguccggcggcauccaggggacccggacgggccgcgacggggugguccgggugugggacgugaagaacgccgaccuccugaacaaccaguucggcaccaugccgagccugacccucgccugccugaccaagcaggggcaggucgaccugaacgacguggugcaggcccucacggaccugggccugaucuacaccgcgaaguaccccaacgccuccgaccucgaccgccugacccagagccaccccauccugaacaugaucgacaccaagaaguccagccucaacaucagcggcuacaacuucucccugggggccgccgucaaggccggcgcgugcaugcuggacgggggcaacaugcucgagacgaucaaggugagcccccagaccauggacggcauccugaaguccauccugaaggugaagaagacccucgggauguucaucagcgacaccccgggcgagcggaaccccuacgagaacauccuguacaagaucugccuguccggggacggcuggcccuacaucgccagccgcacguccaucaccgggcgggccugggagaacaccgucguggaccucgagagcgacggcaagccccagaaggccggcuccaacaacagcaacaagucccugcagagcgccggguucgcggccggccugaccuacucccagcucaugacgcugaaggacgccaugcugcagcuggacccgaacgccaagaccuggauggacaucgaggggcgccccgaggaccccguggagaucgcccucuaccagcccagcuccggcugcuacauccacuucuuccgggagccgaccgaccugaagcaguucaagcaggacgcgaaguacagccacgggaucgacgucaccgaccuguucgccgcccagcccggccucacguccgccgugaucgaggcccugccccgcaacauggucaucacgugccagggcagcgacgacaucaagaagcugcucgagucccaggggcgcaaggacaucaagcugaucgacaucgcgcugagcaagaccgacagccggaaguacgagaacgccgugugggaccaguacaaggaccucugccacaugcacaccggcguggucguggagaagaagaagcgcgggggcaaggaggagaucaccccgcacugcgcccugauggacugcaucauguucgacgccgcgguguccgggggccugaacacccucguccugcgggccgugcugccccgcgacaugguguuccggaccagcacgccccgcgucgugcucugaggacuaguuauaagacugacuagcccgaugggccucccaacgggcccuccuccccuccuugcaccgagauuaaucaaaggcucuuuucagagccaccaaaaaaaaaaaaaaaaaaaaaaaaaaaaaaaaaaaaaaaaaaaaaaaaaaaaaaaaaaaaaaaaagaauu

SEQ ID NO: 19048 - RNA, 1955 nt, Artificial Sequence
  mRNA product Design i-3 (hSL-A64-N5) comprising derived and/or modified sequence from LASV(G3010-SLE-2013;Clade IV)__AIT17345__SP-HsPLAT_NP(2-569) (opt1)
aggagaaagcuuaccauggacgccaugaagcgcggccugugcugcgugcuccugcugugcggggccgucuucgugagccccagcgccuccaaggagaucaagagcuuccuguggacccagucccuccgccgggagcugagcggcuacugcuccaacaucaagcuccagguggucaaggacgcccaggcgcugcugcacgggcuggacuucagcgagguguccaacgugcagcgccucaugcggaaggagcgccgggacgacaacgaccugaagcgccugcgggaccucaaccaggccgucaacaaccugguggagcucaagagcacccagcagaaguccauccugcgcgugggcacccugaccagcgacgaccugcucauccuggccgccgaccuggagaagcucaaguccaaggucacccggaccgagcgcccccugagcgccgggguguacaugggcaaccuguccagccagcagcucgaccagcggcgcgcgcugcuguccaugaucgggaugagcuccggcgugcagggcgcccgggccgggcgcgacggcgucgugcgggugugggacgucaagaacgccgagcuccugaacaaccaguucgggacgaugccgagccugacccucgcgugccugaccaagcagggccagguggaccugaacgacgugguccaggcccucaccgaccuggggcugaucuacacggccaaguaccccaacaccuccgaccucgaccgccugacccagagccaccccauccugaacaugaucgacaccaagaaguccagccucaacaucagcggcuacaacuucucccugggcgccgccgugaaggcgggggccugcaugcuggacggcgggaacaugcucgagacgaucaaggugagcccccagaccauggacggcauccugaaguccauccugaaggucaagaaggcccucggcauguucaucagcgagaccccgggggagcggaaccccuacgagaacauccuguacaagaucugccuguccggcgacggguggcccuacaucgccagccgcaccuccaucacgggccgggccugggagaacaccgugguggaccucgagagcgacgggaagccccagaaggcgggcuccaacaacagcaacaagucccugcagagcgccggcuucaccgccgggcugaccuacucccagcucaugacgcugaaggacgccaugcugcagcuggacccgaacgccaagaccuggauggacaucgagggccgccccgaggaccccgucgagguggcgcucuaccagcccagcuccgggugcuacauccacuucuuccgggagccgaccgaccugaagcaguucaagcaggacgccaaguacagccacggcaucgacgugaccgaccuguucgccgcccagcccgggcucacguccgccgucaucgacgcgcugccccgcaacauggugaucacgugccagggcagcgacgacaucaagaagcugcucgagagccagggccgcaaggacaucaagcugaucgacaucgcccuguccaagaccgacagccggaaguacgagaacgccgucugggaccaguacaaggaccucugccacaugcacaccggggugguggucgagaagaagaagcgcggcgggaaggaggagaucaccccgcacugcgcccugauggacugcaucauguucgacgcggccguguccggcgggcugaacaccagcgugcuccgggccguccugccccgcgacaugguguuccggaccuccacgccccgcgugguccugugaggacuaguuauaagacugacuagcccgaugggccucccaacgggcccuccuccccuccuugcaccgagauuaaucaaaggcucuuuucagagccaccaaaaaaaaaaaaaaaaaaaaaaaaaaaaaaaaaaaaaaaaaaaaaaaaaaaaaaaaaaaaaaaaagaauu

SEQ ID NO: 19049 - RNA, 1955 nt, Artificial Sequence
  mRNA product Design i-3 (hSL-A64-N5) comprising derived and/or modified sequence from LASV(G502-SLE-2009;Clade IV)__AIT17127__SP-HsPLAT_NP(2-569) (opt1)
aggagaaagcuuaccauggacgccaugaagcgcggccugugcugcgugcuccugcugugcggggccgucuucgugagccccagcgccuccaaggagaucaagagcuuccuguggacccagucccuccgccgggagcugagcggcuacugcuccaacaucaagcuccagguggucaaggacgcccaggcgcugcugcacgggcuggacuucagcgagguguccaacgugcagcgccucaugcggaaggagcgccgggacgacaacgaccugaagcgccugcgggaccucaaccaggccgucaacaaccugguggagcucaagagcacccagcagaaguccauccugcgcgugggcacccugaccagcgacgaccugcucauccuggccgccgaccuggagaagcucaaguccaaggucauccggaccgagcgcccccugagcgccgggguguacaugggcaaccuguccagccagcagcucgaccagcggcgcgcgcugcuguccaugaucgggaugagcggcggcaaccagggggugcgggccggcaaggacggggucgugcgcgugugggacgucaagaacgccgagcuccugaacaaccaguucggcaccaugccgucccugacgcucgccugccugaccaagcagggccagguggaccugaacgacgcggugcaggcccucaccgaccuggggcugaucuacaccgccaaguaccccaacacgagcgaccucgaccggcugacccagucccaccccauccugaacaugaucgacaccaagaaguccagccucaacaucuccggcuacaacuucagccugggggccgccgucaaggcgggcgccugcaugcuggacgggggcaacaugcucgagaccaucaaggugagcccccagacgauggacggcauccucaagagcauccugaaggugaagaaggcccuggggauguucaucuccgacaccccgggcgagcgcaaccccuacgagaacauccuguacaagaucugccugagcggggacggcuggcccuacaucgccucccggaccagcaucaccgggcgcgccugggagaacacggucguggaccucgaguccgacggcaagccccagaaggcgggcagcaacaacuccaacaagagccugcaguccgccggguucaccgccggccugaccuacagccagcucaugacccugaaggacgccaugcugcagcuggacccgaacacgaagaccuggauggacaucgaggggcggcccgaggaccccguggagaucgcccucuaccagcccuccagcggcugcuacauccacuucuuccgcgagccgaccgaccugaagcaguucaagcaggacgcgaaguacucccacgggaucgacgucaccgaccuguucgccgcccagcccggccucacgagcgccgugaucgacgcccugccccggaacauggugaucacgugccagggcuccgacgacauccgcaagcugcucgagagccaggggcgcaaggacaucaagcugaucgacaucgcgcugaacaagaccgacagccggaaguacgagaacgccgucugggaccaguacaaggaccucugccacaugcacaccggcguggucguggagaagaagaagcgcgggggcaaggaggagaucaccccgcacugcgcccugauggacugcaucauguucgacgccgcgguguccgggggccugaacaccagcguccuccgggccgugcugccccgcgacaugguguuccggaccuccacgccccgcgucgugcugugaggacuaguuauaagacugacuagcccgaugggccucccaacgggcccuccuccccuccuugcaccgagauuaaucaaaggcucuuuucagagccaccaaaaaaaaaaaaaaaaaaaaaaaaaaaaaaaaaaaaaaaaaaaaaaaaaaaaaaaaaaaaaaaaagaauu

SEQ ID NO: 19050 - RNA, 1955 nt, Artificial Sequence
  mRNA product Design i-3 (hSL-A64-N5) comprising derived and/or modified sequence from LASV(G733-SLE-2010;Clade IV)__AIT17155__SP-HsPLAT_NP(2-569) (opt1)
aggagaaagcuuaccauggacgccaugaagcgcggccugugcugcgugcuccugcugugcggggccgucuucgugagccccagcgccuccaaggagaucaagagcuuccuguggacccagucccuccgccgggagcugagcggcuacugcuccaacaucaagcuccagguggucaaggacgcccaggcgcugcugcacgggcuggacuucagcgagguguccaacgugcagcgccucaugcggaaggagcgccgggacgacaacgaccugaagcgccugcgggaccucaaccaggccgucaacaaccugguggagcucaagagcacccagcagaaguccgugcugcgcgucggcacccugaccagcgacgagcugcucgugcuggccgccgaccuggagaagcucaaguccaaggugauccggaccgagcgcccccugagcgccggggucuacaugggcaaccuguccagccagcagcucgaccagcggcgcgcgcugcuguccaugaucgggaugagcggcggcaaccagggggcccggaccggccgcgacgggguggugcgggucugggacgugaagaacgccgagcuccugaacaaccaguucggcaccaugccgucccugacccucgccugccugaccaagcagggccagguggaccugaacgacgcgguccaggcccucaccgaccuggggcugaucuacacggccaaguaccccaacaccagcgaccucgaccgccugacccagucccaccccauccugaacaugaucgacaccaagaaguccagccucaacaucuccggcuacaacuucagccugggggccgccgugaaggcgggcgccugcaugcuggacgggggcaacaugcucgagacgaucaaggugagcccccagaccauggacggcauccucaagagcauccugaaggucaagaaggcccuggggauguucaucuccgacaccccgggcgagcggaaccccuacgagaacauccuguacaagaucugccugagcggggacggcuggcccuacaucgccucccgcaccagcaucacggggcgggccugggagaacaccgugguggaccucgaguccgacggcaagccccagaaggcgggcagcaacaacuccaacaagagccugcaguccgccggguucaccgccggccugaccuacagccagcucaugacgcugaaggacgccaugcugcagcuggacccgaacgccaagaccuggauggacaucgaggggcgccccgaggaccccgucgagaucgcgcucuaccagcccuccagcggcugcuacauccacuucuuccgggagccgaccgaccugaagcaguucaagcaggacgccaaguacucccacgggaucgacgugaccgaccuguucgccgcccagcccggccucacgagcgccgugaucgacgcgcugccccgcaacauggucaucacgugccagggcuccgacgacauccgcaagcugcucgagagccaggggcggaaggacaucaagcugaucgacaucgcccugagcaagaucgacucccgcaaguacgagaacgccgugugggaccaguacaaggaccucugccacaugcacaccggcgucgugguggagaagaagaagcgcgggggcaaggaggagaucacgccccacugcgcccugauggacugcaucauguucgacgcggccgucagcgggggccugaacucccucgugcugcgggccgugcugccgcgggacauggucuuccgcaccagcacgccccggguggugcucugaggacuaguuauaagacugacuagcccgaugggccucccaacgggcccuccuccccuccuugcaccgagauuaaucaaaggcucuuuucagagccaccaaaaaaaaaaaaaaaaaaaaaaaaaaaaaaaaaaaaaaaaaaaaaaaaaaaaaaaaaaaaaaaaagaauu

SEQ ID NO: 19051 - RNA, 1955 nt, Artificial Sequence
  mRNA product Design i-3 (hSL-A64-N5) comprising derived and/or modified sequence from MOPV/LASV reassortant(IGS-1;Clade IV)__AFY05578__SP-HsPLAT_NP(2-569) (opt1)
aggagaaagcuuaccauggacgccaugaagcgcggccugugcugcgugcuccugcugugcggggccgucuucgugagccccagcgccuccaaggagaucaagagcuuccuguggacccagucccuccgccgggagcugagcggcuacugcuccaacaucaagcuccagguggucaaggacgcccaggcgcugcugcacgggcuggacuucagcgagguguccaacgugcagcgccucaugcggaaggagcgccgggacgacaacgaccugaagcgccugcgggaccucaaccaggccgucaacaaccugguggagcucaagagcacccagcagaaguccauccugcgcgugggcacccugaccagcgacgaccugcucauccuggccgccgaccuggagaagcuccgguccaaggucauccgcaccgagcggccccugagcgccgggguguacaugggcaaccuguccagccagcagcucgaccagcgccgggcgcugcugaacaugaucgggauguccggcggcaaccagggggcccgcgccggccgggacggggugguccgcgugugggacgugaagaacgccgagcuccugagcaaccaguucggcaccaugccgucccugacgcucgcgugccugaccaagcaggggcaggucgaccugaacgacgccgugcaggcccucaccgaccugggccugaucuacaccgccaaguaccccaacacgagcgaccucgaccggcugacccagucccaccccauccugaacaugaucgacaccaagaaguccagccucaacaucuccggcuacaacuucagccugggggccgcggugaaggccggcgccugcaugcuggacgggggcaacaugcucgagaccaucaaggucagcccccagacgauggacggcauccucaagagcauccugaaggugaagaaggcccuggggauguucaucuccgacaccccgggcgagcgcaaccccuacgagaacauccuguacaagaucugccugagcggggacggcuggcccuacaucgccucccggaccagcaucaccgggcgcgcgugggagaacacgguggucgaccucgaguccgacggcaagccccagaaggccgacagcaacaacuccagcaagucccugcagagcgccggcuucaccgccgggcugaccuacucccagcucaugacccugaaggacgccaugcugcagcuggacccgaacgcgaagacguggauggacaucgagggccggcccgaggaccccguggagaucgcccucuaccagcccagcuccgggugcuacauccacuucuuccgcgagccgaccgaccugaagcaguucaagcaggacgccaaguacagccacggcaucgacgugaccgaccuguucgccacccagcccgggcucacguccgccgucaucgacgcgcugccccgcaacauggugaucacgugccagggcagcgacgacauccggaagcugcucgagagccagggccgcaaggacaucaagcugaucgacaucgaccuguccaagaccgacagccggaaguacgagaacgccgugugggaccaguacaaggaccucugccacaugcacaccggggucguggucgagaagaagaagcgcggcgggaaggaggagaucaccccgcacugcgcccugauggacugcaucauguucgacgccgcgguguccggcgggcugaacaccagcgugcuccgggccguccugccccgcgacaugguguuccggaccuccacgccccgcgugguccugugaggacuaguuauaagacugacuagcccgaugggccucccaacgggcccuccuccccuccuugcaccgagauuaaucaaaggcucuuuucagagccaccaaaaaaaaaaaaaaaaaaaaaaaaaaaaaaaaaaaaaaaaaaaaaaaaaaaaaaaaaaaaaaaaagaauu

SEQ ID NO: 19052 - RNA, 1955 nt, Artificial Sequence
  mRNA product Design i-3 (hSL-A64-N5) comprising derived and/or modified sequence from LASV(LM765-SLE-2012;Clade IV)__AIT17815__SP-HsPLAT_NP(2-569) (opt1)
aggagaaagcuuaccauggacgccaugaagcgcggccugugcugcgugcuccugcugugcggggccgucuucgugagccccagcgccuccaaggagaucaagagcuuccuguggacccagucccuccgccgggagcugagcggcuacugcuccaacaucaagcuccagguggucaaggacgcccaggcgcugcugcacgggcuggacuucagcgagguguccaacgugcagcgccucaugcggaaggagcgccgggacgacaacgaccugaagcgccugcgggaccucaaccaggccgucaacaaccugguggagcucaagagcacccagcagaaguccauccugcgcgugggcacccugaccagcgacgaccugcucauccuggccgccgaccuggagaagcucaaguccaaggucacccggaccgagcgcccccugagcgccgggguguacaugggcaaccuguccagccagcagcucgaccagcggcgcgcgcugcuggacaugaucgggauguccggcagcaaccagggcgcccgggccgggcgcgacggcgugguccgggugugggacgugaagaacgccgagcuccugaacaaccaguucgggacgaugccgucccugacccucgcgugccugaccaagcagggccaggucgaccugaacgacgccgugcaggcccucaccgaccuggggcugaucuacacggccaaguaccccaacaccagcgaccucgaccgccugacccagucccaccccauccugaacaugaucgacaccaagaaguccagccucaacaucuccggcuacaacuucagccugggcgccgcggugaaggccggggccugcaugcuggacggcgggaacaugcucgagacgaucaaggucagcccccagaccauggacggcauccucaagagcauccugaaggugaagaaggcccugggcauguucaucuccgacgccccgggggagcggaaccccuacgagaacauccuguacaagaucugccugagcggcgacggguggcccuacaucgcgucccgcaccagcaucaccggccgggccugggagaacacgguggucgaccucgaguccgacgggaagccccagaaggccggcagcaacggcuccaacaagagccugcaguccgccggguucaccgccggccugaccuacagccagcucaugacccugaaggacgcgaugcugcagcuggacccgaacgccaagacguggauggacaucgaggggcgccccgaggaccccguggagaucgcccucuaccagcccuccagcggcugcuacauccacuucuuccgggagccgaccgaccugaagcaguucaagcaggacgccaaguacucccacgggaucgacgugaccgaccuguucgccgcgcagcccggccucaccagcgccgucaucgacgcccugccccgcaacauggugaucacgugccagggcuccgacgacauccgcaagcuguucgagagccaggggcggaaggacaucaagcucaucgacaucgcccugagcaagaccgacucccgcaaguacgagaacgcggugugggaccaguacaaggaccugugccacaugcacaccggcaucgucguggagaagaagaagcgcgggggcaaggaggagaucacgccccacugcgcccucauggacugcaucauguucgacgccgccgucagcgggggccugaacaccuccgugcugcgggccgugcucccgcgggacauggucuuccgcaccagcacgccccggguggugcugugaggacuaguuauaagacugacuagcccgaugggccucccaacgggcccuccuccccuccuugcaccgagauuaaucaaaggcucuuuucagagccaccaaaaaaaaaaaaaaaaaaaaaaaaaaaaaaaaaaaaaaaaaaaaaaaaaaaaaaaaaaaaaaaaagaauu

SEQ ID NO: 19053 - RNA, 1955 nt, Artificial Sequence
  mRNA product Design i-3 (hSL-A64-N5) comprising derived and/or modified sequence from LASV(LM776-SLE-2012;Clade IV)__AIT17825__SP-HsPLAT_NP(2-569) (opt1)
aggagaaagcuuaccauggacgccaugaagcgcggccugugcugcgugcuccugcugugcggggccgucuucgugagccccagcgccuccaaggagaucaagagcuuccuguggacccagucccuccgccgggagcugagcuccuacugcagcaacaucaagcuccagguggucaaggacgcccaggcgcugcugcacggccuggacuucuccgaggugagcaacgugcagcgccucaugcggaaggagcgccgggacgacaacgaccugaagcgccugcgggaccucaaccaggccgucaacaaccugguggagcugaaguccacccagcagaaguccauccuccgcguggggacccugaccuccgacgaccugcucauccuggccgccgaccuggagaagcucaagagcaaggucacccggaccgagcgcccccuguccgccggcguguacauggggaaccugagcucccagcagcucgaccagcggcgcgcgcugcugagcaugaucggcauguccgggagcaaccagggcgcccgggccggccgcgacggggugguccgggugugggacgugaagaacgccgagcuccugaacaaccaguucggcacgaugccgucccugacccucgcgugccugaccaagcaggggcaggucgaccugaacgacgccgugcaggcccucaccgaccugggccugaucuacacggccaaguaccccaacaccagcgaccucgaccgccugacccagagccaccccauccugaacaugaucgacaccaagaaguccagccucaacaucuccggguacaacuucagccugggcgccgcggugaaggccggcgccugcaugcuggacgggggcaacaugcucgagacgaucaaggucagcccccagaccauggacgggauccucaagagcauccugaaggugaagaaggcccugggcauguucaucuccgacaccccgggcgagcggaaccccuacgagaacauccuguacaagaucugccugagcggggacggcuggcccuacaucgccucccgcaccagcaucacggggcgggcgugggagaacaccguggucgaccucgaguccgacggcaagccccagaaggccgggagcaacaacuccaacaagagccugcaguccgccggcuucaccgccggccugaccuacagccagcucaugacgcugaaggacgccaugcugcagcuggacccgaacgcgaagaccuggauggacaucgaggggcgccccgaggaccccguggagguggcccucuaccagcccuccagcggcugcuacauccacuucuuccgggagccgaccgaccugaagcaguucaagcaggacgccaaguacucccacgggaucgacgucaccgaccuguucgccgcccagcccggccucacgagcgcggugaucgacgcccugccccgcaacauggugaucacgugccaggggagcgacgacauccgcaagcugcucgagucccagggccggaaggacaucaagcugaucgacaucgcccugagcaagaccgacucccgcaaguacgagaacgccgucugggaccaguacaaggaccucugccacaugcacaccggcguggucguggagaagaagaagcgcgggggcaaggaggagaucaccccgcacugcgcgcugauggacugcaucauguucgacgccgccgugagcgggggccugaacaccuccguccuccgggccgugcugccccgggacaugguguuccgcaccagcacgccccgggucgugcugugaggacuaguuauaagacugacuagcccgaugggccucccaacgggcccuccuccccuccuugcaccgagauuaaucaaaggcucuuuucagagccaccaaaaaaaaaaaaaaaaaaaaaaaaaaaaaaaaaaaaaaaaaaaaaaaaaaaaaaaaaaaaaaaaagaauu

SEQ ID NO: 19054 - RNA, 1955 nt, Artificial Sequence
  mRNA product Design i-3 (hSL-A64-N5) comprising derived and/or modified sequence from LASV(Mad39;Clade IV)__ANH09723__SP-HsPLAT_NP(2-569) (opt1)
aggagaaagcuuaccauggacgccaugaagcgcggccugugcugcgugcuccugcugugcggggccgucuucgugagccccagcgccuccaaggagaucaagagcuuccuguggacccagucccuccgccgggagcugagcggcuacugcuccaacaucaagcuccagguggucaaggacgcccaggcgcugcugcacgggcuggacuucagcgagguguccaacgugcagcgccucaugcggaagcagcgccgggacgacaacgaccugaagcgccugcgggaccucaaccaggccgucaacaaccugguggagcugaaguccacccagcagaaguccgugcuccgcgucggcacgcugaccagcgacgaccugcucacccuggccgccgaccuggagaagcucaaguccaaggugacccggacggagcgcccccugaccgccgggguguacaugggcaaccugagcucccagcagcucgaccagcggcgcgcgcugcugaacaugaucgggaugagcggcggcaaccagggggcccggaccggccgcgacggggucgugcgggugugggacgucaagaacgccgagcuccugaacaaccaguucggcaccaugccgucccugacgcucgccugccugaccaagcagggccagguggaccugaacgacgugguccaggcgcucaccgaccuggggcugaucuacaccgccaaguaccccaacacgagcgaccucgaccgccugacccagucccaccccauccugaacaugaucgacaccaacaagagcucccucaacaucagcggcuacaacuucagccugggggccgccgugaaggccggcgcgugcaugcuggacgggggcaacaugcucgagaccaucaaggugagcccccagacgauggacggcauccucaagagcauccugaaggucaagaagucccuggggauguucaucagcgacaccccgggcgagcggaaccccuacgagaacauccuguacaagaucugccuguccggggacggcuggcccuacaucgccagccgcaccuccaucaccgggcgggccugggagaacacggugguggaccucgagagcggcggcaagccccagaaggccggguccaacaacagcaacaagucccugcagagcgccggcuucgcggccgggcugaccuacucccagcucaugacccugaaggacgccaugcugcagcuggacccgaacgccaagaccuggauggacaucgagggccgccccgaggaccccgucgagaucgcccucuaccagcccaucagcgggugcuacauccacuucuuccgggagccgacggaccugaagcaguucaagcaggacgcgaaguacucccacggcaucgacgugaccgaccuguucgccgcccagcccggccucaccagcgccgugaucgaggcccugccccgcaacauggucaucacgugccagggguccgacgacauccgcaagcuguucgagagccagggccggaaggacaucaagcucaucgacaucgcgcuguccaagaccgacagccgcaaguacgagaacgccgugugggaccaguacaaggaccugugccacaugcacaccggggucgugguggagaagaagaagaagggcgggaaggaggagaucacgccccacugcgcccucauggacugcaucauguucgacgccgcggucagcggcggccugaacacccuggugcuccgggccgugcugccgcgcgacauggucuuccggaccuccacccccaagguggugcugugaggacuaguuauaagacugacuagcccgaugggccucccaacgggcccuccuccccuccuugcaccgagauuaaucaaaggcucuuuucagagccaccaaaaaaaaaaaaaaaaaaaaaaaaaaaaaaaaaaaaaaaaaaaaaaaaaaaaaaaaaaaaaaaaagaauu

SEQ ID NO: 19055 - RNA, 1955 nt, Artificial Sequence
  mRNA product Design i-3 (hSL-A64-N5) comprising derived and/or modified sequence from LASV(Z0947-SLE-2011;Clade IV)__AIT17841__SP-HsPLAT_NP(2-569) (opt1)
aggagaaagcuuaccauggacgccaugaagcgcggccugugcugcgugcuccugcugugcggggccgucuucgugagccccagcgccuccaaggagaucaagagcuuccuguggacccagucccuccgccgggagcugagcggcuacugcuccaacaucaagcuccagguggucaaggacgcccaggcgcugcugcacgggcuggacuucagcgagguguccaacgugcagcgccucaugcggaaggagcgccgggacgacaacgaccugaagcgccugcgggaccucaaccaggccgucaacaaccugguggagcucaagagcacccagcagaaguccauccugcgcgugggcacccugaccagcgacgaccugcucauccuggccgccgaccuggagaagcucaaguccaaggucacccggaccgagcgcccccugagcgccgggguguacaugggcaaccuguccagccagcagcucgaccagcggcgcgcgcugcugaacaugaucgggauguccggcagcaaccagggcgcccggacggggcgcgacggcgugguccgggugugggacgugaagaacgccgagcuccugaacaaccaguucgggaccaugccgucccugacccucgccugccugaccaagcagggccaggucgaccugaacgacgcggugcaggcccucacggaccuggggcugaucuacaccgccaaguaccccaacaccagcgaccucgaccgccugacccagucccaccccauccugaacaugaucgacacgaagaaguccagccucaacaucuccggcuacaacuucagccugggcgccgccgugaaggcgggggccugcaugcuggacggcgggaacaugcucgagaccaucaaggucagcccccagaccauggacggcauccucaagagcauccugaaggugaagaaggcccugggcauguucaucuccgacgccccgggggagcggaaccccuacgagaacauccuguacaagaucugccugagcggcgacggguggcccuacaucgccucccgcaccagcaucacgggccgggcgugggagaacaccguggucgaccucgaguccgacgggaagccccagaaggccggcagcaacggcuccaacaagagccugcaguccgccggguucaccgccggccugaccuacagccagcucaugacgcugaaggacgccaugcugcagcuggacccgaacgcgaagaccuggauggacaucgaggggcgccccgaggaccccguggagaucgcccucuaccagcccuccagcggcugcuacauccacuucuuccgggagccgaccgaccugaagcaguucaagcaggacgccaaguacucccacgggaucgacgugaccgaccuguucgccgcccagcccggccucacgagcgcggucaucgacgcccugccccgcaacauggugaucacgugccagggcuccgacgacauccgcaagcuguucgagagccaggggcggaaggacaucaagcucaucgacaucgcccugagcaagaccgacucccgcaaguacgagaacgccgugugggaccaguacaaggaccugugccacaugcacaccggcaucgucguggagaagaagaagcgcgggggcaaggaggagaucaccccgcacugcgcgcucauggacugcaucauguucgacgccgccgucagcgggggccugaacaccuccgugcugcgggccgugcucccccgggacauggucuuccgcaccagcacgccccggguggugcugugaggacuaguuauaagacugacuagcccgaugggccucccaacgggcccuccuccccuccuugcaccgagauuaaucaaaggcucuuuucagagccaccaaaaaaaaaaaaaaaaaaaaaaaaaaaaaaaaaaaaaaaaaaaaaaaaaaaaaaaaaaaaaaaaagaauu

SEQ ID NO: 19056 - RNA, 1955 nt, Artificial Sequence
  mRNA product Design i-3 (hSL-A64-N5) comprising derived and/or modified sequence from LASV(Josiah;Clade IV)__NP_694869__SP-HsPLAT_NP(2-569) (opt4)
aggagaaagcuuaccauggacgccaugaagagaggccugugcugcgugcugcugcugugcggcgccguguucgugagccccagcgccagcaaggagaucaagagcuuccuguggacccagagccugagaagagagcugagcggcuacugcagcaacaucaagcugcagguggugaaggacgcccaggcccugcugcacggccuggacuucagcgaggugagcaacgugcagagacugaugagaaaggagagaagagacgacaacgaccugaagagacugagagaccugaaccaggccgugaacaaccugguggagcugaagagcacccagcagaagagcauccugagagugggcacccugaccagcgacgaccugcugauccuggccgccgaccuggagaagcugaagagcaaggugaucagaaccgagagaccccugagcgccggcguguacaugggcaaccugagcagccagcagcuggaccagagaagagcccugcugaacaugaucggcaugagcggcggcaaccagggcgccagagccggcagagacggcguggugagagugugggacgugaagaacgccgagcugcugaacaaccaguucggcaccaugcccagccugacccuggccugccugaccaagcagggccagguggaccugaacgacgccgugcaggcccugaccgaccugggccugaucuacaccgccaaguaccccaacaccagcgaccuggacagacugacccagagccaccccauccugaacaugaucgacaccaagaagagcagccugaacaucagcggcuacaacuucagccugggcgccgccgugaaggccggcgccugcaugcuggacggcggcaacaugcuggagaccaucaaggugagcccccagaccauggacggcauccugaagagcauccugaaggugaagaaggcccugggcauguucaucagcgacacccccggcgagagaaaccccuacgagaacauccuguacaagaucugccugagcggcgacggcuggcccuacaucgccagcagaaccagcaucaccggcagagccugggagaacaccgugguggaccuggagagcgacggcaagccccagaaggccgacagcaacaacagcagcaagagccugcagagcgccggcuucaccgccggccugaccuacagccagcugaugacccugaaggacgccaugcugcagcuggaccccaacgccaagaccuggauggacaucgagggcagacccgaggaccccguggagaucgcccuguaccagcccagcagcggcugcuacauccacuucuucagagagcccaccgaccugaagcaguucaagcaggacgccaaguacagccacggcaucgacgugaccgaccuguucgccacccagcccggccugaccagcgccgugaucgacgcccugcccagaaacauggugaucaccugccagggcagcgacgacaucagaaagcugcuggagagccagggcagaaaggacaucaagcugaucgacaucgcccugagcaagaccgacagcagaaaguacgagaacgccgugugggaccaguacaaggaccugugccacaugcacaccggcguggugguggagaagaagaagagaggcggcaaggaggagaucaccccccacugcgcccugauggacugcaucauguucgacgccgccgugagcggcggccugaacaccagcgugcugagagccgugcugcccagagacaugguguucagaaccagcacccccagaguggugcugugaggacuaguuauaagacugacuagcccgaugggccucccaacgggcccuccuccccuccuugcaccgagauuaaucaaaggcucuuuucagagccaccaaaaaaaaaaaaaaaaaaaaaaaaaaaaaaaaaaaaaaaaaaaaaaaaaaaaaaaaaaaaaaaaagaauu

SEQ ID NO: 19057 - RNA, 1955 nt, Artificial Sequence
  mRNA product Design i-3 (hSL-A64-N5) comprising derived and/or modified sequence from LASV(LP;Clade I)__AAF86702__SP-HsPLAT_NP(2-569) (opt4)
aggagaaagcuuaccauggacgccaugaagagaggccugugcugcgugcugcugcugugcggcgccguguucgugagccccagcaacagcaaggagaucaagagcuuccuguggacccagagccugagaagagagcugagcggcuacugcagcaacaucaagcugcagguggugaaggacgcccaggcccugcugcacggccuggacuucagcgaggugagcaacgugcagagacugaugagaaagcagaagagagacgacgccgaccugaagagacugagagaccugaaccaggccgugaacaaccugguggagcugaagagcacccagcagaagaacgugcugagagugggcacccugagcagcgacgaccugaucacccuggccgccgaccuggagaagcugaagagcaaggugaucagaaccgagagaccccugagcagcggcguguacaugggcaaccugagcagccagcagcuggaccagagaagagcccugcugagcaugaucggcaugagcggcggcccccagggcaacagaaccggcggcgacggcguggugagagugugggacgugaagaacgccgagcugcugaacaaccaguucggcaccaugcccagccugacccuggccugccugaccaagcagggccagguggaccugaacgacgccgugcaggcccugaccgaccugggccugaucuacaccgccaaguaccccaacagcagcgaccuggacaugcugacccagagccaccccauccugggcaugguggacaccaagaagagcagccugaacaucagcggcuacaacuucagccugggcgccgccgugaaggccggcgccugcaugcuggacggcggcaacaugcuggagaccaucaaggugagcccccagaccauggacggcauccugaagagcauccugaaggugaagagaagccugggcauguucaucagcgacacccccggcgagagaaaccccuacgagaacauccuguacaagaucugccugagcggcgagggcuggcccuacaucgccagcagaaccagcaucaccggcagagccugggagaacacccugguggaccuggagagcgacaacaagccccccaagcugaacagcgccggcagcaacaagagccugcaggccgccggccugaacgccggccugaccuacagccagcugaugacccugaaggacugcaugcugcagcuggaccccagcagcaagaccuggaucgacaucgagggcagacccgaggaccccguggagaucgcccuguuccagcccagcagcggcugcuacauccacuucuucagagagcccaccgaccugaagcaguucaagcaggacgccaaguacagccacggcaucgacgugaccgaccuguucagcacccagcccggccugaccagcgccgugaucgaggcccugcccagaaacauggugcugaccugccagggcagcgacgacaucaagaagcugcuggagagccagggcagaagagacaucaagcugaucgacaucagccugagcaaggccgacagcagaaaguucgagaacgccgugugggaccaguacaaggaccugugccacaugcacaccggcguggugguggagaagaagaagagaggcggcaaggaggagaucaccccccacugcgcccugcuggacugcaucauguucgacgccgccaccaccggcagccugaacaucaccacccugagagccgugcugcccagagacaugguguucagaaccagcacccccaagguggugcugugaggacuaguuauaagacugacuagcccgaugggccucccaacgggcccuccuccccuccuugcaccgagauuaaucaaaggcucuuuucagagccaccaaaaaaaaaaaaaaaaaaaaaaaaaaaaaaaaaaaaaaaaaaaaaaaaaaaaaaaaaaaaaaaaagaauu

SEQ ID NO: 19058 - RNA, 1955 nt, Artificial Sequence
  mRNA product Design i-3 (hSL-A64-N5) comprising derived and/or modified sequence from LASV(803213;Clade II)__AAF86704__SP-HsPLAT_NP(2-569) (opt4)
aggagaaagcuuaccauggacgccaugaagagaggccugugcugcgugcugcugcugugcggcgccguguucgugagccccagcgccagcaaggaggugaagagcuuccuguggacccagagccugagaagagagcugagcggcuacugcagcaacaucaagcugcagguggugaaggacgcccaggcccugcugcacggccuggacuucagcgaggugaacaacgugcagagacugaugagaaagcagaagagagacgacggcgaccugaagagacugagagaccugaaccaggccgugaacaaccugguggagcugaagagcacccagcagaagagcauccugagagugggcacccugaccagcgacgaccugcugacccuggccgccgaccuggagaagcugaagagcaaggugaucagaaccgagagaccccugagcagcggcguguacaugggcaaccugagcacccagcagcuggagcagagaagagcccugcugaacaugaucggcauggugggcggcgcccagggcacccagcccggcagagacggcguggugagagugugggacgugaagaaccccgaccugcugaacaaccaguucggcaccaugcccagccugacccuggccugccugaccaagcagggccagguggaccugaacgacgccgugcuggcccugaccgaccugggccugaucuacaccgccaaguaccccaacagcagcgaccuggacagacugagccagagccaccccauccugaacaugguggacaccaagaagagcagccugaacaucagcggcuacaacuucagccugggcgccgccgugaaggccggcgccugcaugcuggacggcggcaacaugcuggagaccaucaaggugaccccccagaccauggacggcauccugaagagcauccugaaggugaagagaagccugggcauguucgugagcgacacccccggcgagagaaaccccuacgagaacauccuguacaagaucugccugagcggcgacggcuggcccuacaucgccagcagaaccagcaucgugggcagagccugggagaacaccaccguggaccuggagagcgacggcaagccccagaaggugggcaccgccggcagcaacaagagccugcagagcgccggcuuccccaccggccugaccuacagccagcugaugacccugaaggacagcaugaugcagcuggaccccagcgccaagaccuggaucgacaucgagggcagacccgaggaccccguggagaucgcccuguaccagcccaugagcggcugcuacauccacuucuucagagagcccaccgaccugaagcaguucaagcaggacgccaaguacagccacggcaucgacguggccgaccuguuccccgcccagcccggccugaccagcgccgugaucgaggcccugcccagaaacauggugcugaccugccagggcagcgacgacaucaagaagcugcuggacagccagggcagaagagacaucaagcugaucgacaucagccugagcaagguggacagcagaaaguucgagaacgccgugugggaccagugcaaggaccugugccacaugcacaccggcguggugguggagaagaagaagagaggcggcaaggaggagaucaccccccacugcgcccugauggacugcaucauguucgacgccgccgugagcggcggccugaacauccccgugcugagagccgugcugcccagagacaugguguucagaaccagcagccccaagguggugcugugaggacuaguuauaagacugacuagcccgaugggccucccaacgggcccuccuccccuccuugcaccgagauuaaucaaaggcucuuuucagagccaccaaaaaaaaaaaaaaaaaaaaaaaaaaaaaaaaaaaaaaaaaaaaaaaaaaaaaaaaaaaaaaaaagaauu

SEQ ID NO: 19059 - RNA, 1958 nt, Artificial Sequence
  mRNA product Design i-3 (hSL-A64-N5) comprising derived and/or modified sequence from LASV(GA391;Clade III)__CAA36646__SP-HsPLAT_NP(2-570) (opt4)
aggagaaagcuuaccauggacgccaugaagagaggccugugcugcgugcugcugcugugcggcgccguguucgugagccccagcgccagcaaggaggugagaagcuuccuguggacccagagccugagaagagagcugagcggcuacugcagcaacaucaagcugcagguggugaaggacgcccaggcccugcugcacggccuggacuucagcgaggugagcaacgugcagagacugaugagaaagcagaagagagacgacggcgaccugaagagacugagagaccugaaccaggccgugaacaaccugguggagcugaagagcacccagcagaagagcgugcugagagugggcacccugagcagcgacgaccugcugauccuggccgccgaccuggagaagcugaagagcaaggugaccagaaccgagagaccccugagcagcggcguguacaugggcaaccugagcagccagcagcuggaccagagaagagcccugcugaacaugaucggcaugaccggcgugagcggcggcggcaagggcgccagcgacggcaucgugagagugugggacgugaagaacgccgagcugcugaacaaccaguucggcaccaugcccagccugacccuggccugccugaccaagcagggccagguggaccugaacgacgccgugcaggcccugaccgaccugggccugaucuacaccgccaaguaccccaacagcagcgaccuggacagacugagccagagccaccccauccugaacaugaucgacaccaagaagagcagccugaacaucagcggcuacaacuucagccugggcgccgccgugaaggccggcgccugcaugcuggacggcggcaacaugcuggagaccaucaaggugagcccccagaccauggacggcauccugaagagcauccugaaggugaagaagagccugggcauguucgugagcgacacccccggcgagagaaaccccuacgagaacauccuguacaagaucugccugagcggcgacggcuggcccuacaucgccagcagaaccagcaucgugggcagagccugggagaacaccgugguggaccuggagcaggacaacaagccccagaagaucggcaacggcggcagcaacaagagccugcagagcgccggcuucgccgccggccugaccuacagccagcugaugacccugaaggacuucaagugcuucaaccugauccccaacgccaagaccuggauggacaucgagggcagacccgaggaccccguggagaucgcccuguaccagcccagcagcggcugcuacgugcacuucuucagagagcccaccgaccugaagcaguucaagcaggacgccaaguacagccacggcaucgacgugaccgaccuguucgccgcccagcccggccugaccagcgccgugaucgaggcccugcccagaaacauggugaucaccugccagggcagcgaggacaucagaaagcugcuggagagccagggcagaagagacaucaagcugaucgacaucacccugagcaaggccgacagcagaaaguucgagaacgccgugugggaccaguucaaggaccugugccacaugcacaccggcguggugguggagaagaagaagagaggcggcaaggaggagaucaccccccacugcgcccugauggacugcaucauguucgacgccgccgugagcggcggccuggacgccaaggugcugagaguggugcugcccagagacaugguguucagaaccagcacccccaagguggugcugugaggacuaguuauaagacugacuagcccgaugggccucccaacgggcccuccuccccuccuugcaccgagauuaaucaaaggcucuuuucagagccaccaaaaaaaaaaaaaaaaaaaaaaaaaaaaaaaaaaaaaaaaaaaaaaaaaaaaaaaaaaaaaaaaagaauu

SEQ ID NO: 19060 - RNA, 1955 nt, Artificial Sequence
  mRNA product Design i-3 (hSL-A64-N5) comprising derived and/or modified sequence from LASV(AV;Clade V)__CCA30315__SP-HsPLAT_NP(2-569) (opt4)
aggagaaagcuuaccauggacgccaugaagagaggccugugcugcgugcugcugcugugcggcgccguguucgugagccccagcgccagcaaggaggugaagagcuuccuguggacccagagccugagaagagagcugagcggcuacugcagcaacaucaagcugcagguggugaaggacgcccaggcccugcugcacggccuggacuucagcgaggugagcaacgugcagagacugaugagaaagcagagaagagacgacagcgaccugaagagacugagagaccugaaccaggccgugaacaaccugguggagcugaagagcacccagcagaagagcgugcugagagugggcacccugagcagcgacgaccugcugacccuggccgccgaccuggagaagcugaagagcaaggugaccagaaccgagagaccccugagcagcggcguguacaugggcaaccugagcagccagcagcuggaccagagaagagcccugcugaaccugaucggcaugaccaacggcagccagggcagccaggccggcagagacggcguggugagagugugggacgugaagaacgccgagcugcugaacaaccaguucggcaccaugcccagccugacccuggccugccugaccaagcagggccagguggaccugaacgacguggugcaggcccugaccgaccugggccugaucuacaccgccaaguaccccaacaccagcgaccuggacagacugacccagagccaccccauccugaacaugaucgacaccaagaagagcagccugaacaucagcggcuacaacuucagccugggcgccgccgugaaggccggcgccugcaugcuggacggcggcaacaugcuggagaccaucaaggugagcccccagagcauggacggcauccugaagagcauccugaaggugaagagagcccugggcauguucgugagcgacacccccggcgagagaaaccccuacgagaacauccuguacaagaucugccugagcggcgacggcuggcccuacaucgccagcagaaccagcaucgugggcagagccugggagaacaccgugguggaccuggagaccgacggcaagccccagaagaucggcagcggcaacagcaacaagagccugcagagcgccggcuucagcgccggccugaccuacagccagcugaugacccugaaggacgccaugcugcagcuggaccccaacgccaagaccuggauggacaucgagggcagacccgaggaccccguggagguggcccuguaccagcccaucagcggcugcuacauccacuucuucagagagcccaccgaccugaagcaguucaagcaggacgccaaguacagccacggcaucgacaucgccgaccuguucgccgcccagcccggccugaccagcgccgugaucgaggcccugcccagaaacauggugaucaccugccagggcagcgaggacaucaagaagcugcuggagagccagggcagaaaggacaucaagcugaucgacaucgcccugagcaagaucgacagcagaaaguucgagaacgccgugugggaccaguacaaggaccugugccacaugcacaccggcguggugguggagaagaagaagagaggcggcaaggaggagaucaccccccacugcgcccugauggacugcaucauguucgacgccgccgugagcggcggccugaacacccuggugcugagagccgugcugcccagagacaugguguucagaaccagcacccccagaguggugcugugaggacuaguuauaagacugacuagcccgaugggccucccaacgggcccuccuccccuccuugcaccgagauuaaucaaaggcucuuuucagagccaccaaaaaaaaaaaaaaaaaaaaaaaaaaaaaaaaaaaaaaaaaaaaaaaaaaaaaaaaaaaaaaaaagaauu

SEQ ID NO: 19061 - RNA, 1955 nt, Artificial Sequence
  mRNA product Design i-3 (hSL-A64-N5) comprising derived and/or modified sequence from LASV(Togo/2016/7082;Clade VI)__AMR44578__SP-HsPLAT_NP(2-569) (opt4)
aggagaaagcuuaccauggacgccaugaagagaggccugugcugcgugcugcugcugugcggcgccguguucgugagccccagcaacagcaaggaggugaagagcuuccuguggacccagagccugagaagagagcugagcggcuacugcagcaacaucaagcugcagguggugaaggacgcccaggcccugcugcacggccuggacuucagcgaggugagcaacgugcagagacugaugagaaagcagaagagagacgacggcgaccugaagagacugagagaccugaaccaggccgugaacaaccugguggagcugaagagcgugcagcagaagagcauccugagagugggcacccugaccagcgacgaccugcugacccuggccgccgaccuggagaagcugaagagcaaggugaccagaaccgagagaccccugagcagcggcguguacaugggcaaccugagcagccagcagcuggaccagagaagagcccugcugagcaugaucggcaugagcggcggcaaccagaacagccagcccaagggcgacggcguggugagagugugggacgugaagaacgccgaccugcugaacaaccaguucggcaccaugcccagccugacccuggccugccugaccaagcagggccagguggaccugaacgacgccgugcaggcccugaccgaccugggccugaucuacaccgccaaguaccccaacagcagcgaccuggacagacugagccagagccaccccauccugaacaugaucgacaccaagaagagcagccugaacaucagcggcuacaacuucagccugggcgccgccaucaagaccggcgccugcaugcuggacggcggcaacaugcuggagaccaucaaggugaccccccagaccauggacggcauccugaagagcauccugaaggugaagagaagccugggcauguucaucagcgacacccccggcgagagaaaccccuacgagaacauccuguacaagaucugccugagcggcgacggcuggcccuacaucgccagcagaaccgccaucaucggcagagccugggagaacaccgugguggaccuggagagcgacagcaagccccagaagaucggcagcaacggcagcaacaagagccugcagagcgccggcuucgcccccggccugaccuacagccagcugaugacccugaaggacagcaugcugcagcuggaccccaacgccaagaccuggaucgacaucgagggcagacccgaggaccccguggagguggcccuguuccagcccaucagcggcugcuacauccacuucuucagagagcccaccgaccugaagcaguucaagcaggacgccaaguacagccacggcaucgacgugaccgaccuguucgccgcccagcccggccugaccagcgccgugaucgaggcccugcccagaaacauggugcugaccugccagggcagcgacgacaucaagaagcugcuggacagccagggcagaagagacaucaagcugaucgacgugagccugaacaagaucgacagcagaaaguucgagaacgccgugugggaccaguacaaggaccugugccacaugcacaccggcguggugguggagaagaagaagaagggcggcaaggaggagaucaccccccacugcgcccugcuggacugcaucauguucgacgccgccgugagcggcggccugaacgccaccgugcugagagccgugcugcccagagacaugguguucagaaccagcagccccaagguggugcugugaggacuaguuauaagacugacuagcccgaugggccucccaacgggcccuccuccccuccuugcaccgagauuaaucaaaggcucuuuucagagccaccaaaaaaaaaaaaaaaaaaaaaaaaaaaaaaaaaaaaaaaaaaaaaaaaaaaaaaaaaaaaaaaaagaauu

SEQ ID NO: 19062 - RNA, 1955 nt, Artificial Sequence
  mRNA product Design i-3 (hSL-A64-N5) comprising derived and/or modified sequence from LASV(KAK-428;Clade n.d. (VII))__ANH09741__SP-HsPLAT_NP(2-569) (opt4)
aggagaaagcuuaccauggacgccaugaagagaggccugugcugcgugcugcugcugugcggcgccguguucgugagccccagcaacagcaaggaggugaagagcuuccuguggacccagagccugagaagagagcugagcggcuacugcaccaacaucaagcugcagguggugaaggacgcccaggcccugcugcacggccuggacuucagcgaggugagcaacgugcagagacugaugagaaagcagaagagagacgacaacgaccugaagagacugagagaccugaaccaggccgugaacaaccugguggagcugaagagcgugcagcagaagagcgugcugaaggugggcacccugaacagcgacgaccugcugacccuggccgccgaccuggagaagcugaagagcaagguggugagaaccgagagaccccugagcagcggcguguacaugggcaaccugagcagccagcagcuggaccagagaagagcccugcugaacaugaucggcauggccggcggcagccagggcaaccagcccagcagagacggcguggugagagugugggacgugaagaacgccgaccugcugaacaaccaguucggcaccaugcccagccugacccuggccugccugaccaagcagggccagguggaccugaacgacguggugcuggcccugaccgaccugggccugaucuacaccgccaaguaccccaacagcagcgaccuggacagacugagccagaaccaccccgugcugaacaugaucgacgugaacaagagcagccugaacaucagcggcuacaacuucagccugggcgccgccgugaaggccggcgccugcaugcuggacggcggcaacaugcuggagaccaucaagaucagcccccagaccguggacggcauccugaagagcauccugaaggugaagagagcccugggcauguucgugagcgacacccccggcgagagaaaccccuacgagaacauccuguacaaggugugccugagcggcaacggcuggcccuacaucgccagcagaaccagcaucgugggcagagccugggagaacaccgugguggaccuggagagcaacaagaaccagcccaaggugggcaacaacggcagcaacaagaugcugcagagcagcggcuucgccaccggccugaccuacagccagcugaugacccugagagacagcaugcugcagcuggaccccaccgccaagaccuggaucgacaucgagggcagacccgaggaccccguggagcuggcccuguuccagcccagcagcggcugcuacauccacuucuucagagagcccaccgaccugaagcaguucaagcaggacgccaaguacagccacggcaucgacgugaacgaccuguucagcgcccagcccggccugaccagcgccgugcuggaggcccugcccagaaacauggugcugaccugccagggcagcgacgacaucagaaagcugcuggacagccaggacagaaaggacaucaagcugaucgacaucagccugagcaaggccgacgccagaaaguucgagaacgacgugugggaccaguucaaggaccugugccacaugcacaccggcaucgugguggagaagaagaagaagggcggcaagcaggagaugaccccccacugcgcccugcuggacugcaucauguucgacgccgccgugagcggcggccugaacgugcccacccugagagccgugcugcccaccgacaugguguucagaaccaucaccaccaagguggugcugugaggacuaguuauaagacugacuagcccgaugggccucccaacgggcccuccuccccuccuugcaccgagauuaaucaaaggcucuuuucagagccaccaaaaaaaaaaaaaaaaaaaaaaaaaaaaaaaaaaaaaaaaaaaaaaaaaaaaaaaaaaaaaaaaagaauu

SEQ ID NO: 19063 - RNA, 1955 nt, Artificial Sequence; identical to SEQ ID NO: 19057
  mRNA product Design i-3 (hSL-A64-N5) comprising derived and/or modified sequence from LASV(Pinneo-NIG-1969;Clade I)__AIT17837__SP-HsPLAT_NP(2-569) (opt4)

SEQ ID NO: 19064 - RNA, 1955 nt, Artificial Sequence
  mRNA product Design i-3 (hSL-A64-N5) comprising derived and/or modified sequence from LASV(ISTH0009-NIG-2011;Clade II)__AIT17405__SP-HsPLAT_NP(2-569) (opt4)
aggagaaagcuuaccauggacgccaugaagagaggccugugcugcgugcugcugcugugcggcgccguguucgugagccccagcgugagcaaggaggugaagagcuuccuguggacccagagccugagaagagagcugagcggcuacugcagcaacaucaagcugcagguggugaaggacgcccaggcccugcugcacggccuggacuucagcgaggugagcaacgugcagagacugaugagaaagcagaagagagacgacagcgaccugaagagacugagagaccugaaccaggccgugaacaaccugguggagcugaagagcacccagcagaagagcauccugagagugggcacccugaccagcgacgaccugcugacccuggccgccgaccuggagaagcugaagagcaaggugaucagaaccgagagaccccugagcagcggcguguacaugggcaaccugagcacccagcagcuggagcagagaagagcccugcugaacaugaucggcauggugggcggcgcccagggcacccagcccggcagagacggcguggugagagugugggacgugaagaaccccgaccugcugaacaaccaguucggcaccaugcccagccugacccuggccugccugaccaagcagggccagguggaccugaacgacgccgugcuggcccugaccgaccugggccugaucuacaccgccaaguaccccaacagcagcgaccuggacagacugagccagagccaccccauccugaacaugguggacaucaagaagagcagccugaacaucagcggcuacaacuucagccugggcgccgccgugaaggccggcgccugcaugcuggacggcggcaacaugcuggagaccaucaaggugaccccccagaccauggacggcauccugaagagcauccugaaggugaagagaagccugggcauguucgugagcgacacccccggcgagagaaaccccuacgagaacauccuguacaagaucugccugagcggcgacggcuggcccuacaucgccagcagaaccagcaucgugggcagagccugggagaacaccaccguggaccuggagagcgacggcaagccccagaaggugggcagcgccggcagcaacaagagccugcagagcgccggcuuccccaccggccugaccuacagccagcugaugacccugaaggacagcaugaugcagcuggaccccagcgccaagaccuggaucgacaucgagggcagacccgaggaccccguggagaucgcccuguaccagcccaugagcggcugcuacauccacuucuucagagagcccaccgaccugaagcaguucaagcaggacgccaaguacagccacggcaucgacguggccgaccuguuccccgcccagcccggccugaccagcgccgugaucgaggcccugcccagaaacauggugcugaccugccagggcagcgacgacaucaagagacugcuggacagccagggcagaagagacaucaagcugaucgacaucgcccugagcaaggccgacagcagaagauucgagaacgccgugugggaccagugcaaggaccugugccacaugcacaccggcguggugguggagaagaagaagagaggcggcaaggaggagaucaccccccacugcgcccugauggacugcaucauguacgacgccgccgugagcggcggccugaacauccccgugcugagagccgugcugcccagagacaugguguucagaaccagcagccccaagguggugcugugaggacuaguuauaagacugacuagcccgaugggccucccaacgggcccuccuccccuccuugcaccgagauuaaucaaaggcucuuuucagagccaccaaaaaaaaaaaaaaaaaaaaaaaaaaaaaaaaaaaaaaaaaaaaaaaaaaaaaaaaaaaaaaaaagaauu

SEQ ID NO: 19065 - RNA, 1955 nt, Artificial Sequence
  mRNA product Design i-3 (hSL-A64-N5) comprising derived and/or modified sequence from LASV(ISTH2010-NIG-2012;Clade II)__AIT17483__SP-HsPLAT_NP(2-569) (opt4)
aggagaaagcuuaccauggacgccaugaagagaggccugugcugcgugcugcugcugugcggcgccguguucgugagccccagcgccagcaaggaggugaagagcuuccuguggacccagagccugagaagagagcugagcggcuacugcagcaacaucaagcugcagguggugaaggacgcccaggcccugcugcacggccuggacuucagcgaggugagcaacgugcagagacugaugagaaagcagaagagagacgacagcgaccugaagagacugagagaccugaaccaggccgugaacaaccugguggagcugaagagcacccagcagaagagcauccugagagugggcacccugaccagcgacgaccugcugacccuggccgccgaccuggagaagcugaagagcaaggugaucagaaccgagagaccccugagcagcggcguguacaugggcaaccugagcacccagcagcuggagcagagaagagcccugcugaaccugaucggcauggugggcggcgcccagggcacccagcccggcagagacggcguggugagagugugggacgugaagaaccccgaccugcugaacaaccaguucggcaccaugcccagccugacccuggccugccugaccaagcagggccagguggaccugaacgacgccgugcuggcccugaccgaccugggccugaucuacaccgccaaguaccccaacagcagcgaccuggacagacugagccagagccaccccauccugaacaugguggacaccaagaagagcagccugaacaucagcggcuucaacuucagccugggcgccgccgugaaggccggcgccugcaugcuggacggcggcaacaugcuggagaccaucaaggugaccccccagaccauggacggcauccugaagagcauccugaaggugaagaagagccugggcauguucgugagcgacacccccggcgagagaaaccccuacgagaacauccuguacaagaucugccugagcggcgacggcuggcccuacaucgccagcagaaccagcaucgugggcagagccugggagaacaccaccguggaccuggagagcgacggcaagccccacaaggugggcaccgccggcagcaacaagagccugcagagcgccggcuuccccaccggccugaccuacagccagcugaugacccugaaggacagcaugaugcagcuggaccccagcgccaagaccuggaucgacaucgagggcagacccgaggaccccguggagaucgcccuguaccagcccaugagcggcugcuacauccacuucuucagagagcccaccgaccugaagcaguucaagcaggacgccaaguacagccacggcaucgacguggccgaccuguuccccgcccagcccggccugaccagcgccgugaucgaggcccugcccagaaacauggugcugaccugccagggcagcgacgacaucaagagacugcuggacagccagggcagaagagacaucaagcugaucgacaucgcccugagcaaggccgacagcagaagauucgagaacgccgugugggaccagugcaaggaccugugccacaugcacaccggcguggugguggagaagaagaagagaggcggcaaggaggagaucaccccccacugcgcccugauggacugcaucauguacgacgccgccgugagcggcggccugaacauccccgugcugagagccgugcugcccagagacaugguguucagaaccagcagccccaagguggugcugugaggacuaguuauaagacugacuagcccgaugggccucccaacgggcccuccuccccuccuugcaccgagauuaaucaaaggcucuuuucagagccaccaaaaaaaaaaaaaaaaaaaaaaaaaaaaaaaaaaaaaaaaaaaaaaaaaaaaaaaaaaaaaaaaagaauu

SEQ ID NO: 19066 - RNA, 1955 nt, Artificial Sequence
  mRNA product Design i-3 (hSL-A64-N5) comprising derived and/or modified sequence from LASV(Lassa virus/H.sapiens-wt/NGA/2015/ISTH_0543;Clade II)__AVO03640__SP-HsPLAT_NP(2-569) (opt4)
aggagaaagcuuaccauggacgccaugaagagaggccugugcugcgugcugcugcugugcggcgccguguucgugagccccagcgccagcaaggaggugaagagcuuccuguggacccagagccugagaagagagcugagcggcuacugcagcaacaucaagcugcagguggugaaggacgcccaggcccugcugcacggccuggacuucagcgaggugagcaacgugcagagacugaugagaaagcagaagagagacgacagcgaccugaagagacugagagaccugaaccaggccgugaacaaccugguggagcugaagagcacccagcagaagagcauccugagagugggcacccugaccagcgacgaccugcugacccuggccgccgaccuggagaagcugaagagcaaggugaucagaaccgagagaccccugagcagcggcguguacaugggcaaccugagcacccagcagcuggagcagagaagagcccugcugaacaugaucggcauggugggcggcgcccagggcacccagcccggcagagacggcguggugagagugugggacgugaagaaccccgaccugcugaacaaccaguucggcaccaugcccagccugacccuggccugccugaccaagcagggccagguggaccugaacgacgccgugcuggcccugaccgaccugggccugaucuacaccgccaaguaccccaacagcagcgaccuggacagacugagccagagccaccccauccugaacaugguggacaccaagaagagcagccugaacaucagcggcuacaacuucagccugggcgccgccgugaaggccggcgccugcaugcuggacggcggcaacaugcuggagaccaucaaggugaccccccagaccauggacggcauccugaagagcauccugaaggugaagaagagccugggcauguucgugagcgacacccccggcgagagaaaccccuacgagaacauccuguacaagaucugccugagcggcgacggcuggcccuacaucgccagcagaaccagcaucgugggcagagccugggagaacaccaccguggaccuggagagcgacggcaagccccagaaggugggcagcgccggcagcaacaagagccugcagagcgccggcuuccccaccggccugaccuacagccagcugaugacccugaaggacagcaugaugcagcuggaccccagcgccaagaccuggaucgacaucgagggcagacccgaggaccccguggagaucgcccuguaccagcccaugagcggcugcuacauccacuucuucagagagcccaccgaccugaagcaguucaagcaggacgccaaguacagccacggcaucgacguggccgaccuguuccccgcccagcccggccugaccagcgccgugaucgaggcccugcccagaaacauggugcugaccugccagggcagcgacgacaucaagagacugcuggacagccagggcagaaaggacaucaagcugaucgacaucgcccugagcaaggccgacagcagaagauucgagaacgccgugugggaccagugcaaggaccugugccacaugcacaccggcguggugguggagaagaagaagagaggcggcaaggaggagaucaccccccacugcgcccugauggacugcaucauguacgacgccgccgugagcggcggccugaacauccccgugcugagagccgugcugcccagagacaugguguucagaaccagcagccccaagguggugcugugaggacuaguuauaagacugacuagcccgaugggccucccaacgggcccuccuccccuccuugcaccgagauuaaucaaaggcucuuuucagagccaccaaaaaaaaaaaaaaaaaaaaaaaaaaaaaaaaaaaaaaaaaaaaaaaaaaaaaaaaaaaaaaaaagaauu

SEQ ID NO: 19067 - RNA, 1955 nt, Artificial Sequence
  mRNA product Design i-3 (hSL-A64-N5) comprising derived and/or modified sequence from LASV(Lassa virus/H.sapiens-wt/NGA/2016/ISTH_0009;Clade II)__AVO03572__SP-HsPLAT_NP(2-569) (opt4)
aggagaaagcuuaccauggacgccaugaagagaggccugugcugcgugcugcugcugugcggcgccguguucgugagccccagcgccagcaaggaggugaagagcuuccuguggacccagagccugagaagagagcugagcggcuacugcagcaacaucaagcugcagguggugaaggacgcccaggcccugcugcacggccuggacuucagcgaggugagcaacgugcagagacugaugagaaagcagaagagagacgacagcgaccugaagagacugagagaccugaaccaggccgugaacaaccugguggagcugaagagcacccagcagaagagcauccugagagugggcacccugaccagcgacgaccugcugacccuggccgccgaccuggagaagcugaagagcaaggugaucagaaccgagagaccccugagcagcggcguguacaugggcaaccugagcacccagcagcuggagcagagaagagcccugcugaacaugaucggcauggugggcggcgcccagggcacccagcccggcagagacggcguggugagagugugggacgugaagaaccccgaccugcugaacaaccaguucggcaccaugcccagccugacccuggccugccugaccaagcagggccagguggaccugaacgacgccgugcuggcccugaccgaccugggccugaucuacaccgccaaguaccccaacagcagcgaccuggacagacugagccagagccaccccauccugaacaugguggacaccaagaagagcagccugaacaucagcggcuacaacuucagccugggcgccgccgugaaggccggcgccugcaugcuggacggcggcaacaugcuggagaccaucaaggugaccccccagaccauggacggcauccugaagagcauccugaaggugaagaagagccugggcauguucgugagcgacacccccggcgagagaaaccccuacgagaacauccuguacaagaucugccugagcggcgacggcuggcccuacaucgccagcagaaccagcaucgugggcagagccugggagaacaccaccguggaccuggagagcgacggcaagccccagaaggugggcagcgccggcagcaacaagagccugcagagcgccggcuuccccaccggccugaccuacagccagcugaugacccugaaggacagcaugaugcagcuggaccccagcgccaagaccuggaucgacaucgagggcagacccgaggaccccguggagaucgcccuguaccagcccaugagcggcugcuacauccacuucuucagagagcccaccgaccugaagcaguucaagcaggacgccaaguacagccacggcaucgacguggccgaccuguuccccgcccagcccggccugaccagcgccgugaucgaggcccugcccagaaacauggugcugaccugccagggcagcgacgacaucaagagacugcuggacagccagggcagaagagacaucaagcugaucgacaucgcccugagcaaggccgacagcagaagauucgagaacgccgugugggaccagugcaaggaccugugccacaugcacaccggcguggugguggagaagaagaagagaggcggcaaggaggagaucaccccccacugcgcccugauggacugcaucauguacgacgccgccgugagcggcggccugaacauccccgugcugagagccgugcugcccagagacaugguguucagaaccagcagccccaagguggugcugugaggacuaguuauaagacugacuagcccgaugggccucccaacgggcccuccuccccuccuugcaccgagauuaaucaaaggcucuuuucagagccaccaaaaaaaaaaaaaaaaaaaaaaaaaaaaaaaaaaaaaaaaaaaaaaaaaaaaaaaaaaaaaaaaagaauu

SEQ ID NO: 19068 - RNA, 1955 nt, Artificial Sequence
  mRNA product Design i-3 (hSL-A64-N5) comprising derived and/or modified sequence from LASV(Lassa virus/H.sapiens-wt/NGA/2016/ISTH_0017;Clade II)__AVO03568__SP-HsPLAT_NP(2-569) (opt4)
aggagaaagcuuaccauggacgccaugaagagaggccugugcugcgugcugcugcugugcggcgccguguucgugagccccagcgccagcaaggaggugaagagcuuccuguggacccagagccugagaagagagcugagcggcuacugcagcagcaucaagcugcagguggugaaggacgcccaggcccugcugcacggccuggacuucagcgaggugagcaacgugcagagacugaugagaaagcagaagagagacgacagcgaccugaagagacugagagaccugaaccaggccgugaacaaccugguggagcugaagagcacccagcagaagagcauccugagagugggcacccugaccagcgacgaccugcugacccuggccgccgaccuggagaagcugaagagcaaggugaucagaaccgagagaccccugagcagcggcguguacaugggcaaccugagcacccagcagcuggagcagagaagagcccugcugaacaugaucggcauggccggcggcgcccagggcacccagcccggcagagacggcguggugagagugugggacgugaagaaccccgaccugcugaacaaccaguucggcaccaugcccagccugacccuggccugccugaccaagcagggccagguggaccugaacgacgccgugcuggcccugaccgaccugggccugaucuacaccgccaaguaccccaacagcagcgaccuggacagacugagccagagccaccccauccugaacaugguggacaccaagaagagcagccugaacaucagcggcuacaacuucagccugggcgccgccgugaaggccggcgccugcaugcuggacggcggcaacaugcuggagaccaucaaggugaccccccagaccauggacggcauccugaagagcauccugaaggugaagagaagccugggcauguucgugagcgacgcccccggcgagagaaaccccuacgagaacauccuguacaagaucugccugagcggcgacggcuggcccuacaucgccagcagaaccagcaucgugggcagagccugggagaacaccaccguggaccuggagagcgacggcaagccccagaaggugggcgccaccggcagcaacaagagccugcagagcgccggcuuccccaccggccugaccuacagccagcugaugacccugaaggacagcaugaugcagcuggaccccagcgccaagaccuggaucgacaucgagggcagacccgaggaccccguggagguggcccuguaccagcccgugagcggcugcuacauccacuucuucagagagcccaccgaccugaagcaguucaagcaggacgccaaguacagccacggcaucgacguggccgaccuguuccccgcccagcccggccugaccagcgccgugaucgaggcccugcccagaaacauggugcugaccugccagggcagcgacgacaucaagaagcugcuggacagccagggcagaaaggacaucaagcugaucgacaucgcccugagcaaggccgacagcagaagauucgagaacgccgugugggaccagugcaaggaccugugccacaugcacaccggcguggugguggagaagaagaagagaggcggcaaggaggagaucaccccccacugcgcccugauggacugcaucauguacgacgccgccgugagcggcggccugaacauccccgugcugagagccgugcugcccagagacaugguguucagaaccagcagccccaagguggugcugugaggacuaguuauaagacugacuagcccgaugggccucccaacgggcccuccuccccuccuugcaccgagauuaaucaaaggcucuuuucagagccaccaaaaaaaaaaaaaaaaaaaaaaaaaaaaaaaaaaaaaaaaaaaaaaaaaaaaaaaaaaaaaaaaagaauu

SEQ ID NO: 19069 - RNA, 1955 nt, Artificial Sequence
  mRNA product Design i-3 (hSL-A64-N5) comprising derived and/or modified sequence from LASV(Lassa virus/H.sapiens-wt/NGA/2018/ISTH_0959;Clade II)__AVV65100__SP-HsPLAT_NP(2-569) (opt4)
aggagaaagcuuaccauggacgccaugaagagaggccugugcugcgugcugcugcugugcggcgccguguucgugagccccagcgccagcaaggaggugaagagcuuccuguggacccagagccugagaagagagcugagcggcuacugcagcaacaucaagcugcagguggugaaggacgcccaggcccugcugcacggccuggacuucagcgaggugagcaacgugcagagacugaugagaaagcagaagagagacgacagcgaccugaagagacugagagaccugaaccaggccgugaacaaccugguggagcugaagagcacccagcagaagagcauccugagagugggcacccugaccagcgacgaccugcugacccuggccgccgaccuggagaagcugaagagcaaggugaucagaaccgagagaccccugagcagcggcguguacaugggcaaccugagcacccagcagcuggagcagagaagagcccugcugaaccugaucggcauggugggcggcgcccagggcacccagcccggcagagacggcguggugagagugugggacgugaagaaccccgaccugcugaacaaccaguucggcaccaugcccagccugacccuggccugccugaccaagcagggccagguggaccugaacgacguggugcuggcccugaccgaccugggccugaucuacaccgccaaguaccccaacagcagcgaccuggacagacugagccagagccaccccauccugaacaugguggacaccaagaagagcagccugaacaucagcggcuucaacuucagccugggcgccgccgugaaggccggcgccugcaugcuggacggcggcaacaugcuggagaccaucaaggugaccccccagaccauggacggcauccugaagagcauccugaaggugaagaagagccugggcauguucgugagcgacacccccggcgagagaaaccccuacgagaacauccuguacaagaucugccugagcggcgacggcuggcccuacaucgccagcagaaccagcaucgugggcagagccugggagaacaccaccguggaccuggagagcgacggcaagccccacaaggugggcaccgccggcagcaacaagagccugcagagcgccggcuuccccaccggccugaccuacagccagcugaugacccugaaggacagcaugaugcagcuggaccccagcgccaagaccuggaucgacaucgagggcagacccgaggaccccguggagaucgcccuguaccagcccaugagcggcugcuacauccacuucuucagagagcccaccgaccugaagcaguucaagcaggacgccaaguacagccacggcaucgacguggccgaccuguuccccgcccagcccggccugaccagcgccgugaucgaggcccugcccagaaacauggugcugaccugccagggcagcgacgacaucaagagacugcuggacagccagggcagaaaggacaucaagcugaucgacaucgcccugagcaagaccgacagcagaagauucgagaacgccgugugggaccagugcaaggaccugugccacaugcacaccggcguggugguggagaagaagaagagaggcggcaaggaggagaucaccccccacugcgcccugauggacugcaucauguacgacgccgccgugagcggcggccugaacauccccgugcugagagccgugcugcccagagacaugguguucagaaccagcagccccaagguggugcugugaggacuaguuauaagacugacuagcccgaugggccucccaacgggcccuccuccccuccuugcaccgagauuaaucaaaggcucuuuucagagccaccaaaaaaaaaaaaaaaaaaaaaaaaaaaaaaaaaaaaaaaaaaaaaaaaaaaaaaaaaaaaaaaaagaauu

SEQ ID NO: 19070 - RNA, 1955 nt, Artificial Sequence
  mRNA product Design i-3 (hSL-A64-N5) comprising derived and/or modified sequence from LASV(LASV003-NIG-2008;Clade II)__AIT17581__SP-HsPLAT_NP(2-569) (opt4)
aggagaaagcuuaccauggacgccaugaagagaggccugugcugcgugcugcugcugugcggcgccguguucgugagccccagcgccagcaaggaggugaagagcuuccuguggacccagagccugagaagagagcugagcggcuacugcagcagcaucaagcugcagguggugaaggacgcccaggcccugcugcacggccuggacuucagcgaggugagcaacgugcagagacugaugagaaagcagaagagagacgacagcgaccugaagagacugagagaccugaaccaggccgugaacaaccugguggagcugaagagcacccagcagaagagcgugcugagagugggcacccugaccagcgacgaccugcugacccuggccgccgaccuggagaagcugaagagcaaggugaucagaaccgagagaccccugagcagcggcguguacaugggcaaccugagcgcccagcagcuggagcagagaagaacccugcugaacaugaucggcauggugggcggcgcccagggcacccagcccggcagagacggcguggugagagugugggacgugaagaaccccgaccugcugaacaaccaguucggcaccaugcccagccugacccuggccugccugaccaagcagggccagguggaccugaacgacguggugcuggcccugaccgaccugggccugaucuacaccgccaaguaccccaacagcagcgaccuggacagacugagccagagccaccccauccugagcaugguggacaccaagaagagcagccugaacaucagcggcuacaacuucagccugggcgccgccgugaaggccggcgccugcaugcuggacggcggcaacaugcuggagaccaucaaggugaccccccagaccauggacggcauccugaagagcauccugaaggugaagaagagccugggcauguucgugagcgacacccccggcgagagaaaccccuacgagaacauccuguacaagaucugccugagcggcgacggcuggcccuacaucgccagcagaaccagcaucgugggcagagccugggagaacaccaccguggaccuggagagcgacggcaagccccagaaggugggcaccgccggcagcaacaagagccugcagagcgccggcuuccccaccggccugaccuacagccagcugaugacccugaaggacagcaugaugcagcuggaccccagcgccaagaccuggaucgacaucgagggcagacccgaggaccccguggagaucgcccuguaccagcccaugagcggcugcuacauccacuucuucagagagcccaccgaccugaagcaguucaagcaggacgccaaguacagccacggcaucgacgugaccgaccuguuccccgcccagcccggccugaccagcgccgugaucgaggcccugcccagaaacauggugcugaccugccagggcagcgacgacaucaagagacugcuggacagccagggcagaagagacaucaagcugaucgacaucgcccugagcaaggccgacagcagaagauucgagaacgccgugugggaccagugcaaggaccugugccacaugcacaccggcguggugguggagaagaagaagagaggcggcaaggaggagaucaccccccacugcgcccugauggacugcaucauguacgacgccgccgugagcggcggccugaacauccccgugcugagagccgugcugcccagagacaugguguucagaaccagcagccccaagguggugcugugaggacuaguuauaagacugacuagcccgaugggccucccaacgggcccuccuccccuccuugcaccgagauuaaucaaaggcucuuuucagagccaccaaaaaaaaaaaaaaaaaaaaaaaaaaaaaaaaaaaaaaaaaaaaaaaaaaaaaaaaaaaaaaaaagaauu

SEQ ID NO: 19071 - RNA, 1955 nt, Artificial Sequence
  mRNA product Design i-3 (hSL-A64-N5) comprising derived and/or modified sequence from LASV(LASV035-NIG-2009;Clade II)__AIT17589__SP-HsPLAT_NP(2-569) (opt4)
aggagaaagcuuaccauggacgccaugaagagaggccugugcugcgugcugcugcugugcggcgccguguucgugagccccagcgccagcaaggaggugaagagcuuccuguggacccagagccugagaagagagcugagcggcuacugcagcagcaucaagcugcagguggugaaggacgcccaggcccugcugcacggccuggacuucagcgaggugagcaacgugcagagacugaugagaaagcagaagagagacgacagcgaccugaagagacugagagaccugaaccaggccgugaacaaccugguggagcugaagagcacccagcagaagagcauccugagagugggcacccugaccagcgacgaccugcugacccuggccgccgaccuggagaagcugaagagcaaggugaucagaaccgagagaccccugagcagcggcguguacaugggcaaccugagcgcccagcagcuggagcagagaagagcccugcugaacaugaucggcauggugggcggcgcccagggcacccagcccggcagagacggcguggugagagugugggacgugaagaaccccgaccugcugaacaaccaguucggcaccaugcccagccugacccuggccugccugaccaagcagggccagguggaccugaacgacgccgugcuggcccugaccgaccugggccugaucuacaccgccaaguaccccaacagcagcgaccuggacagacugagccagagccaccccauccugaacaugguggacaccaagaagagcagccugaacaucagcggcuacaacuucagccugggcgccgccgugaaggccggcgccugcaugcuggacggcggcaacaugcuggagaccaucaaggugaccccccagaccauggacggcauccugaagagcauccugaaggugaagagaagccugggcauguucgugagcgacacccccggcgagagaaaccccuacgagaacauccuguacaagaucugccugagcggcgacggcuggcccuacaucgccagcagaaccagcaucgugggcagagccugggagaacaccaccguggaccuggagagcgacggcaagccccagaaggugggcaccaccggcagcaacaagagccugcagagcgccggcuuccccaccggccugaccuacagccagcugaugacccugaaggacagcaugaugcagcuggaccccagcgccaagaccuggaucgacaucgagggcagacccgaggaccccguggagaucgcccuguaccagcccaugagcggcugcuacauccacuucuucagagagcccaccgaccugaagcaguucaagcaggacgccaaguacagccacggcaucgacguggccgaccuguuccccgcccagcccggccugaccagcgccgugaucgaggcccugcccagaaacauggugcugaccugccagggcagcgacgacaucaagaagcugcuggacagccagggcagaagagacaucaagcugaucgacaucgcccugagcaaggccgacagcagaaaguucgagaacgccgugugggaccagugcaaggaccugugccacaugcacaccggcguggugguggagaagaagaagagaggcggcaaggaggagaucaccccccacugcgcccugauggacugcaucauguacgacgccgccgugagcggcggccugaacauccccgugcugagagccgugcugcccagagacaugguguucagaaccagcagccccaagguggugcugugaggacuaguuauaagacugacuagcccgaugggccucccaacgggcccuccuccccuccuugcaccgagauuaaucaaaggcucuuuucagagccaccaaaaaaaaaaaaaaaaaaaaaaaaaaaaaaaaaaaaaaaaaaaaaaaaaaaaaaaaaaaaaaaaagaauu

SEQ ID NO: 19072 - RNA, 1955 nt, Artificial Sequence
  mRNA product Design i-3 (hSL-A64-N5) comprising derived and/or modified sequence from LASV(LASV1000-NIG-2009;Clade II)__AIT17783__SP-HsPLAT_NP(2-569) (opt4)
aggagaaagcuuaccauggacgccaugaagagaggccugugcugcgugcugcugcugugcggcgccguguucgugagccccagcgccagcaaggaggugaagagcuuccuguggacccagagccugagaagagagcugagcggcuacugcagcaacaucaagcugcagguggugaaggacgcccaggcccugcugcacggccuggacuucagcgaggugagcaacgugcagagacugaugagaaagcagaagagagacgacagcgaccugaagagacugagagaccugaaccaggccgugaacaaccugguggagcugaagagcacccagcagaagagcauccugagagugggcacccugaccagcgacgaccugcugacccuggccgccgaccuggagaagcugaagagcaaggugaucagaaccgagagaccccugagcagcggcguguacaugggcaaccugagcacccagcagcuggagcagagaagagcccugcugaacaugaucggcauggugggcggcgcccagggcacccagcccggcagagacggcguggugagagugugggacgugaagaaccccgaccugcugaacaaccaguucggcaccaugcccagccugacccuggccugccugaccaagcagggccagguggaccugaacgacguggugcuggcccugaccgaccugggccugaucuacaccgccaaguaccccaacagcagcgaccuggacagacugagccagagccaccccauccugaacaugguggacaccaagaagagcagccugaacaucagcggcuacaacuucagccugggcgccgccgugaaggccggcgccugcaugcuggacggcggcaacaugcuggagaccaucaaggugaccccccagaccauggacggcauccugaagagcauccugaaggugaagaagagccugggcauguucgugagcgacacccccggcgagagaaaccccuacgagaacauccuguacaagaucugccugagcggcgacggcuggcccuacaucgccagcagaaccagcaucgugggcagagccugggagaacaccaccguggaccuggagagcgacggcaagccccagaaggugggcaccgccggcagcaacaagagccugcagagcgccggcuuccccaccggccugaccuacagccagcugaugacccugaaggacagcaugaugcagcuggaccccagcgccaagaccuggaucgacaucgagggcagacccgaggaccccguggagaucgcccuguaccagcccgugagcggcugcuacauccacuucuucagagagcccaccgaccugaagcaguucaagcaggacgccaaguacagccacggcaucgacguggccgaccuguuccccgcccagcccggccugaccagcgccgugaucgaggcccugcccagaaacauggugcugaccugccagggcagcgacgacaucaagagacugcuggacagccagggcagaagagacaucaagcugaucgacaucgcccugagcaaggccgacagcagaagauucgagaacgccgugugggaccagugcaaggaccugugccacaugcacaccggcguggugguggagaagaagaagagaggcggcaaggaggagaucaccccccacugcgcccugauggacugcaucauguacgacgccgccgugagcggcggccugaacauccccgugcugagagccgugcugcccagagacaugguguucagaaccagcagccccaagguggugcugugaggacuaguuauaagacugacuagcccgaugggccucccaacgggcccuccuccccuccuugcaccgagauuaaucaaaggcucuuuucagagccaccaaaaaaaaaaaaaaaaaaaaaaaaaaaaaaaaaaaaaaaaaaaaaaaaaaaaaaaaaaaaaaaaagaauu

SEQ ID NO: 19073 - RNA, 1955 nt, Artificial Sequence
  mRNA product Design i-3 (hSL-A64-N5) comprising derived and/or modified sequence from LASV(LASV221-NIG-2010;Clade II)__AIT17625__SP-HsPLAT_NP(2-569) (opt4)
aggagaaagcuuaccauggacgccaugaagagaggccugugcugcgugcugcugcugugcggcgccguguucgugagccccagcgccagcaaggaggugaagagcuuccuguggacccagagccugagaagagagcugagcggcuacugcagcagcaucaagcugcagguggugaaggacgcccaggcccugcugcacggccuggacuucagcgaggugagcaacgugcagagacugaugagaaagcagagaagagacgacagcgaccugaagagacugagagaccugaaccaggccgugaacaaccugguggagcugaagagcacccagcagaagagcauccugagagugggcacccugaccagcgacgaccugcugacccuggccgccgaccuggagaagcugaagagcaaggugaucagaaccgagagaccccugagcagcggcguguacaugggcaaccugagcacccagcagcuggagcagagaagagcccugcugaacaugaucggcauggugggcggcgcccagggcacccagcccggcagagacggcguggugagagugugggacgugaagaaccccgaccugcugaacaaccaguucggcaccaugcccagccugacccuggccugccugaccaagcagggccagguggaccugaacgacgccgugcuggcccugaccgaccugggccugaucuacaccgccaaguaccccaacagcagcgaccuggacagacugagccagagccaccccauccugaacaugguggacaccaagaagagcagccugaacaucagcggcuacaacuucagccugggcgccgccgugaaggccggcgccugcaugcuggacggcggcaacaugcuggagaccaucaaggugaccccccagaccguggacggcauccugaagagcauccugaaggugaagagaagccugggcauguucgugagcgacacccccggcgagagaaaccccuacgagaacauccuguacaagaucugccugagcggcgacggcuggcccuacaucgccagcagaaccagcaucgugggcagagccugggagaacaccaccguggaccuggagagcgacggcaagccccagaaggugggcaccgccggcagcaacaagagccugcagagcgccggcuuccccaccggccugaccuacagccagcugaugacccugaaggacagcaugaugcagcuggaccccagcgccaagaccuggaucgacaucgagggcagacccgaggaccccguggagaucgcccuguaccagcccaugagcggcugcuacauccacuucuucagagagcccaccgaccugaagcaguucaagcaggacgccaaguacagccacggcaucgacguggccgaccuguuccccgcccagcccggccugaccagcgccgugaucgaggcccugcccagaaacauggugcugaccugccagggcagcgacgacaucaagagacugcuggacagccagggcagaagagacaucaagcugaucgacaucgcccugagcaaggccgacagcagaaaguucgagaacgccgugugggaccagugcaaggaccugugccacaugcacaccggcguggugguggagaagaagaagagaggcggcaaggaggagaucaccccccacugcgcccugauggacugcaucauguacgacgccgccgugagcggcggccugaacauccccgugcugagagccgugcugcccagagacaugguguucagaaccagcagccccaagguggugcugugaggacuaguuauaagacugacuagcccgaugggccucccaacgggcccuccuccccuccuugcaccgagauuaaucaaaggcucuuuucagagccaccaaaaaaaaaaaaaaaaaaaaaaaaaaaaaaaaaaaaaaaaaaaaaaaaaaaaaaaaaaaaaaaaagaauu

SEQ ID NO: 19074 - RNA, 1955 nt, Artificial Sequence
  mRNA product Design i-3 (hSL-A64-N5) comprising derived and/or modified sequence from LASV(LASV237-NIG-2010;Clade II)__AIT17639__SP-HsPLAT_NP(2-569) (opt4)
aggagaaagcuuaccauggacgccaugaagagaggccugugcugcgugcugcugcugugcggcgccguguucgugagccccagcgccagcaaggaggugaagagcuuccuguggacccagagccugagaagagagcugagcggcuacugcagcaacaucaagcugcagguggugaaggacgcccaggcccugcugcacggccuggacuucagcgaggugagcaacgugcagagacugaugagaaagcagaagagagacgacagcgaccugaagagacugagagaccugaaccaggccgugaacaaccugguggagcugaagagcacccagcagaagagcauccugagagugggcacccugaccagcgacgaccugcugacccuggccgccgaccuggagaagcugaagagcaaggugaucagaaccgagagaccccugagcagcggcguguacaugggcaaccugagcacccagcagcuggagcagagaagagcccugcugaacaugaucggcauggugggcggcgcccagggcacccagcccggcagagacggcguggugagagugugggacgugaagaaccccgaccugcugaacaaccaguucggcaccaugcccagccugacccuggccugccugaccaagcagggccagguggaccugaacgacgccgugcuggcccugaccgaccugggccugaucuacaccgccaaguaccccaacagcagcgaccuggacagacugagccagagccaccccauccugaacaugguggacaucaagaagagcagccugaacaucagcggcuacaacuucagccugggcgccgccgugaaggccggcgccugcaugcuggacggcggcaacaugcuggagaccaucaaggugaccccccagaccauggacggcauccugaagagcauccugaaggugaagagaagccugggcauguucgugagcgacacccccggcgagagaaaccccuacgagaacauccuguacaagaucugccugagcggcgacggcuggcccuacaucgccagcagaaccagcaucgugggcagagccugggagaacaccaccguggaccuggagagcgacggcaagccccagaaggugggcagcgccggcagcaacaagagccugcagagcgccggcuuccccaccggccugaccuacagccagcugaugacccugaaggacagcaugaugcagcuggaccccagcgccaagaccuggaucgacaucgagggcagacccgaggaccccguggagaucgcccuguaccagcccaugagcggcugcuacauccacuucuucagagagcccaccgaccugaagcaguucaagcaggacgccaaguacagccacggcaucgacguggccgaccuguuccccgcccagcccggccugaccagcgccgugaucgaggcccugcccagaaacauggugcugaccugccagggcagcgacgacaucaagagacugcuggacagccagggcagaagagacaucaagcugaucgacaucgcccugagcaaggccgacagcagaagauucgagaacgccgugugggaccagugcaaggaccugugccacaugcacaccggcguggugguggagaagaagaagagaggcggcaaggaggagaucaccccccacugcgcccugauggacugcaucauguacgacgccgccgugagcggcggccugaacauccccgugcugagagccgugcugcccagagacaugguguucagaaccagcagccccaagguggugcugugaggacuaguuauaagacugacuagcccgaugggccucccaacgggcccuccuccccuccuugcaccgagauuaaucaaaggcucuuuucagagccaccaaaaaaaaaaaaaaaaaaaaaaaaaaaaaaaaaaaaaaaaaaaaaaaaaaaaaaaaaaaaaaaaagaauu

SEQ ID NO: 19075 - RNA, 1955 nt, Artificial Sequence
  mRNA product Design i-3 (hSL-A64-N5) comprising derived and/or modified sequence from LASV(LASV253-NIG-2011;Clade II)__AIT17671__SP-HsPLAT_NP(2-569) (opt4)
aggagaaagcuuaccauggacgccaugaagagaggccugugcugcgugcugcugcugugcggcgccguguucgugagccccagcgccagcaaggaggugaagagcuuccuguggacccagagccugagaagagagcugagcggcuacugcagcagcaucaagcugcagguggugaaggacgcccaggcccugcugcacggccuggacuucagcgaggugagcaacgugcagagacugaugagaaagcagaagagagacgacagcgaccugaagagacugagagaccugaaccaggccgugaacaaccugguggagcugaagagcacccagcagaagagcgugcugagagugggcacccugaccagcgacgaccugcugacccuggccgccgaccuggagaagcugaagagcaaggugaucagaaccgagagaccccugagcagcggcguguacaugggcaaccugagcacccagcagcuggagcagagaagagcccugcugaacaugaucggcauggugggcggcgcccagggcacccagcccggcagagacggcguggugagagugugggacgugaagaaccccgaccugcugaacaaccaguucggcaccaugcccagccugacccuggccugccugaccaagcagggccagguggaccugaacgacguggugcuggcccugaccgaccugggccugaucuacaccgccaaguaccccaacagcagcgaccuggacagacugagccagagccaccccauccugaacaugguggacaccaagaagagcagccugaacaucagcggcuacaacuucagccugggcgccgccgugaaggccggcgccugcaugcuggacggcggcaacaugcuggagaccaucaaggugaccccccagaccauggacggcauccugaagagcauccugaaggugaagaagagccugggcauguucgugagcgacacccccggcgagagaaaccccuacgagaacauccuguacaagaucugccugagcggcgacggcuggcccuacaucgccagcagaaccagcaucgugggcagagccugggagaacaccaccguggaccuggagagcgacggcaagccccagaaggugggcaccgccggcagcaacaagagccugcagagcgccggcuuccccaccggccugaccuacagccagcugaugacccugaaggacagcaugaugcagcuggaccccagcgccaagaccuggaucgacaucgagggcagacccgaggaccccguggagaucgcccuguaccagcccaugagcggcugcuacauccacuucuucagagagcccaccgaccugaagcaguucaagcaggacgccaaguacagccacggcaucgacgugaccgaccuguuccccgcccagcccggccugaccagcgccgugaucgaggcccugcccagaaacauggugcugaccugccagggcagcgacgacaucaagagacugcuggacagccagggcagaagagacaucaagcugaucgacaucgcccugagcaaggccgacagcagaagauucgagaacgccgugugggaccagugcaaggaccugugccacaugcacaccggcguggugguggagaagaagaagagaggcggcaaggaggagaucaccccccacugcgcccugauggacugcaucauguacgacgccgccgugagcggcggccugaacauccccgugcugagagccgugcugcccagagacaugguguucagaaccagcagccccaagguggugcugugaggacuaguuauaagacugacuagcccgaugggccucccaacgggcccuccuccccuccuugcaccgagauuaaucaaaggcucuuuucagagccaccaaaaaaaaaaaaaaaaaaaaaaaaaaaaaaaaaaaaaaaaaaaaaaaaaaaaaaaaaaaaaaaaagaauu

SEQ ID NO: 19076 - RNA, 1955 nt, Artificial Sequence
  mRNA product Design i-3 (hSL-A64-N5) comprising derived and/or modified sequence from LASV(LASV254-NIG-2011;Clade II)__AIT17675__SP-HsPLAT_NP(2-569) (opt4)
aggagaaagcuuaccauggacgccaugaagagaggccugugcugcgugcugcugcugugcggcgccguguucgugagccccagcgccagcaaggaggugaagagcuuccuguggacccagagccugagaagagagcugagcggcuacugcagcagcaucaagcugcagguggugaaggacgcccaggcccugcugcacggccuggacuucagcgaggugagcaacgugcagagacugaugagaaagcagaagagagacgacagcgaccugaagagacugagagaccugaaccaggccgugaacaaccugguggagcugaagagcacccagcagaagagcgugcugagagugggcacccugaccagcgacgaccugcugacccuggccgccgaccuggagaagcugaagagcaaggugaucagaaccgagagaccccugagcagcggcguguacaugggcaaccugagcacccagcagcuggagcagagaagagcccugcugaacaugaucggcauggugggcggcgcccagggcacccagcccggcagagacggcguggugagagugugggacgugaagaaccccgaccugcugaacaaccaguucggcaccaugcccagccugacccuggccugccugaccaagcagggccagguggaccugaacgacgccgugcuggcccugaccgaccugggccugaucuacaccgccaaguaccccaacagcagcgaccuggacagacugagccagagccaccccauccugaacaugguggacaccaagaagagcagccugaacaucagcggcuacaacuucagccugggcgccgccgugaaggccggcgccugcaugcuggacggcggcaacaugcuggagaccaucaaggugaccccccagaccauggacggcauccugaagagcauccugaaggugaagaagagccugggcauguucgugagcgacacccccggcgagagaaaccccuacgagaacauccuguacaagaucugccugagcggcgacggcuggcccuacaucgccagcagaaccagcaucgugggcagagccugggagaacaccaucguggaccuggagagcgacggcaagccccagaaggugggcaccgccggcagcaacaagagccugcagagcgccggcuuccccaccggccugaccuacagccagcugaugacccugaaggacagcaugaugcagcuggaccccagcgccaagaccuggaucgacaucgagggcagacccgaggaccccguggagaucgcccuguaccagcccaugagcggcugcuacauccacuucuucagagagcccaccgaccugaagcaguucaagcaggacgccaaguacagccacggcaucgacguggccgaccuguuccccgcccagcccggccugaccagcgccgugaucgaggcccugcccagaaacauggugcugaccugccagggcagcgacgacaucaagagacugcuggacagccagggcagaagagacaucaagcugaucgacaucgcccugagcaaggccgacagcagaagauucgagaacgccgugugggaccagugcaaggaccugugccacaugcacaccggcguggugguggagaagaagaagagaggcggcaaggaggagaucaccccccacugcgcccugauggacugcaucauguacgacgccgccgugagcggcggccugaacauccccgugcugagagccgugcugcccagagacaugguguucagaaccagcagccccaagguggugcugugaggacuaguuauaagacugacuagcccgaugggccucccaacgggcccuccuccccuccuugcaccgagauuaaucaaaggcucuuuucagagccaccaaaaaaaaaaaaaaaaaaaaaaaaaaaaaaaaaaaaaaaaaaaaaaaaaaaaaaaaaaaaaaaaagaauu

SEQ ID NO: 19077 - RNA, 1955 nt, Artificial Sequence
  mRNA product Design i-3 (hSL-A64-N5) comprising derived and/or modified sequence from LASV(Nig08-04;Clade II)__ADU56611__SP-HsPLAT_NP(2-569) (opt4)
aggagaaagcuuaccauggacgccaugaagagaggccugugcugcgugcugcugcugugcggcgccguguucgugagccccagcgccagcaaggaggugaagagcuuccuguggacccagagccugagaagagagcugagcggcuacugcagcaacaucaagcugcagguggugaaggacgcccaggcccugcugcacggccuggacuucagcgaggugagcaacgugcagagacugaugagaaagcagaagagagacgacggcgaccugaagagacugagagaccugaaccaggccgugaacaaccugguggagcugaagagcacccagcagaagagcgugcugagagugggcacccugaccagcgacgaccugcugacccuggccgccgaccuggagaagcugaagagcaaggugaucagaaccgagagaccccugagcagcggcguguacaugggcaaccugagcacccagcagcuggagcagagaaaggcccugcugagcaugaucggcauggugggcggcgcccagggcacccagcccggcagagacggcguggugagagugugggacgugaagaaccccgaccugcugaacaaccaguucggcaccaugcccagccugacccuggccugccugaccaagcagggccagguggaccugaacgacgccgugcuggcccugaccgaccugggccugaucuacaccgccaaguaccccaacagcagcgaccuggacagacugagccagagccaccccauccugaacaugguggacaccaagaagagcagccugaacaucagcggcuacaacuucagccugggcgccgccgugaaggccggcgccugcaugcuggacggcggcaacaugcuggagaccaucaaggugaccccccagaccauggacggcauccugaagagcauccugaaggugaagagaagccugggcauguucgugagcgacacccccggcgagagaaaccccuacgagaacauccuguacaagaucugccugagcggcgacggcuggcccuacaucgccagcagaaccagcaucgugggcagagccugggagaacaccaccguggaccuggagagcgacggcaagccccagaaggugggcaccgccggcagcaacaagagccugcagagcgccggcuuccccaccggccugaccuacagccagcugaugacccugaaggacagcaugaugcagcuggaccccagcgccaagaccuggaucgacaucgagggcagacccgaggaccccguggagaucgcccuguaccagcccaugagcggcugcuacauccacuucuucagagagcccaccgaccugaagcaguucaagcaggacgccaaguacagccacggcaucgacgugaccgaccuguucagcgcccagcccggccugaccagcgccgugaucgaggcccugcccagaaacauggugcugaccugccagggcagcgacgacaucaagaagcugcuggacagccagggcagaagagacaucaagcugaucgacaucagccugaacaaggccgacagcagaagauucgagaacgccgugugggaccagugcaaggaccugugccacaugcacaccggcguggugguggagaagaagaagagaggcggcaaggaggagaucaccccccacugcgcccugauggacugcaucauguucgacgccgccgugagcggcggccugaacauccccauccugagagccgugcugcccagagacaugguguucagaaccagcagccccaagguggugcugugaggacuaguuauaagacugacuagcccgaugggccucccaacgggcccuccuccccuccuugcaccgagauuaaucaaaggcucuuuucagagccaccaaaaaaaaaaaaaaaaaaaaaaaaaaaaaaaaaaaaaaaaaaaaaaaaaaaaaaaaaaaaaaaaagaauu

SEQ ID NO: 19078 - RNA, 1958 nt, Artificial Sequence
  mRNA product Design i-3 (hSL-A64-N5) comprising derived and/or modified sequence from LASV(GA391;Clade III)__AAA46284__SP-HsPLAT_NP(2-570) (opt4)
aggagaaagcuuaccauggacgccaugaagagaggccugugcugcgugcugcugcugugcggcgccguguucgugagccccagcgccagcaaggaggugagaagcugccuguggacccagagccugagaagagagcugagcggcuacugcagcaacaucaagcugcagguggugaaggacgcccaggcccugcugcacggccuggacuucagcgaggugagcaacgugcagagacugaugagaaagcagaagagagacgacggcgaccugaagagacugagagaccugaaccaggccgugaacaaccugguggagcugaagagcacccagcagaagagcgugcugagagugggcacccugagcagcgacgaccugcugauccuggccgccgaccuggagaagcugaagagcaaggugaccagaaccgagagaccccugagcagcggcguguacaugggcaaccugagcagccagcagcuggaccagagaagagcccugcugaacaugaucggcaugaccggcgugagcggcggcggcaagggcgccagcaacggcaucgugagagugugggacgugaagaacgccgagcugcugaacaaccaguucggcaccaugcccagccugacccuggccugccugaccaagcagggccagguggaccugaacgacgccgugcaggcccugaccgaccugggccugaucuacaccgccaaguaccccaacagcagcgaccuggacagacugagccagagccaccccauccugaacaugaucgacaccaagaagagcagccugaacaucagcggcuacaacuucagccugggcgccgccgugaaggccggcgccugcaugcuggacggcggcaacaugcuggagaccaucaaggugagcccccagaccauggacggcauccugaagagcauccugaaggugaagaagagccugggcauguucgugagcgacacccccggcgagagaaaccccuacgagaacauccuguacaagaucugccugagcggcgacggcuggagcuacaucgccagcagaaccagcaucgugggcagagccugggagaacaccgugguggaccuggagcaggacaacaagccccagaagaucggcaacggcggcagcaacaagagccugcagagcgccggcuucgccgccggccugaucuacagccagcugaugacccugaaggacuucaagugcuucaaccugauccccaacgccaagaccuggauggacaucgagggcagacccgaggaccccguggagaucgcccuguaccagcccagcagcggcugcuacgugcacuucuucagagagcccaccgaccugaagcaguucaagcaggacgccaaguacagccacggcagagacgugaccgaccuguucgccgcccagcccggccugaccagcgccgugaucgaggcccugcccagaaacauggugaucaccugccagggcagcgaggacaucagaaagcugcuggagagccagggcagaagagacaucaagcugaucgacaucacccugagcaaggccgacagcagaaaguucgagaacgccgugugggaccaguucaaggaccugugccacaugcacaccggcguggugguggagaagaagaagagaggcggcaaggaggagaucaccccccacugcgcccugauggacugcaucauguucgacgccgccgugagcggcggccuggacgccaaggugcugagaguggugcugcccagagacaugguguucagaaccagcacccccaagguggugcugugaggacuaguuauaagacugacuagcccgaugggccucccaacgggcccuccuccccuccuugcaccgagauuaaucaaaggcucuuuucagagccaccaaaaaaaaaaaaaaaaaaaaaaaaaaaaaaaaaaaaaaaaaaaaaaaaaaaaaaaaaaaaaaaaagaauu

SEQ ID NO: 19079 - RNA, 1955 nt, Artificial Sequence
  mRNA product Design i-3 (hSL-A64-N5) comprising derived and/or modified sequence from LASV(Nig08-A19;Clade III)__ADU56619__SP-HsPLAT_NP(2-569) (opt4)
aggagaaagcuuaccauggacgccaugaagagaggccugugcugcgugcugcugcugugcggcgccguguucgugagccccagcgccagcaaggaggugaagagcuuccuguggacccagagccugagaagagagcugagcggcuacugcagcaacaucaagcugcagguggugaaggacgcccaggcccugcugcacggccuggacuucagcgaggugagcaacgugcagagacugaugagaaagcagaagagagacgacggcgaccugaagagacugagagaccugaaccaggccgugaacaaccugguggagcugaagagcacccagcagaagagcgugcugagagugggcacccugagcagcgacgaccugcuggugcuggccgccgaccuggagaagcugaagagcaagguggugagaaccgagagaccccugagcagcggcaucuacaugggcaaccugagcagccagcagcuggaccagagaaaggcccugcugaacaugaucggcaugaccggcggcaacggcggcagaaacaccaccagcgacggcaucgugagagugugggacgugaagaacgccgagcugcugaacaaccaguucggcaccaugcccagccugacccuggccugccugaccaagcagggccagguggaccugaacgacgccgugcaggcccugaccgaccugggccugaucuacaccgccaaguaccccaacagcagcgaccuggacagacuggcccagagccaccccauccugaacaugaucgacaccaagaagagcagccugaacaucagcggcuacaacuucagccugggcgccgccgugaaggccggcgccugcaugcuggacggcggcaacaugcuggagaccaucaaggugagcccccagaccauggacggcauccugaagagcauccugaaggugaagagaagccugggcauguucaucagcgacacccccggcgagagaaaccccuacgagaacauccuguacaagaucugccugagcggcgacggcuggcccuacaucgccagcagaaccagcaucgugggcagagccugggagaacaccgugguggaccuggagagcgacaacaagccccagaagaccggcaacggcggcagcaacaagagccugcagagcgccggcuucgccgccggccugaccuacagccagcugaugacccugaaggacagcaugcugcagcuggaccccaacgccaagaccuggauggacaucgagggcagacccgaggaccccguggagaucgcccuguaccagcccagcagcggcugcuacauccacuucuucagagagcccaccgaccugaagcaguucaagcaggacgccaaguacagccacggcaucgacgugaccgaccuguucgccgcccagcccggccugaccagcgccgugaucgaggcccugcccagaaacauggugaucaccugccagggcagcgaggacaucagaaagcugcuggagagccagggcagaagagacaucaagcugaucgacaucagccugagcaagguggacagcagaaaguucgagaacgccgugugggaccaguucaaggaccugugccacaugcacaccggcaucgugguggagaagaagaagagaggcggcaaggaggagaucaccccccacugcgcccugauggacugcaucauguucgacgccgccgugagcggcggcguggacgccaaggugcugagagccgugcugcccagagacaugguguucagaaccagcacccccaagguggugcugugaggacuaguuauaagacugacuagcccgaugggccucccaacgggcccuccuccccuccuugcaccgagauuaaucaaaggcucuuuucagagccaccaaaaaaaaaaaaaaaaaaaaaaaaaaaaaaaaaaaaaaaaaaaaaaaaaaaaaaaaaaaaaaaaagaauu

SEQ ID NO: 19080 - RNA, 1955 nt, Artificial Sequence
  mRNA product Design i-3 (hSL-A64-N5) comprising derived and/or modified sequence from LASV(G1180-SLE-2010;Clade IV)__AIT17169__SP-HsPLAT_NP(2-569) (opt4)
aggagaaagcuuaccauggacgccaugaagagaggccugugcugcgugcugcugcugugcggcgccguguucgugagccccagcgccagcaaggagaucaagagcuuccuguggacccagagccugagaagagagcugagcggcuacugcagcaacaucaagcugcagguggugaaggacgcccaggcccugcugcacggccuggacuucagcgaggugagcaacgugcagagacugaugagaaaggagagaagagacgacaacgaccugaagagacugagagaccugaaccaggccgugaacaaccugguggagcugaagagcacccagcagaagagcauccugagagugggcacccugaccagcgacgaccugcugauccuggccgccgaccuggagaagcugaagagcaaggugaucagaaccgagagaccccugagcgccggcguguacaugggcaaccugagcagccagcagcuggaccagagaagagcccugcugagcaugaucggcaugagcagcggcaaccagagagcccaggccggcagagacggcguggugagagugugggacgugaagaacguggagcugcugaacaaccaguucggcaccaugcccagccugacccuggccugccugaccaagcagggccagguggaccugaacgacgccgugcaggcccugaccgaccugggccugaucuacaccgccaaguaccccaacaccagcgaccuggacagacugacccagagccaccccauccugaacaugaucgacaccaagaagagcagccugaacaucagcggcuacaacuucagccugggcgccgccgugaaggccggcgccugcaugcuggacggcggcaacaugcuggagaccaucaaggugagcccccagaccauggacggcauccugaagagcauccugaaggugaagaaggcccugggcauguucaucagcgacacccccggcgagagaaaccccuacgagaacauccuguacaagaucugccugagcggcgacggcuggcccuacaucgccagcagaaccagcaucaccggcagagccugggagaacaccgugguggaccuggagagcgacggcaagccccagaaggccggcagcaacaacagcaacaagagccugcagagcgugggcuucaccgccggccugaccuacagccagcugaugacccugaaggacgccaugcugcagcuggaccccaacgccaagaccuggauggacaucgagggcagacccgaggaccccguggagaucgcccuguaccagcccagcagcggcugcuacauccacuucuucagagagcccaccgaccugaagcaguucaagcaggacgccaaguacagccacggcaucgacgugaccgaccuguucgccgcccagcccggccugaccagcgccgugaucgacgcccugcccagaaacauggugaucaccugccagggcagcgacgacaucagaaagcugcuggagagccagggcagaaaggacaucaagcugaucgacaucgcccugagcaagaccgacagcagaaaguacgagaacgccgugugggaccaguacaaggaccugugccacaugcacaccggcguggugguggagaagaagaagagaggcggcaaggaggagaucaccccccacugcgcccugauggacugcaucauguucgacgccgccgugagcggcggccugaacaccagcgugcugagagccgugcugcccagagacaugguguucagaaccagcacccccagaguggugcugugaggacuaguuauaagacugacuagcccgaugggccucccaacgggcccuccuccccuccuugcaccgagauuaaucaaaggcucuuuucagagccaccaaaaaaaaaaaaaaaaaaaaaaaaaaaaaaaaaaaaaaaaaaaaaaaaaaaaaaaaaaaaaaaaagaauu

SEQ ID NO: 19081 - RNA, 1955 nt, Artificial Sequence
  mRNA product Design i-3 (hSL-A64-N5) comprising derived and/or modified sequence from LASV(G1442-SLE-2011;Clade IV)__AIT17181__SP-HsPLAT_NP(2-569) (opt4)
aggagaaagcuuaccauggacgccaugaagagaggccugugcugcgugcugcugcugugcggcgccguguucgugagccccagcgccagcaaggaggugaagagcuuccuguggacccagagccugagaagagagcugagcggcuacugcagcaacaucaagcugcagguggugaaggacgcccaggcccugcugcacggccuggacuucagcgaggugagcaacgugcagagacugaugagaaagcagagaagagacgacaacgaccugaagagacugagagaccugaaccaggccgugaacaaccugguggagcugaagagcacccagcagaagagcgugcugagagugggcacccugaccagcgacgaccugcuggugcuggccgccgaccuggagaagcugaagagcaaggugaucagaaccgagagaccccugagcgccggcguguacaugggcaaccugagcagccagcagcuggaccagagaagagcccugcugaacaugaucggcaugagcggcggcauccagggcaccagaaccggcagagacggcguggugagagugugggacgugaagaacgccgaccugcugaacaaccaguucggcaccaugcccagccugacccuggccugccugaccaagcagggccagguggaccugaacgacguggugcaggcccugaccgaccugggccugaucuacaccgccaaguaccccaacgccagcgaccuggacagacugacccagagccaccccauccugaacaugaucgacaccaagaagagcagccugaacaucagcggcuacaacuucagccugggcgccgccgugaaggccggcgccugcaugcuggacggcggcaacaugcuggagaccaucaaggugagcccccagaccauggacggcauccugaagagcauccugaaggugaagaagacccugggcauguucaucagcgacacccccggcgagagaaaccccuacgagaacauccuguacaagaucugccugagcggcgacggcuggcccuacaucgccagcagaaccagcaucaccggcagagccugggagaacaccgugguggaccuggagagcgacggcaagccccagaaggccggcagcaacaacagcaacaagagccugcagagcgccggcuucgccgccggccugaccuacagccagcugaugacccugaaggacgccaugcugcagcuggaccccaacgccaagaccuggauggacaucgagggcagacccgaggaccccguggagaucgcccuguaccagcccagcagcggcugcuacauccacuucuucagagagcccaccgaccugaagcaguucaagcaggacgccaaguacagccacggcaucgacgugaccgaccuguucgccgcccagcccggccugaccagcgccgugaucgaggcccugcccagaaacauggugaucaccugccagggcagcgacgacaucaagaagcugcuggagagccagggcagaaaggacaucaagcugaucgacaucgcccugagcaagaccgacagcagaaaguacgagaacgccgugugggaccaguacaaggaccugugccacaugcacaccggcguggugguggagaagaagaagagaggcggcaaggaggagaucaccccccacugcgcccugauggacugcaucauguucgacgccgccgugagcggcggccugaacacccuggugcugagagccgugcugcccagagacaugguguucagaaccagcacccccagaguggugcugugaggacuaguuauaagacugacuagcccgaugggccucccaacgggcccuccuccccuccuugcaccgagauuaaucaaaggcucuuuucagagccaccaaaaaaaaaaaaaaaaaaaaaaaaaaaaaaaaaaaaaaaaaaaaaaaaaaaaaaaaaaaaaaaaagaauu

SEQ ID NO: 19082 - RNA, 1955 nt, Artificial Sequence
  mRNA product Design i-3 (hSL-A64-N5) comprising derived and/or modified sequence from LASV(G3010-SLE-2013;Clade IV)__AIT17345__SP-HsPLAT_NP(2-569) (opt4)
aggagaaagcuuaccauggacgccaugaagagaggccugugcugcgugcugcugcugugcggcgccguguucgugagccccagcgccagcaaggagaucaagagcuuccuguggacccagagccugagaagagagcugagcggcuacugcagcaacaucaagcugcagguggugaaggacgcccaggcccugcugcacggccuggacuucagcgaggugagcaacgugcagagacugaugagaaaggagagaagagacgacaacgaccugaagagacugagagaccugaaccaggccgugaacaaccugguggagcugaagagcacccagcagaagagcauccugagagugggcacccugaccagcgacgaccugcugauccuggccgccgaccuggagaagcugaagagcaaggugaccagaaccgagagaccccugagcgccggcguguacaugggcaaccugagcagccagcagcuggaccagagaagagcccugcugagcaugaucggcaugagcagcggcgugcagggcgccagagccggcagagacggcguggugagagugugggacgugaagaacgccgagcugcugaacaaccaguucggcaccaugcccagccugacccuggccugccugaccaagcagggccagguggaccugaacgacguggugcaggcccugaccgaccugggccugaucuacaccgccaaguaccccaacaccagcgaccuggacagacugacccagagccaccccauccugaacaugaucgacaccaagaagagcagccugaacaucagcggcuacaacuucagccugggcgccgccgugaaggccggcgccugcaugcuggacggcggcaacaugcuggagaccaucaaggugagcccccagaccauggacggcauccugaagagcauccugaaggugaagaaggcccugggcauguucaucagcgagacccccggcgagagaaaccccuacgagaacauccuguacaagaucugccugagcggcgacggcuggcccuacaucgccagcagaaccagcaucaccggcagagccugggagaacaccgugguggaccuggagagcgacggcaagccccagaaggccggcagcaacaacagcaacaagagccugcagagcgccggcuucaccgccggccugaccuacagccagcugaugacccugaaggacgccaugcugcagcuggaccccaacgccaagaccuggauggacaucgagggcagacccgaggaccccguggagguggcccuguaccagcccagcagcggcugcuacauccacuucuucagagagcccaccgaccugaagcaguucaagcaggacgccaaguacagccacggcaucgacgugaccgaccuguucgccgcccagcccggccugaccagcgccgugaucgacgcccugcccagaaacauggugaucaccugccagggcagcgacgacaucaagaagcugcuggagagccagggcagaaaggacaucaagcugaucgacaucgcccugagcaagaccgacagcagaaaguacgagaacgccgugugggaccaguacaaggaccugugccacaugcacaccggcguggugguggagaagaagaagagaggcggcaaggaggagaucaccccccacugcgcccugauggacugcaucauguucgacgccgccgugagcggcggccugaacaccagcgugcugagagccgugcugcccagagacaugguguucagaaccagcacccccagaguggugcugugaggacuaguuauaagacugacuagcccgaugggccucccaacgggcccuccuccccuccuugcaccgagauuaaucaaaggcucuuuucagagccaccaaaaaaaaaaaaaaaaaaaaaaaaaaaaaaaaaaaaaaaaaaaaaaaaaaaaaaaaaaaaaaaaagaauu

SEQ ID NO: 19083 - RNA, 1955 nt, Artificial Sequence
  mRNA product Design i-3 (hSL-A64-N5) comprising derived and/or modified sequence from LASV(G502-SLE-2009;Clade IV)__AIT17127__SP-HsPLAT_NP(2-569) (opt4)
aggagaaagcuuaccauggacgccaugaagagaggccugugcugcgugcugcugcugugcggcgccguguucgugagccccagcgccagcaaggagaucaagagcuuccuguggacccagagccugagaagagagcugagcggcuacugcagcaacaucaagcugcagguggugaaggacgcccaggcccugcugcacggccuggacuucagcgaggugagcaacgugcagagacugaugagaaaggagagaagagacgacaacgaccugaagagacugagagaccugaaccaggccgugaacaaccugguggagcugaagagcacccagcagaagagcauccugagagugggcacccugaccagcgacgaccugcugauccuggccgccgaccuggagaagcugaagagcaaggugaucagaaccgagagaccccugagcgccggcguguacaugggcaaccugagcagccagcagcuggaccagagaagagcccugcugagcaugaucggcaugagcggcggcaaccagggcgugagagccggcaaggacggcguggugagagugugggacgugaagaacgccgagcugcugaacaaccaguucggcaccaugcccagccugacccuggccugccugaccaagcagggccagguggaccugaacgacgccgugcaggcccugaccgaccugggccugaucuacaccgccaaguaccccaacaccagcgaccuggacagacugacccagagccaccccauccugaacaugaucgacaccaagaagagcagccugaacaucagcggcuacaacuucagccugggcgccgccgugaaggccggcgccugcaugcuggacggcggcaacaugcuggagaccaucaaggugagcccccagaccauggacggcauccugaagagcauccugaaggugaagaaggcccugggcauguucaucagcgacacccccggcgagagaaaccccuacgagaacauccuguacaagaucugccugagcggcgacggcuggcccuacaucgccagcagaaccagcaucaccggcagagccugggagaacaccgugguggaccuggagagcgacggcaagccccagaaggccggcagcaacaacagcaacaagagccugcagagcgccggcuucaccgccggccugaccuacagccagcugaugacccugaaggacgccaugcugcagcuggaccccaacaccaagaccuggauggacaucgagggcagacccgaggaccccguggagaucgcccuguaccagcccagcagcggcugcuacauccacuucuucagagagcccaccgaccugaagcaguucaagcaggacgccaaguacagccacggcaucgacgugaccgaccuguucgccgcccagcccggccugaccagcgccgugaucgacgcccugcccagaaacauggugaucaccugccagggcagcgacgacaucagaaagcugcuggagagccagggcagaaaggacaucaagcugaucgacaucgcccugaacaagaccgacagcagaaaguacgagaacgccgugugggaccaguacaaggaccugugccacaugcacaccggcguggugguggagaagaagaagagaggcggcaaggaggagaucaccccccacugcgcccugauggacugcaucauguucgacgccgccgugagcggcggccugaacaccagcgugcugagagccgugcugcccagagacaugguguucagaaccagcacccccagaguggugcugugaggacuaguuauaagacugacuagcccgaugggccucccaacgggcccuccuccccuccuugcaccgagauuaaucaaaggcucuuuucagagccaccaaaaaaaaaaaaaaaaaaaaaaaaaaaaaaaaaaaaaaaaaaaaaaaaaaaaaaaaaaaaaaaaagaauu

SEQ ID NO: 19084 - RNA, 1955 nt, Artificial Sequence
  mRNA product Design i-3 (hSL-A64-N5) comprising derived and/or modified sequence from LASV(G733-SLE-2010;Clade IV)__AIT17155__SP-HsPLAT_NP(2-569) (opt4)
aggagaaagcuuaccauggacgccaugaagagaggccugugcugcgugcugcugcugugcggcgccguguucgugagccccagcgccagcaaggagaucaagagcuuccuguggacccagagccugagaagagagcugagcggcuacugcagcaacaucaagcugcagguggugaaggacgcccaggcccugcugcacggccuggacuucagcgaggugagcaacgugcagagacugaugagaaaggagagaagagacgacaacgaccugaagagacugagagaccugaaccaggccgugaacaaccugguggagcugaagagcacccagcagaagagcgugcugagagugggcacccugaccagcgacgagcugcuggugcuggccgccgaccuggagaagcugaagagcaaggugaucagaaccgagagaccccugagcgccggcguguacaugggcaaccugagcagccagcagcuggaccagagaagagcccugcugagcaugaucggcaugagcggcggcaaccagggcgccagaaccggcagagacggcguggugagagugugggacgugaagaacgccgagcugcugaacaaccaguucggcaccaugcccagccugacccuggccugccugaccaagcagggccagguggaccugaacgacgccgugcaggcccugaccgaccugggccugaucuacaccgccaaguaccccaacaccagcgaccuggacagacugacccagagccaccccauccugaacaugaucgacaccaagaagagcagccugaacaucagcggcuacaacuucagccugggcgccgccgugaaggccggcgccugcaugcuggacggcggcaacaugcuggagaccaucaaggugagcccccagaccauggacggcauccugaagagcauccugaaggugaagaaggcccugggcauguucaucagcgacacccccggcgagagaaaccccuacgagaacauccuguacaagaucugccugagcggcgacggcuggcccuacaucgccagcagaaccagcaucaccggcagagccugggagaacaccgugguggaccuggagagcgacggcaagccccagaaggccggcagcaacaacagcaacaagagccugcagagcgccggcuucaccgccggccugaccuacagccagcugaugacccugaaggacgccaugcugcagcuggaccccaacgccaagaccuggauggacaucgagggcagacccgaggaccccguggagaucgcccuguaccagcccagcagcggcugcuacauccacuucuucagagagcccaccgaccugaagcaguucaagcaggacgccaaguacagccacggcaucgacgugaccgaccuguucgccgcccagcccggccugaccagcgccgugaucgacgcccugcccagaaacauggugaucaccugccagggcagcgacgacaucagaaagcugcuggagagccagggcagaaaggacaucaagcugaucgacaucgcccugagcaagaucgacagcagaaaguacgagaacgccgugugggaccaguacaaggaccugugccacaugcacaccggcguggugguggagaagaagaagagaggcggcaaggaggagaucaccccccacugcgcccugauggacugcaucauguucgacgccgccgugagcggcggccugaacagccuggugcugagagccgugcugcccagagacaugguguucagaaccagcacccccagaguggugcugugaggacuaguuauaagacugacuagcccgaugggccucccaacgggcccuccuccccuccuugcaccgagauuaaucaaaggcucuuuucagagccaccaaaaaaaaaaaaaaaaaaaaaaaaaaaaaaaaaaaaaaaaaaaaaaaaaaaaaaaaaaaaaaaaagaauu

SEQ ID NO: 19085 - RNA, 1955 nt, Artificial Sequence
  mRNA product Design i-3 (hSL-A64-N5) comprising derived and/or modified sequence from MOPV/LASV reassortant(IGS-1;Clade IV)__AFY05578__SP-HsPLAT_NP(2-569) (opt4)
aggagaaagcuuaccauggacgccaugaagagaggccugugcugcgugcugcugcugugcggcgccguguucgugagccccagcgccagcaaggagaucaagagcuuccuguggacccagagccugagaagagagcugagcggcuacugcagcaacaucaagcugcagguggugaaggacgcccaggcccugcugcacggccuggacuucagcgaggugagcaacgugcagagacugaugagaaaggagagaagagacgacaacgaccugaagagacugagagaccugaaccaggccgugaacaaccugguggagcugaagagcacccagcagaagagcauccugagagugggcacccugaccagcgacgaccugcugauccuggccgccgaccuggagaagcugagaagcaaggugaucagaaccgagagaccccugagcgccggcguguacaugggcaaccugagcagccagcagcuggaccagagaagagcccugcugaacaugaucggcaugagcggcggcaaccagggcgccagagccggcagagacggcguggugagagugugggacgugaagaacgccgagcugcugagcaaccaguucggcaccaugcccagccugacccuggccugccugaccaagcagggccagguggaccugaacgacgccgugcaggcccugaccgaccugggccugaucuacaccgccaaguaccccaacaccagcgaccuggacagacugacccagagccaccccauccugaacaugaucgacaccaagaagagcagccugaacaucagcggcuacaacuucagccugggcgccgccgugaaggccggcgccugcaugcuggacggcggcaacaugcuggagaccaucaaggugagcccccagaccauggacggcauccugaagagcauccugaaggugaagaaggcccugggcauguucaucagcgacacccccggcgagagaaaccccuacgagaacauccuguacaagaucugccugagcggcgacggcuggcccuacaucgccagcagaaccagcaucaccggcagagccugggagaacaccgugguggaccuggagagcgacggcaagccccagaaggccgacagcaacaacagcagcaagagccugcagagcgccggcuucaccgccggccugaccuacagccagcugaugacccugaaggacgccaugcugcagcuggaccccaacgccaagaccuggauggacaucgagggcagacccgaggaccccguggagaucgcccuguaccagcccagcagcggcugcuacauccacuucuucagagagcccaccgaccugaagcaguucaagcaggacgccaaguacagccacggcaucgacgugaccgaccuguucgccacccagcccggccugaccagcgccgugaucgacgcccugcccagaaacauggugaucaccugccagggcagcgacgacaucagaaagcugcuggagagccagggcagaaaggacaucaagcugaucgacaucgaccugagcaagaccgacagcagaaaguacgagaacgccgugugggaccaguacaaggaccugugccacaugcacaccggcguggugguggagaagaagaagagaggcggcaaggaggagaucaccccccacugcgcccugauggacugcaucauguucgacgccgccgugagcggcggccugaacaccagcgugcugagagccgugcugcccagagacaugguguucagaaccagcacccccagaguggugcugugaggacuaguuauaagacugacuagcccgaugggccucccaacgggcccuccuccccuccuugcaccgagauuaaucaaaggcucuuuucagagccaccaaaaaaaaaaaaaaaaaaaaaaaaaaaaaaaaaaaaaaaaaaaaaaaaaaaaaaaaaaaaaaaaagaauu

SEQ ID NO: 19086 - RNA, 1955 nt, Artificial Sequence
  mRNA product Design i-3 (hSL-A64-N5) comprising derived and/or modified sequence from LASV(LM765-SLE-2012;Clade IV)__AIT17815__SP-HsPLAT_NP(2-569) (opt4)
aggagaaagcuuaccauggacgccaugaagagaggccugugcugcgugcugcugcugugcggcgccguguucgugagccccagcgccagcaaggagaucaagagcuuccuguggacccagagccugagaagagagcugagcggcuacugcagcaacaucaagcugcagguggugaaggacgcccaggcccugcugcacggccuggacuucagcgaggugagcaacgugcagagacugaugagaaaggagagaagagacgacaacgaccugaagagacugagagaccugaaccaggccgugaacaaccugguggagcugaagagcacccagcagaagagcauccugagagugggcacccugaccagcgacgaccugcugauccuggccgccgaccuggagaagcugaagagcaaggugaccagaaccgagagaccccugagcgccggcguguacaugggcaaccugagcagccagcagcuggaccagagaagagcccugcuggacaugaucggcaugagcggcagcaaccagggcgccagagccggcagagacggcguggugagagugugggacgugaagaacgccgagcugcugaacaaccaguucggcaccaugcccagccugacccuggccugccugaccaagcagggccagguggaccugaacgacgccgugcaggcccugaccgaccugggccugaucuacaccgccaaguaccccaacaccagcgaccuggacagacugacccagagccaccccauccugaacaugaucgacaccaagaagagcagccugaacaucagcggcuacaacuucagccugggcgccgccgugaaggccggcgccugcaugcuggacggcggcaacaugcuggagaccaucaaggugagcccccagaccauggacggcauccugaagagcauccugaaggugaagaaggcccugggcauguucaucagcgacgcccccggcgagagaaaccccuacgagaacauccuguacaagaucugccugagcggcgacggcuggcccuacaucgccagcagaaccagcaucaccggcagagccugggagaacaccgugguggaccuggagagcgacggcaagccccagaaggccggcagcaacggcagcaacaagagccugcagagcgccggcuucaccgccggccugaccuacagccagcugaugacccugaaggacgccaugcugcagcuggaccccaacgccaagaccuggauggacaucgagggcagacccgaggaccccguggagaucgcccuguaccagcccagcagcggcugcuacauccacuucuucagagagcccaccgaccugaagcaguucaagcaggacgccaaguacagccacggcaucgacgugaccgaccuguucgccgcccagcccggccugaccagcgccgugaucgacgcccugcccagaaacauggugaucaccugccagggcagcgacgacaucagaaagcuguucgagagccagggcagaaaggacaucaagcugaucgacaucgcccugagcaagaccgacagcagaaaguacgagaacgccgugugggaccaguacaaggaccugugccacaugcacaccggcaucgugguggagaagaagaagagaggcggcaaggaggagaucaccccccacugcgcccugauggacugcaucauguucgacgccgccgugagcggcggccugaacaccagcgugcugagagccgugcugcccagagacaugguguucagaaccagcacccccagaguggugcugugaggacuaguuauaagacugacuagcccgaugggccucccaacgggcccuccuccccuccuugcaccgagauuaaucaaaggcucuuuucagagccaccaaaaaaaaaaaaaaaaaaaaaaaaaaaaaaaaaaaaaaaaaaaaaaaaaaaaaaaaaaaaaaaaagaauu

SEQ ID NO: 19087 - RNA, 1955 nt, Artificial Sequence
  mRNA product Design i-3 (hSL-A64-N5) comprising derived and/or modified sequence from LASV(LM776-SLE-2012;Clade IV)__AIT17825__SP-HsPLAT_NP(2-569) (opt4)
aggagaaagcuuaccauggacgccaugaagagaggccugugcugcgugcugcugcugugcggcgccguguucgugagccccagcgccagcaaggagaucaagagcuuccuguggacccagagccugagaagagagcugagcagcuacugcagcaacaucaagcugcagguggugaaggacgcccaggcccugcugcacggccuggacuucagcgaggugagcaacgugcagagacugaugagaaaggagagaagagacgacaacgaccugaagagacugagagaccugaaccaggccgugaacaaccugguggagcugaagagcacccagcagaagagcauccugagagugggcacccugaccagcgacgaccugcugauccuggccgccgaccuggagaagcugaagagcaaggugaccagaaccgagagaccccugagcgccggcguguacaugggcaaccugagcagccagcagcuggaccagagaagagcccugcugagcaugaucggcaugagcggcagcaaccagggcgccagagccggcagagacggcguggugagagugugggacgugaagaacgccgagcugcugaacaaccaguucggcaccaugcccagccugacccuggccugccugaccaagcagggccagguggaccugaacgacgccgugcaggcccugaccgaccugggccugaucuacaccgccaaguaccccaacaccagcgaccuggacagacugacccagagccaccccauccugaacaugaucgacaccaagaagagcagccugaacaucagcggcuacaacuucagccugggcgccgccgugaaggccggcgccugcaugcuggacggcggcaacaugcuggagaccaucaaggugagcccccagaccauggacggcauccugaagagcauccugaaggugaagaaggcccugggcauguucaucagcgacacccccggcgagagaaaccccuacgagaacauccuguacaagaucugccugagcggcgacggcuggcccuacaucgccagcagaaccagcaucaccggcagagccugggagaacaccgugguggaccuggagagcgacggcaagccccagaaggccggcagcaacaacagcaacaagagccugcagagcgccggcuucaccgccggccugaccuacagccagcugaugacccugaaggacgccaugcugcagcuggaccccaacgccaagaccuggauggacaucgagggcagacccgaggaccccguggagguggcccuguaccagcccagcagcggcugcuacauccacuucuucagagagcccaccgaccugaagcaguucaagcaggacgccaaguacagccacggcaucgacgugaccgaccuguucgccgcccagcccggccugaccagcgccgugaucgacgcccugcccagaaacauggugaucaccugccagggcagcgacgacaucagaaagcugcuggagagccagggcagaaaggacaucaagcugaucgacaucgcccugagcaagaccgacagcagaaaguacgagaacgccgugugggaccaguacaaggaccugugccacaugcacaccggcguggugguggagaagaagaagagaggcggcaaggaggagaucaccccccacugcgcccugauggacugcaucauguucgacgccgccgugagcggcggccugaacaccagcgugcugagagccgugcugcccagagacaugguguucagaaccagcacccccagaguggugcugugaggacuaguuauaagacugacuagcccgaugggccucccaacgggcccuccuccccuccuugcaccgagauuaaucaaaggcucuuuucagagccaccaaaaaaaaaaaaaaaaaaaaaaaaaaaaaaaaaaaaaaaaaaaaaaaaaaaaaaaaaaaaaaaaagaauu

SEQ ID NO: 19088 - RNA, 1955 nt, Artificial Sequence
  mRNA product Design i-3 (hSL-A64-N5) comprising derived and/or modified sequence from LASV(Mad39;Clade IV)__ANH09723__SP-HsPLAT_NP(2-569) (opt4)
aggagaaagcuuaccauggacgccaugaagagaggccugugcugcgugcugcugcugugcggcgccguguucgugagccccagcgccagcaaggagaucaagagcuuccuguggacccagagccugagaagagagcugagcggcuacugcagcaacaucaagcugcagguggugaaggacgcccaggcccugcugcacggccuggacuucagcgaggugagcaacgugcagagacugaugagaaagcagagaagagacgacaacgaccugaagagacugagagaccugaaccaggccgugaacaaccugguggagcugaagagcacccagcagaagagcgugcugagagugggcacccugaccagcgacgaccugcugacccuggccgccgaccuggagaagcugaagagcaaggugaccagaaccgagagaccccugaccgccggcguguacaugggcaaccugagcagccagcagcuggaccagagaagagcccugcugaacaugaucggcaugagcggcggcaaccagggcgccagaaccggcagagacggcguggugagagugugggacgugaagaacgccgagcugcugaacaaccaguucggcaccaugcccagccugacccuggccugccugaccaagcagggccagguggaccugaacgacguggugcaggcccugaccgaccugggccugaucuacaccgccaaguaccccaacaccagcgaccuggacagacugacccagagccaccccauccugaacaugaucgacaccaacaagagcagccugaacaucagcggcuacaacuucagccugggcgccgccgugaaggccggcgccugcaugcuggacggcggcaacaugcuggagaccaucaaggugagcccccagaccauggacggcauccugaagagcauccugaaggugaagaagagccugggcauguucaucagcgacacccccggcgagagaaaccccuacgagaacauccuguacaagaucugccugagcggcgacggcuggcccuacaucgccagcagaaccagcaucaccggcagagccugggagaacaccgugguggaccuggagagcggcggcaagccccagaaggccggcagcaacaacagcaacaagagccugcagagcgccggcuucgccgccggccugaccuacagccagcugaugacccugaaggacgccaugcugcagcuggaccccaacgccaagaccuggauggacaucgagggcagacccgaggaccccguggagaucgcccuguaccagcccaucagcggcugcuacauccacuucuucagagagcccaccgaccugaagcaguucaagcaggacgccaaguacagccacggcaucgacgugaccgaccuguucgccgcccagcccggccugaccagcgccgugaucgaggcccugcccagaaacauggugaucaccugccagggcagcgacgacaucagaaagcuguucgagagccagggcagaaaggacaucaagcugaucgacaucgcccugagcaagaccgacagcagaaaguacgagaacgccgugugggaccaguacaaggaccugugccacaugcacaccggcguggugguggagaagaagaagaagggcggcaaggaggagaucaccccccacugcgcccugauggacugcaucauguucgacgccgccgugagcggcggccugaacacccuggugcugagagccgugcugcccagagacaugguguucagaaccagcacccccaagguggugcugugaggacuaguuauaagacugacuagcccgaugggccucccaacgggcccuccuccccuccuugcaccgagauuaaucaaaggcucuuuucagagccaccaaaaaaaaaaaaaaaaaaaaaaaaaaaaaaaaaaaaaaaaaaaaaaaaaaaaaaaaaaaaaaaaagaauu

SEQ ID NO: 19089 - RNA, 1955 nt, Artificial Sequence
  mRNA product Design i-3 (hSL-A64-N5) comprising derived and/or modified sequence from LASV(Z0947-SLE-2011;Clade IV)__AIT17841__SP-HsPLAT_NP(2-569) (opt4)
aggagaaagcuuaccauggacgccaugaagagaggccugugcugcgugcugcugcugugcggcgccguguucgugagccccagcgccagcaaggagaucaagagcuuccuguggacccagagccugagaagagagcugagcggcuacugcagcaacaucaagcugcagguggugaaggacgcccaggcccugcugcacggccuggacuucagcgaggugagcaacgugcagagacugaugagaaaggagagaagagacgacaacgaccugaagagacugagagaccugaaccaggccgugaacaaccugguggagcugaagagcacccagcagaagagcauccugagagugggcacccugaccagcgacgaccugcugauccuggccgccgaccuggagaagcugaagagcaaggugaccagaaccgagagaccccugagcgccggcguguacaugggcaaccugagcagccagcagcuggaccagagaagagcccugcugaacaugaucggcaugagcggcagcaaccagggcgccagaaccggcagagacggcguggugagagugugggacgugaagaacgccgagcugcugaacaaccaguucggcaccaugcccagccugacccuggccugccugaccaagcagggccagguggaccugaacgacgccgugcaggcccugaccgaccugggccugaucuacaccgccaaguaccccaacaccagcgaccuggacagacugacccagagccaccccauccugaacaugaucgacaccaagaagagcagccugaacaucagcggcuacaacuucagccugggcgccgccgugaaggccggcgccugcaugcuggacggcggcaacaugcuggagaccaucaaggugagcccccagaccauggacggcauccugaagagcauccugaaggugaagaaggcccugggcauguucaucagcgacgcccccggcgagagaaaccccuacgagaacauccuguacaagaucugccugagcggcgacggcuggcccuacaucgccagcagaaccagcaucaccggcagagccugggagaacaccgugguggaccuggagagcgacggcaagccccagaaggccggcagcaacggcagcaacaagagccugcagagcgccggcuucaccgccggccugaccuacagccagcugaugacccugaaggacgccaugcugcagcuggaccccaacgccaagaccuggauggacaucgagggcagacccgaggaccccguggagaucgcccuguaccagcccagcagcggcugcuacauccacuucuucagagagcccaccgaccugaagcaguucaagcaggacgccaaguacagccacggcaucgacgugaccgaccuguucgccgcccagcccggccugaccagcgccgugaucgacgcccugcccagaaacauggugaucaccugccagggcagcgacgacaucagaaagcuguucgagagccagggcagaaaggacaucaagcugaucgacaucgcccugagcaagaccgacagcagaaaguacgagaacgccgugugggaccaguacaaggaccugugccacaugcacaccggcaucgugguggagaagaagaagagaggcggcaaggaggagaucaccccccacugcgcccugauggacugcaucauguucgacgccgccgugagcggcggccugaacaccagcgugcugagagccgugcugcccagagacaugguguucagaaccagcacccccagaguggugcugugaggacuaguuauaagacugacuagcccgaugggccucccaacgggcccuccuccccuccuugcaccgagauuaaucaaaggcucuuuucagagccaccaaaaaaaaaaaaaaaaaaaaaaaaaaaaaaaaaaaaaaaaaaaaaaaaaaaaaaaaaaaaaaaaagaauu

SEQ ID NO: 19090 - RNA, 1955 nt, Artificial Sequence
  mRNA product Design i-3 (hSL-A64-N5) comprising derived and/or modified sequence from LASV(Josiah;Clade IV)__NP_694869__SP-HsPLAT_NP(2-569) (opt5)
aggagaaagcuuaccauggacgccaugaagagaggccugugcugugugcuccugcuuugcggggcugucuucguuagccccagcgccuccaaggagaucaaaucuuuccuguggacccagagccucagacgggaacuguccggcuacugcucuaacauuaagcugcaaguggucaaagacgcucaggcccugcuccacgggcuggauuuuagcgagguuuccaaugugcagcgccuuaugagaaaggaacggcgcgacgauaacgaccugaaaagacuccgggaucugaaucaggcggugaacaaucuggucgagcucaagucuacacaacaaaagagcauccugcgcgugggaacgcuuaccuccgacgaucugcucauucuggcugccgaccuugaaaaacuuaagagcaaaguuaucagaacagagcggccccucucugccggcguguauauggggaaccuguccagccagcagcuggaucagcgcagagcucuccugaauaugauuggaaugucuggcgggaaccagggagcccgggcuggccgcgacggcgucgugagaguuugggaugugaagaaugccgagcuucugaacaaucaguucgggaccaugccuucccucacacuggcgugucuuaccaaacagggacaagucgaccugaacgaugccgugcaggcucucacagaccugggccugaucuacaccgccaaguauccgaauacgagcgaccucgaucggcugacccagucucaucccauccuuaacaugauugacacaaagaaauccagccugaauaucuccggguacaacuuuucucucggagcugccgugaaggcgggcgccugcaugcuggaugggggaaacaugcuugaaaccauuaaagucagcccucaaacaauggacggcauccugaaguccauucucaaaguuaagaaagcucugggcauguucaucagcgauacccccggggagcgcaauccuuaugaaaacauucuguacaagaucugucucucuggagacggcuggcccuauaucgccuccagaacgagcauuacagggcgggcuugggagaauaccgugguggaucuggagucugacggaaagccucagaaagccgauagcaacaauuccucuaagagccuucaguccgccggcuuuacagcugggcugaccuacagccagcucaugacccugaaagacgcgaugcugcaacuugauccgaacgccaagacauggauggacaucgaaggaagacccgaggacccugucgaaauugcucucuaccagcccucuuccggcugcuauauccacuucuuucgcgagccuacggaucugaaacaguucaagcaggacgccaaguacagccauggcauugaugugaccgaccuguuugccacacaacccgggcucaccucugcuguuaucgaugcccugccgcggaauauggugaucacaugucagggauccgacgauauuagaaaacuucuggaaagccagggccgcaaggacaucaaacucauugauaucgcgcuguccaagaccgacucucggaaauaugagaacgcugucugggaucaguacaaggaccugugccacaugcauacgggggugguuguggagaagaaaaagagaggaggcaaagaagagauuacaccucacugugcccuuauggauugcaucauguucgacgccgcugucagcgggggccucaauaccuccgugcugcgcgccguccugccccgggacaugguguuuagaaccucuacaccucgcguugugcucugaggacuaguuauaagacugacuagcccgaugggccucccaacgggcccuccuccccuccuugcaccgagauuaaucaaaggcucuuuucagagccaccaaaaaaaaaaaaaaaaaaaaaaaaaaaaaaaaaaaaaaaaaaaaaaaaaaaaaaaaaaaaaaaaagaauu

SEQ ID NO: 19091 - RNA, 1955 nt, Artificial Sequence
  mRNA product Design i-3 (hSL-A64-N5) comprising derived and/or modified sequence from LASV(LP;Clade I)__AAF86702__SP-HsPLAT_NP(2-569) (opt5)
aggagaaagcuuaccauggacgccaugaagagaggccugugcugugugcuccugcuuugcggggcugucuucguuagccccagcaacuccaaggagaucaaaucuuuccuguggacccagagccucagacgggaacuguccggcuacugcucuaauauuaagcuccaaguggucaaagacgcccaggcucugcuccacgggcuggauuuuagcgagguuuccaacgugcagcgccuuaugagaaagcagaaacgggacgaugccgaccugaagcgccucagagaucugaaucaagcggugaacaaucuggucgaacucaagucuacacagcagaaaaacgugcugcggguuggaacgcuuagcuccgacgaucugaucacccucgcugccgaccuggagaaacuuaaaagcaaggugauucgcacagaaagaccccugucuuccggcgucuauauggggaaucucagcucucagcaacuggaucagcggcgcgcccugcucuccaugaucggaaugagcggcgggccucagggaaacagaaccggcggcgacggggugguucgggugugggaugucaaaaaugcugagcugcuuaacaaucaguucggaacaaugccgucucugacccucgccugucugacaaagcaaggccagguggaccuuaacgaugcugugcaggcccugaccgaccucgggcugauuuacacggcgaaguaucccaauuccagcgaccuggauaugcucacccaaucccauccuauccugggaauggucgacacaaagaagucuagccuuaacaucuccggcuacaauuuuagccugggggccgcuguuaaagccggagcuugcaugcucgauggcggcaacaugcuggagaccauuaaggugucuccccagacaauggacgggauccuuaaauccauucugaaggugaaacgcagccucggaauguucaucucugauaccccuggcgaaagaaaccccuaugagaauauucuguacaagaucugucugagcggggaaggauggccuuauauugccucccggacgucuaucacaggccgcgcgugggagaacacccucgucgaccuggagagcgauaauaagccgcccaaacuuaacuccgccgggagcaauaagucucugcaggcugccggacucaacgcuggccugacauacucccagcugaugacccuuaaagacugcaugcuccaacuggauccuagcucuaagaccuggaucgacauugaaggcagacccgaggauccuguggaaaucgcccuguuucagcccuccagcggguguuacauucacuucuuucgggagccgacagaccucaaacaguucaagcaggacgccaaguauucccauggaaucgauguuacggaccuguuuucuacccaaccuggccuuacaagcgcugugauugaagcgcugcccagaaauaugguccuuaccugccagggguccgaugacaucaaaaagcugcuggagucucagggacgccgggauaucaaacuuauugacaucagccucuccaaggccgauagcagaaaauucgagaacgcugugugggaccaguacaaggaucugugucacaugcauacaggcguuguggucgaaaagaaaaagcgcgggggcaaagaggaaauuaccccucacugcgcccugcucgacuguaucauguuugaugccgcuacgacaggaucucugaauauuaccacccuucgggccgugcugcccagagacauggucuuccgcacauccacccccaaggugguucucugaggacuaguuauaagacugacuagcccgaugggccucccaacgggcccuccuccccuccuugcaccgagauuaaucaaaggcucuuuucagagccaccaaaaaaaaaaaaaaaaaaaaaaaaaaaaaaaaaaaaaaaaaaaaaaaaaaaaaaaaaaaaaaaaagaauu

SEQ ID NO: 19092 - RNA, 1955 nt, Artificial Sequence
  mRNA product Design i-3 (hSL-A64-N5) comprising derived and/or modified sequence from LASV(803213;Clade II)__AAF86704__SP-HsPLAT_NP(2-569) (opt5)
aggagaaagcuuaccauggacgccaugaagagaggccugugcugugugcuccugcuuugcggggcugucuucguuagccccagcgccuccaaggaggugaaaucuuuccuguggacccagagccucagacgggaacuguccggcuacugcucuaacaucaaacuucaagucguuaaggacgcucaggcccugcuccacgggcuggauuuuagcgaggugaauaacgugcagcgccuuaugagaaagcagaaacgggacgauggagaccugaagcgccucagagaucugaaucaagcggucaacaaucugguggaacucaaguccacacagcagaaaucuauucugcggguuggcacgcuuaccagcgacgaucugcucacacuggcugccgaccuugagaagcugaaauccaaggugauccgcaccgaaagaccccucagcucuggggucuauaugggaaaccuguccacacagcaacuggagcagcggcgcgcccuccugaauaugauuggcauggugggaggagcucagggcacccagccuggcagagaugggguugugcgggucugggacgugaaaaacccggaucuucugaauaaccaauucggaacaaugcccagccucacccuggccugucuuacgaagcagggccagguggaccugaaugaugcuguccucgcccugaccgaccuggggcucaucuacacagcgaaguauccuaacucuuccgaccuggaucgccuuagccaaucucaucccauucugaauaugguugacaccaaaaaguccagccucaacaucuccggauacaauuuuucucugggcgccgcugugaaagccggggcuugcaugcuugauggaggcaacaugcuggagacaaucaaggugaccccucagacgauggacggcauucucaaaagcauccugaaggucaaaagaucccuggggauguucgugagcgauacacccggagaacggaacccuuaugagaauauucucuacaagaucugucugucuggcgacggguggccguauauugccucccgcaccagcaucguugggagagcgugggaaaacacaaccguggaucuugagucugacggcaagccccagaaagucgggaccgccggaagcaauaagucccugcagucugcuggcuuuccuacaggccucacguacagccaacugaugacccugaaagauuccaugaugcagcuugaccccagcgccaagacauggauugauaucgaggggcggccugaagaccccguggagaucgcucucuaccagccgaugucuggaugcuauauucacuucuuuagagaaccuaccgaccugaaacaguucaagcaagaugccaaguacucccauggcaucgacguugccgaucuguuucccgcucagccugggcucacaagcgcggugauugaggcccugccccgcaacaugguccuuaccugucagggaucugacgauaucaaaaagcugcucgacucccagggccggagagauauuaaacugaucgacaucagccuguccaagguggauucucgcaaauucgaaaaugcugucugggaccaaugcaaggaucuuugucacaugcauacgggggugguuguggagaagaaaaagcggggcggaaaagaggaaauuacaccccacugcgcccucauggacuguaucauguuugaugccgcugucagcggcgggcugaacauuccugugcugagagccguucucccgcgcgacaugguguuccggaccuccucucccaaggucgugcugugaggacuaguuauaagacugacuagcccgaugggccucccaacgggcccuccuccccuccuugcaccgagauuaaucaaaggcucuuuucagagccaccaaaaaaaaaaaaaaaaaaaaaaaaaaaaaaaaaaaaaaaaaaaaaaaaaaaaaaaaaaaaaaaaagaauu

SEQ ID NO: 19093 - RNA, 1958 nt, Artificial Sequence
  mRNA product Design i-3 (hSL-A64-N5) comprising derived and/or modified sequence from LASV(GA391;Clade III)__CAA36646__SP-HsPLAT_NP(2-570) (opt5)
aggagaaagcuuaccauggacgccaugaagagaggccugugcugugugcuccugcuuugcggggcugucuucguuagccccagcgccuccaaggaggugagaucuuuccuguggacccagagccuccggcgcgaacuguccggcuacugcucuaacaucaaacuucaagucguuaaggacgcucaggcccugcuccacgggcuggauuuuagcgagguguccaaugugcagagacuuaugcggaaacagaagcgcgacgauggagaccugaaaagacuccgggaucugaaccaagcggucaauaaccugguggaacucaagucuacacagcagaaaagcguucugcgcgugggcacgcuuuccagcgacgaucugcucauucuggcugccgaccuugagaaacugaagucuaaagucaccagaacagaacggccccucuccagcgggguguauaugggaaaucugucuucccagcaacuggaucagcgcagagcccuccugaacaugaucggcaugaccgggguuagcggaggcggcaagggggcuucugacggaauugugcgggucugggaugugaaaaaugccgagcuucugaacaaucaguucggcacaaugccuucccucacccuggcuugucuuacaaagcaggggcaaguggaccugaacgaugccguccaggcgcucaccgaccugggacugaucuacacggccaaguauccgaauagcuccgaccucgaucgccugucucagagccaucccauucuuaacaugaucgacaccaaaaaguccagccugaauaucucuggcuacaacuuuucccucggggcugccguuaaagcuggagccugcaugcuggauggcggcaauaugcuugagacaauuaaggugagcccucaaaccauggacgggauccugaaaucuauucucaaggugaaaaagagccugggaauguucgucuccgauacacccggcgaaagaaacccuuaugagaacauccuguacaagauuugucucucuggggacggauggcccuauaucgcgagccggaccuccauugugggccgcgccugggaaaauacgguuguggaucuggagcaggacaacaaaccucagaagaucgggaauggaggcagcaacaaaucucuucaguccgcuggcuuugccgcugggcugacauacagccaacucaugacccugaaggauuucaaaugcuuuaaucugaucccgaacgccaagacauggauggacauugagggaagacccgaagauccugucgagaucgcccuuuaccagcccucuuccggcuguuaugugcacuucuuucgggaaccuaccgaccucaagcaguucaaacaggacgcuaaguacagccaugggauugauguuaccgaccuguuugcggcccaacccggacugacauccgcugugaucgaggcccucccgagaaauauggucauuacgugccagggcucugaagauauccgcaaacugcuugagagccaggggcggagagacaucaagcugauugauaucacccucuccaaagccgacucucgcaaguucgagaacgcugugugggaucaguuuaaggaccugugucacaugcauacaggcgucgugguugaaaagaagaaacggggaggcaaggaggaaauuaccccucacugcgcccugauggauuguaucauguucgacgcggcugugagcgggggacuugaugccaaaguccucagagugguucugccccgcgacaugguguuccggacauccaccccuaaggucgugcugugaggacuaguuauaagacugacuagcccgaugggccucccaacgggcccuccuccccuccuugcaccgagauuaaucaaaggcucuuuucagagccaccaaaaaaaaaaaaaaaaaaaaaaaaaaaaaaaaaaaaaaaaaaaaaaaaaaaaaaaaaaaaaaaaagaauu

SEQ ID NO: 19094 - RNA, 1955 nt, Artificial Sequence
  mRNA product Design i-3 (hSL-A64-N5) comprising derived and/or modified sequence from LASV(AV;Clade V)__CCA30315__SP-HsPLAT_NP(2-569) (opt5)
aggagaaagcuuaccauggacgccaugaagagaggccugugcugugugcuccugcuuugcggggcugucuucguuagccccagcgccuccaaggaggugaaaucuuuccuguggacccagagccucagacgggaacuguccggcuacugcucuaacaucaaacuucaagucguuaaggacgcucaggcccugcuccacgggcuggauuuuagcgagguguccaaugugcagcgccuuaugagaaagcagcggcgcgacgauucugaccugaaaagacuccgggaucugaaccaagcggucaauaaccugguggaacucaagagcacacagcagaaguccguucugcgcgugggaacgcuuagcucugacgaucugcucacccuggcugccgaccuugagaaacugaaguccaaagucacaagaaccgaacggccccucagcucuggcguguauauggggaaucuguccagccagcaacuggaucagcgcagagcccuccugaaccuuauuggaaugacaaauggcucucaggggucccaggcuggacgggacggcguugugcgcgucugggaugugaagaacgccgagcugcucaauaaccaauucggcaccaugccuagccugacacuugcuugucugaccaaacagggacagguggaccucaaugaugucguucaagcccugacggaccuggggcucaucuacaccgcgaaguauccgaacacauccgaccuggauagacuuacccagucucaucccauucugaauaugaucgacacaaagaaaagcucccucaacauuagcggcuacaauuuuucucugggggccgcugugaaggccggagcuugcaugcuugauggcgggaacaugcuggagaccaucaaaguguccccucagagcauggacggaauccucaagucuauucugaaagucaagcgggcccugggcauguucgugagcgauacgcccggcgaacgcaacccuuaugagaauauccucuacaaaauuugucuguccggggacggauggcccuauaucgcgucuagaacaagcauuguuggccgggccugggaaaacaccguggucgaucuugagacagacgggaagccucagaagaucggauccggcaauagcaacaaaucucugcaauccgcuggguuuagcgccggacucaccuacucucagcugaugacccugaaggaugcuaugcuucagcucgacccgaaugccaaaacauggauggauauugagggcagacccgaagacccuguggagguugcccuguaccagcccaucuccggcugcuauauccacuucuuucgcgaaccuacggaccugaagcaauucaaacaggaugcuaaguacagccaugggauugacaucgcggaucucuuugccgcucagcccggacugaccuccgccgugauugaggcccuuccgcggaacauggucaucacaugucagggcucugaagacauuaagaaacugcucgagagccaagggagaaaggauaucaaacugaucgacauugcucuguccaagaucgauucucgcaaauucgagaaugccgugugggaccaguauaaggaucuuugccacaugcauaccggagucgugguugaaaagaaaaagcggggcgggaaagaggaaauuacaccucacugugcgcucauggacugcaucauguuugaugcugccgugagcggcggacugaacacccugguccucagagccgugcugccccgcgacaugguuuuccggacguccacaccuagagugguccuuugaggacuaguuauaagacugacuagcccgaugggccucccaacgggcccuccuccccuccuugcaccgagauuaaucaaaggcucuuuucagagccaccaaaaaaaaaaaaaaaaaaaaaaaaaaaaaaaaaaaaaaaaaaaaaaaaaaaaaaaaaaaaaaaaagaauu

SEQ ID NO: 19095 - RNA, 1955 nt, Artificial Sequence
  mRNA product Design i-3 (hSL-A64-N5) comprising derived and/or modified sequence from LASV(Togo/2016/7082;Clade VI)__AMR44578__SP-HsPLAT_NP(2-569) (opt5)
aggagaaagcuuaccauggacgccaugaagagaggccugugcugugugcuccugcuuugcggggcugucuucguuagccccagcaacuccaaggaggugaaaucuuuccuguggacccagagccucagacgggaacuguccggcuacugcucuaauaucaaacuucaagucguuaaagacgcccaggcucugcuccacgggcuggauuuuagcgagguguccaacgugcagcgccuuaugagaaagcagaaacgggacgauggagaccugaagcgccucagagaucugaaucaagccgucaacaaucugguggaacucaagucuguucagcagaaaagcauucugcgggugggcacacuuacguccgacgaucugcucacccuggcggcugaccuugagaagcugaaaagcaaggucacacgcaccgaaagaccccucucuuccgggguguauaugggaaaccugagcucucagcaacuggaucagcggcgcgcccuccuguccaugaucggcaugagcgggggaaaucagaacucucagccuaaaggcgacggcguugugagagucugggaugugaagaaugccgaccuucugaacaaucaauucgggacaaugccgucccucacccuggcuugucuuacaaagcagggacagguggaucugaacgacgccguccaagcucucaccgaccugggccugauuuacacggccaaauaucccaauagcuccgaucucgaccggcugucucagagccauccuauccuuaacaugauugauaccaagaaauccagccugaauaucucuggguacaacuuuucccucggagcggccaucaagacaggcgcuugcaugcuggacgggggaaacaugcuugagaccauuaaaguuacaccccagaccauggauggcauccucaagagcauucugaaagugaagcgcucucugggcauguucaucagcgacacgccuggggagagaaaucccuaugaaaacauucuguacaagaucugucucuccggagauggcuggccuuauauugccucucggacagcuaucaucgggcgcgccugggagaauaccguggucgaccuggaaagcgauuccaaaccgcagaagauuggaagcaacggcucuaauaaaucccuucaaagcgcgggguuugcccccggacugacauacucucagcucaugacccugaaggacuccaugcugcagcuugauccuaacgcuaaaaccuggaucgacauugagggcagacccgaggacccuguggaaguugcccucuuccagcccaucagcggcugcuacauucacuuuuuccgggagccgacagaucugaagcaauuuaagcaggacgcuaaauauucccaugggaucgaugugacggaccuguucgccgcccagccuggacucaccucugcugucaucgaagcgcugcccagaaauauggugcuuacaugucagggcagcgaugacauuaagaaacugcucgauucccaagggcgccgggacaucaagcugauugauguuucucugaacaaaaucgacagcagaaaguuugagaaugccgugugggaucaguacaaggaccuuugccacaugcauaccggagucguggucgaaaagaagaaaaagggcgggaaagaggagauuacaccucacugugcucuccuggauugcaucauguucgacgccgccguguccggcggacugaacgcuaccguucuccgcgccgugcugccccgggacauggucuuuagaacgagcucucccaaggugguucuuugaggacuaguuauaagacugacuagcccgaugggccucccaacgggcccuccuccccuccuugcaccgagauuaaucaaaggcucuuuucagagccaccaaaaaaaaaaaaaaaaaaaaaaaaaaaaaaaaaaaaaaaaaaaaaaaaaaaaaaaaaaaaaaaaagaauu

SEQ ID NO: 19096 - RNA, 1955 nt, Artificial Sequence
  mRNA product Design i-3 (hSL-A64-N5) comprising derived and/or modified sequence from LASV(KAK-428;Clade n.d. (VII))__ANH09741__SP-HsPLAT_NP(2-569) (opt5)
aggagaaagcuuaccauggacgccaugaagagaggccugugcugugugcuccugcuuugcggggcugucuucguuagccccagcaacuccaaggaggugaaaucuuuccuguggacccagagccucagacgggaacuguccggcuacugcacaaauaucaaacuucaagucguuaaggacgcccaggcucugcuccacgggcuggauuuuucugaggugagcaacgugcagcgccuuaugagaaagcagaaacgggacgauaaugaccugaagcgccucagagaucugaaccaagccgucaauaaccugguggaacucaaguccguucagcagaaaucugugcugaaggucggaacgcuuaauagcgacgaucugcucacccuggcggcugaccuugagaaacugaaguccaaagugguucggacagaacgcccccucagcucuggcguguauauggggaaccuguccagccagcaacuggaucagagacgggcccuccugaauaugauuggaauggccggcgggucucagggaaaccagccuucccgcgacggcgucgugagagugugggaugucaagaaugcugaccuucugaacaaucaauucggcaccaugccgagccucacacuggccugucuuaccaagcaggggcagguugaucugaacgacguggugcucgcucugacagaccugggacucaucuacaccgccaaauaucccaauucuuccgaucuggaccggcuuagccaaaaccauccuguccugaacaugauugaugugaauaaguccucucucaacaucagcggcuacaauuuuucccugggggcggccguuaaagcuggagccugcaugcuugacggcgggaacaugcuggagacgauuaagaucagcccccagaccguggauggaauccucaaaucuauucugaaggucaaacgcgcucugggcauguucguguccgacacaccuggcgagagaaaucccuaugaaaacauccucuacaagguuugucugagcgggaauggauggccuuauauugccucucggaccagcaucgugggccgcgcgugggagaacacagucguggaucuugaauccaauaagaaccagccgaaagucgggaauaacggaucuaauaagaugcugcagagcuccggcuuugccaccgggcucacguacagccaacugaugacacugagagacucuaugcuucagcucgaucccaccgcuaaaacauggauugacaucgagggacggccugaggaucccguggaacuggcccuguuccagccuuccagcggcugcuacauucacuuuuucagagagcccaccgaccucaagcaguuuaaacaagacgcuaaguauucucauggcaucgauguuaacgaccuguucuccgcccagccggggcuuaccagcgccgugcuggaagcucucccucgcaauaugguccugacaugucagggauccgaugacauccggaagcugcuugauucucaggacagaaaagauauuaagcucaucgacauuagccuguccaaagcggaugcccgcaaguuugagaacgacgugugggaucaauucaaagaccugugccacaugcauacgggcaucguuguggaaaagaagaaaaagggagggaaacaggagaugacaccccacugugcucuccuggauugcauuauguuugacgccgccgucucuggcgggcuuaacgugccuacccugcgggcugugcuccccaccgacaugguuuucagaacaaucaccacgaaggucgugcugugaggacuaguuauaagacugacuagcccgaugggccucccaacgggcccuccuccccuccuugcaccgagauuaaucaaaggcucuuuucagagccaccaaaaaaaaaaaaaaaaaaaaaaaaaaaaaaaaaaaaaaaaaaaaaaaaaaaaaaaaaaaaaaaaagaauu

SEQ ID NO: 19097 - RNA, 1955 nt, Artificial Sequence; identical to SEQ ID NO: 19091
  mRNA product Design i-3 (hSL-A64-N5) comprising derived and/or modified sequence from LASV(Pinneo-NIG-1969;Clade I)__AIT17837__SP-HsPLAT_NP(2-569) (opt5)

SEQ ID NO: 19098 - RNA, 1955 nt, Artificial Sequence
  mRNA product Design i-3 (hSL-A64-N5) comprising derived and/or modified sequence from LASV(ISTH0009-NIG-2011;Clade II)__AIT17405__SP-HsPLAT_NP(2-569) (opt5)
aggagaaagcuuaccauggacgccaugaagagaggccugugcugugugcuccugcuuugcggggcugucuucguuagccccagcguguccaaggaggucaaaucuuuccuguggacccagagccucagacgggaacuguccggcuacugcucuaacaucaaacuucaaguugugaaggacgcccaggcucugcuccacgggcuggauuuuagcgagguguccaauguccagcgccuuaugagaaagcagaaacgggacgauucugaccugaagcgccucagagaucugaaccaagccgugaauaaccugguugaacucaagagcacacagcagaaauccauucugcgggugggaacgcuuaccagcgacgaucugcucacacuggcggcugaccuugagaagcugaaaucuaaggucauccgcaccgaaagaccccucuccagcggcguguauauggggaaucugucuacacagcaacuggagcagcggcgcgcccuccugaacaugauuggaaugguuggcggggcccagggaacccagccuggcagagauggcgugguccgggugugggacgugaaaaauccggaucuucugaacaaucaauucgggacaaugcccucccucacccuggcuugucuuacgaagcagggacaggucgaccugaacgaugccguucucgcucugaccgaccugggccucaucuacacagccaaguauccuaauagcucugaccuggaucgccuuucccaaagccaucccauucugaacaugguggacaucaaaaaguccucucucaauaucagcggguacaacuuuucccugggagcggccgugaaagcuggcgccugcaugcuugaugggggaaauaugcuggagaccauuaaggucacaccucagaccauggacggcauccucaaaagcauucugaaggugaaaagaucucugggcauguucguuuccgauacgcccggggaacggaacccuuaugagaacauccucuacaagauuugucugagcggagacggcuggccguauaucgcuucucgcacaagcauuguggggagagccugggaaaauaccacagucgaucuugaguccgacggaaagccccagaaagugggcucugcggggagcaacaagucccugcagagcgccggauuuccuaccggccucaccuacucucaacugaugacacugaaagauuccaugaugcagcuugaccccagcgcuaagacguggaucgauaucgagggccggccugaagaccccguugagauugcccucuaccagccgaugucugggugcuauauccacuucuuuagagaaccuaccgaccugaaacaguucaagcaagaugcuaaguacucccauggaauugacguggccgaucuguuucccgcccagccuggccucacaagcgcugucaucgaggcgcugccccgcaauauggugcuuaccugucagggguccgacgauauuaaacggcugcucgacucucagggaagacgcgauaucaagcugaucgacauugcccugagcaaagcugauucccggagauucgaaaacgccgucugggaccaaugcaaggaucuuugucacaugcauacaggcgugguuguggagaaaaagaagcgcgggggcaaagaggaaaucacgccccacugcgcccucauggacuguauuauguaugaugcugccgucucuggaggccugaauaucccugugcugcgggcgguucucccgagagacaugguguuucgcaccagcucccccaaggucgugcugugaggacuaguuauaagacugacuagcccgaugggccucccaacgggcccuccuccccuccuugcaccgagauuaaucaaaggcucuuuucagagccaccaaaaaaaaaaaaaaaaaaaaaaaaaaaaaaaaaaaaaaaaaaaaaaaaaaaaaaaaaaaaaaaaagaauu

SEQ ID NO: 19099 - RNA, 1955 nt, Artificial Sequence
  mRNA product Design i-3 (hSL-A64-N5) comprising derived and/or modified sequence from LASV(ISTH2010-NIG-2012;Clade II)__AIT17483__SP-HsPLAT_NP(2-569) (opt5)
aggagaaagcuuaccauggacgccaugaagagaggccugugcugugugcuccugcuuugcggggcugucuucguuagccccagcgccuccaaggaggugaaaucuuuccuguggacccagagccucagacgggaacuguccggcuacugcucuaacaucaaacuucaagucguuaaggacgcucaggcccugcuccacgggcuggauuuuagcgagguguccaaugugcagcgccuuaugagaaagcagaaacgggacgauucugaccugaagcgccucagagaucugaaccaagcggucaauaaccugguggaacucaagagcacacagcagaaauccauucugcggguuggaacgcuuaccagcgacgaucugcucacacuggcugccgaccuugagaagcugaaaucuaaggugauccgcaccgaaagaccccucuccagcggcgucuauauggggaaucugucuacacagcaacuggagcagcggcgcgcccuccugaaccuuauuggaauggugggcggggcucagggaacccagccuggcagagauggcguugugcgggucugggacgugaaaaauccggaucugcucaacaaucaauucgggacaaugcccucccugacccuugccugucugacgaagcagggacagguggaccucaacgaugcuguccuggcccugaccgaccucggccugaucuacacagcgaaguauccuaauagcucugaccuugaucgccugucccaaagccaucccauucucaacaugguugacaccaaaaaguccucucugaauaucagcggguuuaacuucucccuuggagccgcugugaaagccggcgcuugcaugcuggaugggggaaauaugcucgagacaaucaaggugaccccucagacgauggacggcauucugaaaagcauccugaaggucaaaaagucucucggcauguuuguguccgauacacccggggaaagaaacccuuacgagaacauucuguauaagaucugucuuagcggagacggcuggccguacauugccucucggaccagcaucguugggcgcgcgugggaaaauacaaccguggaucuggaguccgacggaaaaccccacaaggucggcaccgccgggucuaacaaaagccuccaguccgcuggauucccuacaggccugacguauagccagcugaugacccuuaaggauucuaugaugcaacucgaccccuccgccaaaacauggauugauaucgagggcagaccugaagaccccguggagaucgcucuguaccagccgaugagcgggugcuacauucacuuuuuccgggaaccuaccgaccugaagcaguuuaagcaggaugccaaauauucucauggaaucgacguugccgaucucuuccccgcucaaccuggccugacauccgcggugauugaggcccuucccagaaauaugguccugaccugucaggggagcgacgauaucaagcgccuccuggacucccagggacggagagauauuaaacugaucgacaucgcucuuucuaaggccgauagccgccgguuugaaaacgccgugugggaccagugcaaagaucucugucauaugcacacgggcgucgugguugagaagaagaaaagagggggcaaggaggaaauuacaccccacugcgcucugauggacuguaucauguacgaugccgcgguguccggaggccugaauauuccuguccuccgcgcugugcugccgcgggacaugguuuucagaaccucuagccccaaagugguccuuugaggacuaguuauaagacugacuagcccgaugggccucccaacgggcccuccuccccuccuugcaccgagauuaaucaaaggcucuuuucagagccaccaaaaaaaaaaaaaaaaaaaaaaaaaaaaaaaaaaaaaaaaaaaaaaaaaaaaaaaaaaaaaaaaagaauu

SEQ ID NO: 19100 - RNA, 1955 nt, Artificial Sequence
  mRNA product Design i-3 (hSL-A64-N5) comprising derived and/or modified sequence from LASV(Lassa virus/H.sapiens-wt/NGA/2015/ISTH_0543;Clade II)__AVO03640__SP-HsPLAT_NP(2-569) (opt5)
aggagaaagcuuaccauggacgccaugaagagaggccugugcugugugcuccugcuuugcggggcugucuucguuagccccagcgccuccaaggaggugaaaucuuuccuguggacccagagccucagacgggaacuguccggcuacugcucuaacaucaaacuucaagucguuaaggacgcucaggcccugcuccacgggcuggauuuuagcgagguguccaaugugcagcgccuuaugagaaagcagaaacgggacgauucugaccugaagcgccucagagaucugaaccaagcggucaauaaccugguggaacucaagagcacacagcagaaauccauucugcggguuggaacgcuuaccagcgacgaucugcucacacuggcugccgaccuugagaagcugaaaucuaaggugauccgcaccgaaagaccccucuccagcggcgucuauauggggaaucugucuacacagcaacuggagcagcggcgcgcccuccugaacaugauuggaauggugggcggggcucagggaacccagccuggcagagauggcguugugcgggucugggacgugaaaaauccggaucuucugaacaaucaauucgggacaaugcccucccucacccuggccugucuuacgaagcagggacagguggaccugaacgaugcuguccucgcccugaccgaccugggccucaucuacacagcgaaguauccuaauagcucugaccuggaucgccuuucccaaagccaucccauucugaacaugguugacaccaaaaaguccucucucaauaucagcggguacaacuuuucccugggagccgcugugaaagccggcgcuugcaugcuugaugggggaaauaugcuggagacaaucaaggugaccccucagacgauggacggcauucucaaaagcauccugaaggucaaaaagucucugggcauguucguguccgauacacccggggaaagaaacccuuaugagaacauucucuacaagaucugucugagcggagacggcuggccguauauugccucucggaccagcaucguugggcgcgcgugggaaaauacaaccguggaucuugaguccgacggaaaaccccagaaggucggcucugccgggagcaacaaaucccugcagagcgcuggauuuccuaccggccucacauacucucaacugaugacgcugaaggauuccaugaugcagcuugaccccagcgccaaaaccuggauugauaucgagggcagaccugaagaccccguggagaucgcucucuaccagccgaugucugggugcuauauucacuucuuucgggaaccuacagaccugaagcaguucaagcaagaugccaaauacucccauggaaucgacguugccgaucuguuucccgcucagccuggccucaccagcgcggugauugaggcccugcccagaaauaugguccuuacaugucagggguccgacgauaucaagcgccugcucgacucucagggacggaaagauauuaagcugaucgacaucgcucugagcaaagccgauuccagacgcuucgaaaacgccgugugggaccaaugcaaggaucuuugucacaugcauaccggcgucgugguugagaagaaaaagagagggggcaaagaggaaauuacgccccacugcgcucucauggacuguaucauguaugaugccgcggugucuggaggccugaauauuccuguccugcgggcugugcucccgcgcgacaugguuuuucggacaagcucccccaaggugguccugugaggacuaguuauaagacugacuagcccgaugggccucccaacgggcccuccuccccuccuugcaccgagauuaaucaaaggcucuuuucagagccaccaaaaaaaaaaaaaaaaaaaaaaaaaaaaaaaaaaaaaaaaaaaaaaaaaaaaaaaaaaaaaaaaagaauu

SEQ ID NO: 19101 - RNA, 1955 nt, Artificial Sequence
  mRNA product Design i-3 (hSL-A64-N5) comprising derived and/or modified sequence from LASV(Lassa virus/H.sapiens-wt/NGA/2016/ISTH_0009;Clade II)__AVO03572__SP-HsPLAT_NP(2-569) (opt5)
aggagaaagcuuaccauggacgccaugaagagaggccugugcugugugcuccugcuuugcggggcugucuucguuagccccagcgccuccaaggaggugaaaucuuuccuguggacccagagccucagacgggaacuguccggcuacugcucuaacaucaaacuucaagucguuaaggacgcucaggcccugcuccacgggcuggauuuuagcgagguguccaaugugcagcgccuuaugagaaagcagaaacgggacgauucugaccugaagcgccucagagaucugaaccaagcggucaauaaccugguggaacucaagagcacacagcagaaauccauucugcggguuggaacgcuuaccagcgacgaucugcucacacuggcugccgaccuugagaagcugaaaucuaaggugauccgcaccgaaagaccccucuccagcggcgucuauauggggaaucugucuacacagcaacuggagcagcggcgcgcccuccugaacaugauuggaauggugggcggggcucagggaacccagccuggcagagauggcguugugcgggucugggacgugaaaaauccggaucuucugaacaaucaauucgggacaaugcccucccucacccuggccugucuuacgaagcagggacagguggaccugaacgaugcuguccucgcccugaccgaccugggccucaucuacacagcgaaguauccuaauagcucugaccuggaucgccuuucccaaagccaucccauucugaacaugguugacaccaaaaaguccucucucaauaucagcggguacaacuuuucccugggagccgcugugaaagccggcgcuugcaugcuugaugggggaaauaugcuggagacaaucaaggugaccccucagacgauggacggcauucucaaaagcauccugaaggucaaaaagucucugggcauguucguguccgauacacccggggaaagaaacccuuaugagaacauucucuacaagaucugucugagcggagacggcuggccguauauugccucucggaccagcaucguugggcgcgcgugggaaaauacaaccguggaucuugaguccgacggaaaaccccagaaggucggcucugccgggagcaacaaaucccugcagagcgcuggauuuccuaccggccucacauacucucaacugaugacgcugaaggauuccaugaugcagcuugaccccagcgccaaaaccuggauugauaucgagggcagaccugaagaccccguggagaucgcucucuaccagccgaugucugggugcuauauucacuucuuucgggaaccuacagaccugaagcaguucaagcaagaugccaaauacucccauggaaucgacguugccgaucuguuucccgcucagccuggccucaccagcgcggugauugaggcccugcccagaaauaugguccuuacaugucagggguccgacgauaucaagcgccugcucgacucucagggacggagagauauuaaacugaucgacaucgcucugagcaaggccgauucccgccgguucgaaaacgccgugugggaccaaugcaaagaucuuugucacaugcauaccggcgucgugguugagaagaagaaaagagggggcaaggaggaaauuacgccccacugcgcucucauggacuguaucauguaugaugccgcggugucuggaggccugaauauuccuguccugcgcgcugugcucccgcgggacaugguuuuuagaacaagcucccccaaagugguccugugaggacuaguuauaagacugacuagcccgaugggccucccaacgggcccuccuccccuccuugcaccgagauuaaucaaaggcucuuuucagagccaccaaaaaaaaaaaaaaaaaaaaaaaaaaaaaaaaaaaaaaaaaaaaaaaaaaaaaaaaaaaaaaaaagaauu

SEQ ID NO: 19102 - RNA, 1955 nt, Artificial Sequence
  mRNA product Design i-3 (hSL-A64-N5) comprising derived and/or modified sequence from LASV(Lassa virus/H.sapiens-wt/NGA/2016/ISTH_0017;Clade II)__AVO03568__SP-HsPLAT_NP(2-569) (opt5)
aggagaaagcuuaccauggacgccaugaagagaggccugugcugugugcuccugcuuugcggggcugucuucguuagccccagcgccuccaaggaggugaaaucuuuccuguggacccagagccucagacgggaacuguccggcuacugcucuagcaucaaacuucaagucguuaaggacgcucaggcccugcuccacgggcuggauuuuuccgaggugucuaacgugcagcgccuuaugagaaagcagaaacgggacgauagcgaccugaagcgccucagagaucugaaucaagcggucaacaaucugguggaacucaaguccacacagcagaaaagcauucugcggguuggaacgcuuaccucugacgaucugcucacacuggcugccgaccuugagaagcugaaauccaaggugauccgcaccgaaagaccccucagcucuggcgucuauauggggaaccuguccacacagcaacuggagcagcggcgcgcccuccugaauaugauuggaauggcuggcggggcccagggaacccagccuggcagagauggcgugguucgggugugggacgucaaaaacccggaucuucugaauaaccaauucgggacaaugcccagccucacccuggcuugucuuacgaagcagggacagguggaccugaaugaugccgugcucgcgcugaccgaccugggccucaucuacacagccaaguauccuaacucuuccgaccuggaucgccuuagccaaucccaucccauucugaauauggucgacaccaaaaagucuagccucaacaucuccggguacaauuuuagccugggagcugccguuaaagcuggcgccugcaugcuugaugggggaaacaugcuggagacaaucaaggugaccccucagacgauggacggcauucucaaaucuauccugaaggugaaaagaucccugggcauguucgucagcgaugcgcccggggaacggaauccuuaugagaacauucucuacaagaucugucugucuggagacggcuggccguauauugccagccgcacauccaucguggggagagcuugggaaaacaccacaguugaucuugagucugacggaaagccccagaaagugggcgccaccgggagcaauaagucccugcagagcgcuggauuuccuaccggccucacauacucucaacugaugacgcugaaagauuccaugaugcagcuugaccccagcgccaagaccuggauugauaucgagggccggccugaagaccccgucgagguggcccucuaccagccgguuucugggugcuauauccacuucuuuagagaaccuacagaccugaaacaguucaagcaagaugcuaaguacucccauggaauugacguggcggaucuguuucccgcccagccuggccucaccagcgcugucaucgaggcccugccccgcaacauggugcuuacaugucagggguccgacgauauuaaaaagcugcucgacucucagggacggaaagauaucaagcugauugacaucgcccugagcaaagcugauuccagacgcuucgaaaaugccgucugggaccaaugcaaggaucuuugucacaugcauaccggcgugguuguggagaagaaaaagagagggggcaaagaggaaaucacgccccacugcgcgcucauggacuguauuauguaugaugcugccgucucuggaggccugaacaucccugugcugcgggccguucucccgcgcgacaugguguuucggacaagcucccccaaggucgugcugugaggacuaguuauaagacugacuagcccgaugggccucccaacgggcccuccuccccuccuugcaccgagauuaaucaaaggcucuuuucagagccaccaaaaaaaaaaaaaaaaaaaaaaaaaaaaaaaaaaaaaaaaaaaaaaaaaaaaaaaaaaaaaaaaagaauu

SEQ ID NO: 19103 - RNA, 1955 nt, Artificial Sequence
  mRNA product Design i-3 (hSL-A64-N5) comprising derived and/or modified sequence from LASV(Lassa virus/H.sapiens-wt/NGA/2018/ISTH_0959;Clade II)__AVV65100__SP-HsPLAT_NP(2-569) (opt5)
aggagaaagcuuaccauggacgccaugaagagaggccugugcugugugcuccugcuuugcggggcugucuucguuagccccagcgccuccaaggaggugaaaucuuuccuguggacccagagccucagacgggaacuguccggcuacugcucuaacaucaaacuucaagucguuaaggacgcucaggcccugcuccacgggcuggauuuuagcgagguguccaaugugcagcgccuuaugagaaagcagaaacgggacgauucugaccugaagcgccucagagaucugaaccaagcggucaauaaccugguggaacucaagagcacccagcagaaauccauucugcggguuggaacgcuuaccagcgacgaucugcucacacuggcugccgaccuugagaagcugaaaucuaaggugauccgcaccgaaagaccccucuccagcggcgucuauauggggaaucugucuacacagcaacuggagcagcggcgcgcccuccugaaccuuauuggaauggugggcggggcucagggaacccagccuggcagagauggcguugugcgggucugggacgugaaaaauccggaucugcucaacaaucaauucgggacaaugcccucccugacccuugccugucugacgaagcagggacagguggaccucaacgaugucguucuggcucugaccgaccucggccugaucuacacagccaaguauccuaauagcucugaccuugaucgccugucccaaagccaucccauucucaacaugguggacaccaaaaaguccucucugaauaucagcggguuuaacuucucccuuggagcggccgugaaagcuggcgccugcaugcuggaugggggaaauaugcucgagacaaucaaggucaccccucagacgauggacggcauucugaaaagcauccugaaggugaaaaagucucucggcauguuuguuuccgauacacccggggaaagaaacccuuacgagaacauucuguauaagaucugucuuagcggagacggcuggccguacauugcuucucggaccagcaucguggggcgcgccugggaaaauacaaccgucgaucuggaguccgacggaaaaccccacaaggugggcaccgcggggucuaacaaaagccuccaguccgccggauucccuacaggccugacguauagccagcugaugacccuuaaggauucuaugaugcaacucgaccccuccgcuaaaacauggauugauaucgagggcagaccugaagaccccguugagaucgcccuguaccagccgaugagcgggugcuacauucacuuuuuccgggaaccuaccgaccugaagcaguuuaagcaggaugcuaaauauucucauggaaucgacguggccgaucucuuccccgcccaaccuggccugacauccgcugucauugaggcgcuucccagaaauauggugcugaccugucaggggagcgacgauaucaagcgccuccuggacucccagggacggaaagauauuaagcugaucgacaucgcccuuucuaaaacggauagcagacgcuuugaaaacgcugucugggaccagugcaaggaucucugucauaugcacacaggcgugguuguggagaagaaaaagagagggggcaaagaggaaauuacaccccacugcgcccugauggacuguaucauguacgaugccgcugucuccggaggccugaauauuccugugcuccgggccguucugccgcgcgacaugguguuccggaccucuagccccaaggucgugcuuugaggacuaguuauaagacugacuagcccgaugggccucccaacgggcccuccuccccuccuugcaccgagauuaaucaaaggcucuuuucagagccaccaaaaaaaaaaaaaaaaaaaaaaaaaaaaaaaaaaaaaaaaaaaaaaaaaaaaaaaaaaaaaaaaagaauu

SEQ ID NO: 19104 - RNA, 1955 nt, Artificial Sequence
  mRNA product Design i-3 (hSL-A64-N5) comprising derived and/or modified sequence from LASV(LASV003-NIG-2008;Clade II)__AIT17581__SP-HsPLAT_NP(2-569) (opt5)
aggagaaagcuuaccauggacgccaugaagagaggccugugcugugugcuccugcuuugcggggcugucuucguuagccccagcgccuccaaggaggugaaaucuuuccuguggacccagagccucagacgggaacuguccggcuacugcucuagcaucaaacuucaagucguuaaggacgcucaggcccugcuccacgggcuggauuuuuccgaggugucuaacgugcagcgccuuaugagaaagcagaaacgggacgauagcgaccugaagcgccucagagaucugaaucaagcggucaacaaucugguggaacucaaguccacccagcagaaaagcguucugcgggugggaacgcuuaccucugacgaucugcucacacuggcugccgaccuugagaagcugaaauccaaggucauucgcaccgaaagaccccucagcucuggcguguauauggggaaccuguccgcccagcaacuggagcagcggcgcacacuccugaauaugaucggaaugguuggcggggcucagggaacccagccuggcagagauggcgugguccgggugugggacgugaaaaacccggaucuucugaauaaccaauucgggacaaugcccagccucacccuggccugucuuacgaagcagggacaggucgaccugaaugauguugugcucgcucugaccgaccugggccucauuuacacagccaaguauccuaacucuuccgaccuggaucgccuuagccaaucccaucccauccugucuaugguggacaccaaaaagagcucccucaauauuagcggguacaacuuuucucugggagcggccgucaaagcuggcgccugcaugcuugaugggggaaauaugcuggagacaaucaaggugaccccucagacgauggacggcauccucaaauccauucugaagguuaaaaagagccugggcauguucgugucugauacacccggggaaagaaacccuuaugagaauauccucuacaagauuugucugagcggagacggcuggccguauaucgcuucccggaccucuauugucgggcgcgccugggaaaacacaaccguggaucuugagagcgacggaaaaccccagaagguuggcaccgcgggguccaacaaaagccugcagucugccggauuuccuacaggccucacguacucccaacugaugacccugaaggauagcaugaugcagcuugaccccucugcuaaaacauggaucgauauugagggcagaccugaagaccccguggagaucgcccucuaccagccgauguccgggugcuauauccacuucuuucgggaaccuaccgaccugaagcaguucaagcaagaugcuaaauacagccauggaauugacgucacagaucuguuucccgcccagccuggccucaccuccgccgugaucgaggcucugcccagaaauaugguccuuacgugucaggggucugacgauauuaagcgccugcucgacagccagggacggagagauaucaaacugauugacaucgcgcuguccaaggccgauucucgccgguucgaaaacgcugugugggaccaaugcaaagaucuuugucacaugcauacaggcguuguggucgagaagaagaaaagagggggcaaggaggaaaucacaccccacugcgcccucauggacuguauuauguaugaugccgcugugagcggaggccugaauaucccuguucugcgcgccgugcucccgcgggacauggucuuuagaaccuccagccccaaaguggugcugugaggacuaguuauaagacugacuagcccgaugggccucccaacgggcccuccuccccuccuugcaccgagauuaaucaaaggcucuuuucagagccaccaaaaaaaaaaaaaaaaaaaaaaaaaaaaaaaaaaaaaaaaaaaaaaaaaaaaaaaaaaaaaaaaagaauu

SEQ ID NO: 19105 - RNA, 1955 nt, Artificial Sequence
  mRNA product Design i-3 (hSL-A64-N5) comprising derived and/or modified sequence from LASV(LASV035-NIG-2009;Clade II)__AIT17589__SP-HsPLAT_NP(2-569) (opt5)
aggagaaagcuuaccauggacgccaugaagagaggccugugcugugugcuccugcuuugcggggcugucuucguuagccccagcgccuccaaggaggugaaaucuuuccuguggacccagagccucagacgggaacuguccggcuacugcucuagcaucaaacuucaagucguuaaagacgcucaggcccugcuccacgggcuggauuuuuccgaggugucuaacgugcagcgccuuaugagaaagcagaaacgggacgauagcgaccugaagcgccucagagaucugaaucaagcggucaacaaucugguggaacucaaguccacacagcagaaaagcauucugcggguuggaacgcuuaccucugacgaucugcucacacuggcugccgaccuugagaagcugaaauccaaggugauccgcaccgaaagaccccucagcucuggcgucuauauggggaaccuguccgcccagcaacuggagcagcggcgcgcucuccugaauaugauuggaauggugggcggggcccagggaacacagccuggcagagauggcguugugcgggucugggacgugaaaaacccggaucuucugaauaaccaauucgggaccaugcccagccucacacuggcuugucuuaccaagcagggacagguggaccugaaugaugccguccucgcgcugacggaccugggccucaucuacaccgccaaguauccuaacucuuccgaccuggaucgccuuagccaaucccaucccauucugaauaugguugacacaaagaagucuagccucaacaucuccggguacaauuuuagccugggagcugccgugaaagcuggcgccugcaugcuugaugggggaaacaugcuggagaccaucaaggugacaccucagaccauggacggcauucucaaaucuauccugaaggucaaaagaucccugggcauguucgugagcgauacgcccggggaacggaauccuuaugagaacauucucuacaagaucugucugucuggagacggcuggccguauauugcgagccgcacauccaucguugggagagccugggaaaacaccacaguggaucuugagucugacggaaagccccagaaagucggcaccaccgggagcaauaagucccugcagagcgcuggauuuccuacaggccucacguacucucaacugaugacccugaaagauuccaugaugcagcuugaccccagcgccaagacauggauugauaucgagggccggccugaagaccccguggagaucgcucucuaccagccgaugucugggugcuauauucacuucuuuagagaaccuaccgaccugaaacaguucaagcaagaugccaaguacucccauggaaucgacguugccgaucuguuucccgcucagccuggccucacaagcgcggugauugaggcccugccccgcaacaugguccuuaccugucagggguccgacgauaucaaaaagcugcucgacucucagggacggagagauauuaaacugaucgacaucgcucugagcaaggccgauucccgcaaauucgaaaaugccgugugggaccaaugcaaggaucuuugucacaugcauacgggcgucgugguugagaagaaaaagagagggggcaaagaggaaauuacaccccacugcgcucucauggacuguaucauguaugaugccgcggugucuggaggccugaacauuccuguccugcgggcugugcucccgcgcgacaugguuuuucggaccagcucccccaaggugguccugugaggacuaguuauaagacugacuagcccgaugggccucccaacgggcccuccuccccuccuugcaccgagauuaaucaaaggcucuuuucagagccaccaaaaaaaaaaaaaaaaaaaaaaaaaaaaaaaaaaaaaaaaaaaaaaaaaaaaaaaaaaaaaaaaagaauu

SEQ ID NO: 19106 - RNA, 1955 nt, Artificial Sequence
  mRNA product Design i-3 (hSL-A64-N5) comprising derived and/or modified sequence from LASV(LASV1000-NIG-2009;Clade II)__AIT17783__SP-HsPLAT_NP(2-569) (opt5)
aggagaaagcuuaccauggacgccaugaagagaggccugugcugugugcuccugcuuugcggggcugucuucguuagccccagcgccuccaaggaggugaaaucuuuccuguggacccagagccucagacgggaacuguccggcuacugcucuaacaucaaacuucaagucguuaaggacgcucaggcccugcuccacgggcuggauuuuagcgagguguccaaugugcagcgccuuaugagaaagcagaaacgggacgauucugaccugaagcgccucagagaucugaaccaagcggucaauaaccugguggaacucaagagcacacagcagaaauccauucugcggguuggaacgcuuaccagcgacgaucugcucacacuggcugccgaccuugagaagcugaaaucuaaggugauccgcaccgaaagaccccucuccagcggcgucuauauggggaaucugucuacacagcaacuggagcagcggcgcgcccuccugaacaugauuggaauggugggcggggcucagggaacccagccuggcagagauggcguugugcgggucugggacgugaaaaauccggaucuucugaacaaucaauucgggacaaugcccucccucacccuggccugucuuacgaagcagggacagguggaccugaacgaugucguucucgcucugaccgaccugggccucaucuacacagccaaguauccuaauagcucugaccuggaucgccuuucccaaagccaucccauucugaacaugguggacaccaaaaaguccucucucaauaucagcggguacaacuuuucccugggagcggccgugaaagcuggcgccugcaugcuugaugggggaaauaugcuggagacaaucaaggucaccccucagacgauggacggcauucucaaaagcauccugaaggugaaaaagucucugggcauguucguuuccgauacacccggggaaagaaacccuuaugagaacauucucuacaagaucugucugagcggagacggcuggccguauauugcuucucggaccagcaucguggggcgcgccugggaaaauacaaccgucgaucuugaguccgacggaaaaccccagaaggugggcaccgcggggucuaacaaaagccugcaguccgccggauuuccuacaggccucacguacagccaacugaugacccugaaggauucuaugaugcagcuugaccccuccgcuaaaacauggauugauaucgagggcagaccugaagaccccguugagaucgcccucuaccagccggugagcgggugcuauauucacuucuuucgggaaccuaccgaccugaagcaguucaagcaagaugcuaaauacucucauggaaucgacgucgccgaucuguuucccgcccagccuggccucacauccgcugugauugaggcgcugcccagaaauaugguccuuaccugucaggggagcgacgauaucaagcgccugcucgacucccagggacggagagauauuaaacugaucgacaucgcccugucuaaggcugauagccgccgguucgaaaacgccgugugggaccaaugcaaagaucuuugucacaugcauacgggcguuguggucgagaagaagaaaagagggggcaaggaggaaauuacaccccacugcgcccucauggacuguaucauguaugaugcugccguguccggaggccugaauauuccuguucugcgcgcggugcucccgcgggacauggucuuuagaaccucuagccccaaaguggugcugugaggacuaguuauaagacugacuagcccgaugggccucccaacgggcccuccuccccuccuugcaccgagauuaaucaaaggcucuuuucagagccaccaaaaaaaaaaaaaaaaaaaaaaaaaaaaaaaaaaaaaaaaaaaaaaaaaaaaaaaaaaaaaaaaagaauu

SEQ ID NO: 19107 - RNA, 1955 nt, Artificial Sequence
  mRNA product Design i-3 (hSL-A64-N5) comprising derived and/or modified sequence from LASV(LASV221-NIG-2010;Clade II)__AIT17625__SP-HsPLAT_NP(2-569) (opt5)
aggagaaagcuuaccauggacgccaugaagagaggccugugcugugugcuccugcuuugcggggcugucuucguuagccccagcgccuccaaggaggugaaaucuuuccuguggacccagagccucagacgggaacuguccggcuacugcucuagcaucaaacuucaagucguuaaggacgcucaggcccugcuccacgggcuggauuuuuccgaggugucuaacgugcagcgccuuaugagaaagcagcggcgcgacgauagcgaccugaaaagacuccgggaucugaaucaagcggucaacaaucugguggaacucaaguccacacagcaaaagagcauucugcgcguuggaacgcuuaccucugacgaucugcucacacuggcugccgaccuugagaaacugaaguccaaagugaucagaaccgaacggccccucagcucuggcgucuauauggggaaccuguccacacagcagcuggagcagcgcagagcccuccugaauaugauuggaauggugggcggggcucagggaacccagccuggccgggauggcguugugcgcgucugggacgugaagaacccggaucuucugaauaaccaauucgggacaaugcccagccucacccuggccugucuuacgaaacagggacagguggaccugaaugaugcuguccucgcccugaccgaccugggccucaucuacacagcgaaguauccuaacucuuccgaccuggauagacuuagccaaucccaucccauucugaauaugguugacaccaagaaaucuagccucaacaucuccggguacaauuuuagccugggagccgcugugaaggccggcgcuugcaugcuugaugggggaaacaugcuggagacaaucaaagugaccccucagacggucgacggcauucucaagucuauccugaaagugaagcggucccugggcauguucguuagcgauacacccggggaacgcaauccuuaugagaacauucucuacaaaaucugucugucuggagacggcuggccguauauugccagcagaaccuccaucguggggcgggcgugggaaaacacaaccgucgaucuugagucugacggaaagccccagaaggugggcaccgccgggagcaauaaaucccugcagagcgcuggauuuccuacaggccucacguacucucaacugaugacccugaaggauuccaugaugcagcuugaccccagcgccaaaacauggauugauaucgagggcagaccugaagaccccguugagaucgcucucuaccagccgaugucugggugcuauauucacuucuuucgcgaaccuaccgaccugaagcaguucaaacaagaugccaaguacucccauggaaucgacguggccgaucuguuucccgcucagccuggccucacaagcgcggucauugaggcccugccccggaacauggugcuuaccugucagggguccgacgauaucaagagacugcucgacucucagggacgccgggauauuaaacugaucgacaucgcucugagcaaggccgauuccagaaaauucgaaaaugccgucugggaccaaugcaaggaucuuugucacaugcauacgggcgugguuguggagaaaaagaagcgcgggggcaaagaggaaauuacaccccacugcgcucucauggacuguaucauguaugaugccgcggucucuggaggccugaacauuccugugcugcgggcuguucucccgagagacaugguguuucgcaccagcucccccaaggucgugcugugaggacuaguuauaagacugacuagcccgaugggccucccaacgggcccuccuccccuccuugcaccgagauuaaucaaaggcucuuuucagagccaccaaaaaaaaaaaaaaaaaaaaaaaaaaaaaaaaaaaaaaaaaaaaaaaaaaaaaaaaaaaaaaaaagaauu

SEQ ID NO: 19108 - RNA, 1955 nt, Artificial Sequence
  mRNA product Design i-3 (hSL-A64-N5) comprising derived and/or modified sequence from LASV(LASV237-NIG-2010;Clade II)__AIT17639__SP-HsPLAT_NP(2-569) (opt5)
aggagaaagcuuaccauggacgccaugaagagaggccugugcugugugcuccugcuuugcggggcugucuucguuagccccagcgccuccaaggaggugaaaucuuuccuguggacccagagccucagacgggaacuguccggcuacugcucuaacaucaaacuucaagucguuaaggacgcucaggcccugcuccacgggcuggauuuuagcgagguguccaaugugcagcgccuuaugagaaagcagaaacgggacgauucugaccugaagcgccucagagaucugaaccaagcggucaauaaccugguggaacucaagagcacacagcagaaauccauucugcggguuggaacgcuuaccagcgacgaucugcucacacuggcugccgaccuugagaagcugaaaucuaaggugauccgcaccgaaagaccccucuccagcggcgucuauauggggaaucugucuacacagcaacuggagcagcggcgcgcccuccugaacaugauuggaauggugggcggggcucagggaacccagccuggcagagauggcguugugcgggucugggacgugaaaaauccggaucuucugaacaaucaauucgggacaaugcccucccucacccuggccugucuuacgaagcagggacagguggaccugaacgaugcuguccucgcccugaccgaccugggccucaucuacacagcgaaguauccuaauagcucugaccuggaucgccuuucccaaagccaucccauucugaacaugguugacaucaaaaaguccucucucaauaucagcggguacaacuuuucccugggagccgcugugaaagccggcgcuugcaugcuugaugggggaaauaugcuggagaccauuaaggugacaccucagaccauggacggcauccucaaaagcauucugaaggucaaaagaucucugggcauguucguguccgauacgcccggggaacggaacccuuaugagaacauccucuacaagauuugucugagcggagacggcuggccguauaucgccucucgcacaagcauuguugggagagcgugggaaaauaccacaguggaucuugaguccgacggaaagccccagaaagucggcucugccgggagcaacaagucccugcagagcgcuggauuuccuaccggccucaccuacucucaacugaugacacugaaagauuccaugaugcagcuugaccccagcgccaagacguggaucgauaucgagggccggccugaagaccccguggagauugcucucuaccagccgaugucugggugcuauauccacuucuuuagagaaccuaccgaccugaaacaguucaagcaagaugccaaguacucccauggaauugacguugccgaucuguuucccgcucagccuggccucacaagcgcggugaucgaggcccugccccgcaauaugguccuuaccugucagggguccgacgauauuaaacggcugcucgacucucagggaagacgcgauaucaagcugaucgacauugcucugagcaaagccgauucccggagauucgaaaacgccgugugggaccaaugcaaggaucuuugucacaugcauacaggcgucgugguugagaaaaagaagcgcgggggcaaagaggaaaucacgccccacugcgcucucauggacuguauuauguaugaugccgcggugucuggaggccugaauaucccuguccugcgggcugugcucccgagagacaugguuuuucgcaccagcucccccaaggugguccugugaggacuaguuauaagacugacuagcccgaugggccucccaacgggcccuccuccccuccuugcaccgagauuaaucaaaggcucuuuucagagccaccaaaaaaaaaaaaaaaaaaaaaaaaaaaaaaaaaaaaaaaaaaaaaaaaaaaaaaaaaaaaaaaaagaauu

SEQ ID NO: 19109 - RNA, 1955 nt, Artificial Sequence
  mRNA product Design i-3 (hSL-A64-N5) comprising derived and/or modified sequence from LASV(LASV253-NIG-2011;Clade II)__AIT17671__SP-HsPLAT_NP(2-569) (opt5)
aggagaaagcuuaccauggacgccaugaagagaggccugugcugugugcuccugcuuugcggggcugucuucguuagccccagcgccuccaaggaggugaaaucuuuccuguggacccagagccucagacgggaacuguccggcuacugcucuagcaucaaacuucaagucguuaaggacgcucaggcccugcuccacgggcuggauuuuuccgaggugucuaacgugcagcgccuuaugagaaagcagaaacgggacgauagcgaccugaagcgccucagagaucugaaucaagcggucaacaaucugguggaacucaaguccacccagcagaaaagcguucugcgggugggaacgcuuaccucugacgaucugcucacacuggcugccgaccuugagaagcugaaauccaaggucauucgcaccgaaagaccccucagcucuggcguguauauggggaaccuguccacacagcaacuggagcagcggcgcgcccuccugaauaugaucggaaugguuggcggggcucagggaacccagccuggcagagauggcgugguccgggugugggacgugaaaaacccggaucuucugaauaaccaauucgggacaaugcccagccucacccuggccugucuuacgaagcagggacaggucgaccugaaugauguugugcucgcucugaccgaccugggccucauuuacacagccaaguauccuaacucuuccgaccuggaucgccuuagccaaucccaucccauccugaauaugguggacaccaaaaagucuagccucaacauuuccggguacaauuuuagccugggagcggccgucaaagcuggcgccugcaugcuugaugggggaaacaugcuggagacaaucaaggugaccccucagacgauggacggcauccucaaaucuauucugaagguuaaaaagucccugggcauguucgugagcgauacacccggggaaagaaauccuuaugagaacauccucuacaagauuugucugucuggagacggcuggccguauaucgcuagccggaccuccauugucgggcgcgccugggaaaacacaaccguggaucuugagucugacggaaaaccccagaagguuggcaccgcggggagcaauaaaucccugcagagcgccggauuuccuacaggccucacguacucucaacugaugacccugaaggauuccaugaugcagcuugaccccagcgcuaaaacauggaucgauauugagggcagaccugaagaccccguggagaucgcccucuaccagccgaugucugggugcuauauccacuucuuucgggaaccuaccgaccugaagcaguucaagcaagaugcuaaauacucccauggaauugacgucacagaucuguuucccgcccagccuggccucaccagcgccgugaucgaggcucugcccagaaacaugguccuuacgugucagggguccgacgauauuaagcgccugcucgacucucagggacggagagauaucaaacugauugacaucgcgcugagcaaggccgauucccgccgguucgaaaaugcugugugggaccaaugcaaagaucuuugucacaugcauacaggcguuguggucgagaagaagaaaagagggggcaaggaggaaaucacaccccacugcgcccucauggacuguauuauguaugaugccgcugugucuggaggccugaacaucccuguucugcgcgccgugcucccgcgggacauggucuuuagaaccagcucccccaaaguggugcugugaggacuaguuauaagacugacuagcccgaugggccucccaacgggcccuccuccccuccuugcaccgagauuaaucaaaggcucuuuucagagccaccaaaaaaaaaaaaaaaaaaaaaaaaaaaaaaaaaaaaaaaaaaaaaaaaaaaaaaaaaaaaaaaaagaauu

SEQ ID NO: 19110 - RNA, 1955 nt, Artificial Sequence
  mRNA product Design i-3 (hSL-A64-N5) comprising derived and/or modified sequence from LASV(LASV254-NIG-2011;Clade II)__AIT17675__SP-HsPLAT_NP(2-569) (opt5)
aggagaaagcuuaccauggacgccaugaagagaggccugugcugugugcuccugcuuugcggggcugucuucguuagccccagcgccuccaaggaggugaaaucuuuccuguggacccagagccucagacgggaacuguccggcuacugcucuagcaucaaacuucaagucguuaaggacgcucaggcccugcuccacgggcuggauuuuuccgaggugucuaacgugcagcgccuuaugagaaagcagaaacgggacgauagcgaccugaagcgccucagagaucugaaucaagcggucaacaaucugguggaacucaaguccacacagcagaaaagcguucugcgggugggaacgcuuaccucugacgaucugcucacacuggcugccgaccuugagaagcugaaauccaaggucauucgcaccgaaagaccccucagcucuggcguguauauggggaaccuguccacacagcaacuggagcagcggcgcgcccuccugaauaugaucggaaugguuggcggggcucagggaacccagccuggcagagauggcgugguccgggugugggacgugaaaaacccggaucuucugaauaaccaauucgggacaaugcccagccucacccuggccugucuuacgaagcagggacaggucgaccugaaugaugcuguucucgcccugaccgaccugggccucauuuacacagcgaaguauccuaacucuuccgaccuggaucgccuuagccaaucccaucccauccugaauaugguggacaccaaaaagucuagccucaacauuuccggguacaauuuuagccugggagccgcugugaaagccggcgcuugcaugcuugaugggggaaacaugcuggagacaaucaaggucaccccucagacgauggacggcauccucaaaucuauucugaaggugaaaaagucccugggcauguucguuagcgauacacccggggaaagaaauccuuaugagaacauccucuacaagauuugucugucuggagacggcuggccguauaucgccagccggaccuccauuguggggcgcgcgugggaaaacacaaucgucgaucuugagucugacggaaaaccccagaaggugggcaccgccgggagcaauaaaucccugcagagcgcuggauuuccuaccggccucacauacucucaacugaugacgcugaaggauuccaugaugcagcuugaccccagcgccaaaaccuggauugauaucgagggcagaccugaagaccccguugagaucgcucucuaccagccgaugucugggugcuauauucacuucuuucgggaaccuacagaccugaagcaguucaagcaagaugccaaauacucccauggaaucgacguggccgaucuguuucccgcucagccuggccucaccagcgcggucauugaggcccugcccagaaacauggugcuuacaugucagggguccgacgauaucaagcgccugcucgacucucagggacggagagauauuaaacugaucgacaucgcucugagcaaggccgauucccgccgguucgaaaaugccgucugggaccaaugcaaagaucuuugucacaugcauaccggcgugguuguggagaagaagaaaagagggggcaaggaggaaauuacgccccacugcgcucucauggacuguaucauguaugaugccgcggucucuggaggccugaacauuccugugcugcgcgcuguucucccgcgggacaugguguuuagaacaagcucccccaaagucgugcugugaggacuaguuauaagacugacuagcccgaugggccucccaacgggcccuccuccccuccuugcaccgagauuaaucaaaggcucuuuucagagccaccaaaaaaaaaaaaaaaaaaaaaaaaaaaaaaaaaaaaaaaaaaaaaaaaaaaaaaaaaaaaaaaaagaauu

SEQ ID NO: 19111 - RNA, 1955 nt, Artificial Sequence
  mRNA product Design i-3 (hSL-A64-N5) comprising derived and/or modified sequence from LASV(Nig08-04;Clade II)__ADU56611__SP-HsPLAT_NP(2-569) (opt5)
aggagaaagcuuaccauggacgccaugaagagaggccugugcugugugcuccugcuuugcggggcugucuucguuagccccagcgccuccaaggaggugaaaucuuuccuguggacccagagccucagacgggaacuguccggcuacugcucuaacaucaaacuucaagucguuaaggacgcucaggcccugcuccacgggcuggauuuuagcgagguguccaaugugcagcgccuuaugagaaagcagaaacgggacgauggagaccugaagcgccucagagaucugaaccaagcggucaauaaccugguggaacucaagucuacccagcagaaaagcguucugcgggugggcacgcuuaccuccgacgaucugcucacacuggcugccgaccuugagaagcugaaaagcaaggucauucgcaccgaaagaccccucucuuccgggguguauaugggaaaucugagcacacagcaacuggagcagcggaaagcccuccugucuaugaucggcaugguugggggagcucagggcacccagccuggccgcgaugggguggucagagugugggacgugaagaacccggaucuucugaauaaccaauucggaacaaugcccucccucacccuggccugucuuacgaagcagggccaggucgaccugaaugaugcuguucucgcccugaccgaccuggggcucauuuacacagcgaaauauccuaacagcucugaccuggaucggcuuucccaaagccaucccauccugaauaugguggacaccaagaaauccucucucaacauuagcggauacaauuuuucccugggcgccgcugugaaggccggggcuugcaugcuugauggaggcaacaugcuggagacaaucaaagucaccccucagacgauggacggcauccucaagagcauucugaaagugaagcgcucucuggggauguucguuuccgauacacccggagaaagaaauccuuaugagaacauccucuacaagauuugucugagcggcgacggguggccguauaucgccucucggaccagcauugugggacgcgcgugggaaaacacaaccgucgaucuugaguccgacggcaaaccccagaagguggggaccgccggaucuaauaaaagccugcaguccgcuggcuuuccuacaggccucacguacagccaacugaugacccugaaggauucuaugaugcagcuugaccccuccgccaaaacauggaucgauauugaggggagaccugaagaccccguugagaucgcucucuaccagccgaugagcggaugcuauauccacuucuuucgggaaccuaccgaccugaagcaguucaagcaagaugccaaauacucucauggcauugacgugacagaucuguuuuccgcccagcccgggcucaccagcgcugucaucgaggcgcugccuagaaacauggugcuuacgugucagggauccgacgauauuaagaaacugcucgacucucagggccgccgggauaucaagcugauugacaucagccugaauaaagccgauuccagacgcuucgaaaacgcugucugggaccaaugcaaggaucuuugucacaugcauacaggggugguuguggagaagaaaaagcggggcggaaaagaggaaaucacaccccacugcgcccucauggacuguauuauguuugaugccgcugucucuggcgggcugaauauccccauucugagagccgugcucccucgcgacaugguuuuccggaccagcuccccgaaggugguccugugaggacuaguuauaagacugacuagcccgaugggccucccaacgggcccuccuccccuccuugcaccgagauuaaucaaaggcucuuuucagagccaccaaaaaaaaaaaaaaaaaaaaaaaaaaaaaaaaaaaaaaaaaaaaaaaaaaaaaaaaaaaaaaaaagaauu

SEQ ID NO: 19112 - RNA, 1958 nt, Artificial Sequence
  mRNA product Design i-3 (hSL-A64-N5) comprising derived and/or modified sequence from LASV(GA391;Clade III)__AAA46284__SP-HsPLAT_NP(2-570) (opt5)
aggagaaagcuuaccauggacgccaugaagagaggccugugcugugugcuccugcuuugcggggcugucuucguuagccccagcgccuccaaggaggugagaucuugccuguggacccagagccuccggcgcgaacuguccggcuacuguucuaacaucaaacuucaagucguuaaggacgcucaggcccugcuccacgggcuggauuucagcgagguguccaaugugcagagacuuaugcggaaacagaagcgcgacgauggagaccugaaaagacuccgggaucugaaccaagcggucaauaaccugguggaacucaagucuacacagcagaaaagcguucugcgcgugggcacgcuuuccagcgacgaucugcucauucuggcugccgaccuugagaaacugaagucuaaagucaccagaacagaacggccccucuccagcgggguguauaugggaaaucugucuucccagcaacuggaucagcgcagagcccuccugaacaugaucggcaugaccgggguuagcggaggcggcaagggggcuucuaauggaauugugcgggucugggacgugaaaaacgccgagcuucugaauaaccaguuuggcacaaugccuucccucacccuggcuugccuuacaaagcaggggcaaguggaucugaaugacgccguccaggcgcucaccgaucugggacugaucuacacggccaaguauccgaacagcuccgaccucgaccgccugucucagagccaucccauucuuaauaugaucgauaccaaaaaguccagccugaacaucucuggcuacaauuucucccucggggcugccguuaaagcuggagccuguaugcuggacggcggcaacaugcuugagacaauuaaggugagcccucaaaccauggaugggauccugaaaucuauucucaaggugaaaaagagccugggaauguuugucuccgacacacccggcgaaagaaacccuuaugagaauauccuguacaagauuugccucucuggggauggauggagcuauaucgcgucccggaccagcauugugggccgcgccugggaaaacacgguuguggaccuggagcaggauaauaaaccccagaagaucgggaacggaggcucuaauaaaucccuucagagcgcuggcuucgccgcugggcugaucuacucucaacucaugacacugaaggacuuuaaauguuucaaccugauuccuaaugccaagaccuggauggauaucgagggaagaccggaagaccccgucgagauugcccuuuaccagccuuccagcggcugcuaugugcacuuuuuccgggaacccacagaucucaagcaguuuaaacaggacgcuaaguacucccaugggagagacguuaccgaucuguucgcggcccaaccuggacugaccucugcugugaucgaggcccucccccgcaacauggucauuacaugucagggcagcgaagacauccggaaacugcuugagucccaggggagacgcgauaucaagcugauugacaucacgcucucuaaagccgauagccggaaguuugagaaugcugugugggaccaguucaaggaucugugccacaugcauaccggcgucgugguugaaaagaagaaaagaggaggcaaggaggaaauuacaccgcacugugcccugauggacugcaucauguuugaugcggcuguguccgggggacuugacgccaaaguccuccgcgugguucugccucgggauaugguguucagaaccagcacacccaaggucgugcugugaggacuaguuauaagacugacuagcccgaugggccucccaacgggcccuccuccccuccuugcaccgagauuaaucaaaggcucuuuucagagccaccaaaaaaaaaaaaaaaaaaaaaaaaaaaaaaaaaaaaaaaaaaaaaaaaaaaaaaaaaaaaaaaaagaauu

SEQ ID NO: 19113 - RNA, 1955 nt, Artificial Sequence
  mRNA product Design i-3 (hSL-A64-N5) comprising derived and/or modified sequence from LASV(Nig08-A19;Clade III)__ADU56619__SP-HsPLAT_NP(2-569) (opt5)
aggagaaagcuuaccauggacgccaugaagagaggccugugcugugugcuccugcuuugcggggcugucuucguuagccccagcgccuccaaggaggugaaaucuuuccuguggacccagagccucagacgggaacuguccggcuacugcucuaacaucaaacuucaagucguuaaggacgcucaggcccugcuccacgggcuggauuuuagcgagguguccaaugugcagcgccuuaugagaaagcagaaacgggacgauggagaccugaagcgccucagagaucugaaccaagcggucaauaaccugguggaacucaagucuacacagcagaaaagcguucugcgggugggcacgcuuuccagcgacgaucugcucguccuggcugccgaccuugagaagcugaaaucuaaggugguucgcaccgaaagaccccucuccagcgggauuuauaugggaaaucugucuucccagcaacuggaucagcggaaagcccuccugaacaugaucggcaugacagggggaaauggcggccgcaacaccacaagcgacgggauugugagagucugggaugugaagaaugcugagcuucugaacaaucaguucggaaccaugccuucucucacacuggccugucuuaccaagcagggccaaguggaccugaacgaugcuguccaggcccucacggaccuggggcugaucuacaccgcgaaauaucccaauuccagcgaccucgaucggcuggcccagucccauccgauucuuaacaugaucgacacaaagaaaucuagccugaauaucuccggauacaacuuuagccucggcgcugccguuaaggcuggggccugcaugcuggauggaggcaacaugcuugagaccauuaaagugucuccucaaacaauggacggcauccugaaguccauucucaaagugaagcgcagccuggggauguucaucucugauacccccggagaaagaaauccuuaugagaacauucuguacaagaucugucucagcggcgacggguggcccuauauugcgucccggacgucuaucgucggacgcgccugggaaaauacagugguugaucuggagagcgacaacaaaccucagaagaccggcaaugggggauccaacaaaagccuucagucugcuggcuuugccgcuggccugacauacucccagcucaugacccugaaggauagcaugcugcaacuugacccgaaugccaaaaccuggauggauaucgaggggagacccgaagacccuguggagauugcccucuaccagcccucuuccggaugcuauauccacuucuuucgggaaccuacagaccugaagcaguucaagcaggaugcuaaauacagccauggcauugacgucacggaucuguuugcggcccaacccgggcucaccuccgcugugaucgaggcccugccgagaaacaugguuauuacaugucagggaucugaagacauccgcaaacuucuggagagccagggccggagagauaucaagcucauugacaucucccugucuaagguggauagccgcaaauucgagaaugccgucugggaccaguuuaaggaucugugccacaugcauaccgggauuguggucgaaaagaaaaagcggggcggaaaagaggaaaucacaccucacugugcucuuauggacugcauuauguucgaugccgcgguguccggcgggguugacgcuaaggugcucagagccguccugccccgcgauaugguguuucggaccagcacgccuaaaguugugcugugaggacuaguuauaagacugacuagcccgaugggccucccaacgggcccuccuccccuccuugcaccgagauuaaucaaaggcucuuuucagagccaccaaaaaaaaaaaaaaaaaaaaaaaaaaaaaaaaaaaaaaaaaaaaaaaaaaaaaaaaaaaaaaaaagaauu

SEQ ID NO: 19114 - RNA, 1955 nt, Artificial Sequence
  mRNA product Design i-3 (hSL-A64-N5) comprising derived and/or modified sequence from LASV(G1180-SLE-2010;Clade IV)__AIT17169__SP-HsPLAT_NP(2-569) (opt5)
aggagaaagcuuaccauggacgccaugaagagaggccugugcugugugcuccugcuuugcggggcugucuucguuagccccagcgccuccaaggagaucaaaucuuuccuguggacccagagccucagacgggaacuguccggcuacugcucuaacauuaagcugcaaguggucaaagacgcucaggcccugcuccacgggcuggauuuuagcgagguuuccaaugugcagcgccuuaugagaaaggaacggcgcgacgauaacgaccugaaaagacuccgggaucugaaucaggcggugaacaaucuggucgagcucaagucuacacaacaaaagagcauccugcgcgugggaacgcuuaccuccgacgaucugcucauucuggcugccgaccuugaaaaacuuaagagcaaaguuaucagaacagagcggccccucucugccggcguguauauggggaaccuguccagccagcagcuggaucagcgcagagcucuccugucuaugauuggaauguccagcggcaaucagcgggcccaggcugggcgcgacggagucgugagaguuugggaugugaagaacgucgagcuucugaauaaccaguucggcaccaugccuucucucacacuggccugucuuaccaaacaaggccagguggaccugaaugaugcggugcaggcccucacagaccuggggcugaucuacaccgcuaaguauccgaacacguccgaccucgaucggcugacccaaagccaucccauccuuaauaugauugacacaaagaaauccucucugaacaucagcggauacaauuuuucccucggcgccgcugucaaggccggggcgugcaugcuggauggaggcaacaugcuugaaaccauuaaaguuagcccucagacaauggacgggauccugaagucuauucucaaagugaagaaagcccugggaauguucaucuccgauacccccggcgagcgcaacccuuaugaaaauauucuguacaagaucugucucagcggcgacggguggcccuauaucgcuucuagaacgagcauuacaggacgggccugggagaacaccguggucgaucuggaguccgacggcaagccucagaaagcugggucuaauaacagcaauaagucccuucagagcgugggauuuacagccggccugaccuacucucaacucaugacccugaaagaugccaugcugcagcuugacccgaacgcuaagacauggauggauaucgaagggagacccgaggacccuguugaaauugcgcucuaccagcccuccagcggaugcuauauccacuucuuucgcgagccuacggaccugaaacaguucaagcaagaugccaaguacucucauggcauugacgugaccgaucuguuugcugcccagcccggccucacauccgccgucaucgacgcucugccgcggaauauggugaucaccugucaggggagcgaugacauuagaaaacuucuggaaucccagggacgcaaggauaucaaacucauugacaucgcccugucuaagacagauagccggaaauaugagaacgcgguuugggaccaauacaaggaucugugccacaugcauaccggcguggucguggagaagaaaaagagagggggaaaagaagagauuacgccucacugugcucuuauggacugcaucauguucgaugccgccgucuccggcgggcucaauacaucugugcugcgcgcuguucugccccgggacaugguguuuagaaccagcaccccucgcgucgugcucugaggacuaguuauaagacugacuagcccgaugggccucccaacgggcccuccuccccuccuugcaccgagauuaaucaaaggcucuuuucagagccaccaaaaaaaaaaaaaaaaaaaaaaaaaaaaaaaaaaaaaaaaaaaaaaaaaaaaaaaaaaaaaaaaagaauu

SEQ ID NO: 19115 - RNA, 1955 nt, Artificial Sequence
  mRNA product Design i-3 (hSL-A64-N5) comprising derived and/or modified sequence from LASV(G1442-SLE-2011;Clade IV)__AIT17181__SP-HsPLAT_NP(2-569) (opt5)
aggagaaagcuuaccauggacgccaugaagagaggccugugcugugugcuccugcuuugcggggcugucuucguuagccccagcgccuccaaggaggugaaaucuuuccuguggacccagagccucagacgggaacuguccggcuacugcucuaacaucaaacuucaagucguuaaggacgcucaggcccugcuccacgggcuggauuuuagcgagguguccaaugugcagcgccuuaugagaaagcagcggcgcgacgauaacgaccugaaaagacuccgggaucugaaucaagcggucaacaaucugguggaacucaagucuacacagcaaaagagcguucugcgcgugggaacgcuuaccuccgacgaucugcucguccuggcugccgaccuugagaaacuuaagagcaaagugauuagaacagaacggccccucucugccggcguuuauauggggaaccuguccagccagcagcuggaucagcgcagagcucuccugaauaugaucggaaugucuggcgggauucagggaacccggacaggccgcgacggcguggucagagugugggaugugaagaacgccgaccuucugaauaaccaguucgggaccaugccuucccucacacuggcuugucuuaccaaacaaggacaggucgaucugaaugacguugugcaggcccucacggaccugggccugaucuacaccgcgaaguauccgaacgccagcgaucucgaccggcugacacaaucucaucccauucuuaauaugaucgauaccaagaaauccagccugaacaucuccggguacaauuuuucucucggagcugccgugaaggcuggcgccugcaugcuggacgggggaaacaugcuugagacaauuaaagucagcccucagaccauggauggcauccugaaguccauucucaaagugaagaaaacgcugggcauguucaucagcgacacacccggggagcgcaacccuuaugaaaauauucuguacaagaucugucucucuggagauggcuggcccuauauugcguccagaaccagcaucacagggcgggccugggagaacaccguuguggaccuggaaucugauggaaagccucagaaagcuggcagcaauaacuccaauaagucucuucagagcgccggguuugcugccggacugaccuacucccaacucaugacacugaaagacgccaugcugcagcuugauccgaacgcuaagacguggauggacaucgagggcagacccgaggacccugucgaaauugcgcucuaccagcccagcucuggcugcuauauccacuucuuucgcgagccuaccgaucugaaacaguucaagcaagacgccaaguacucccaugggauugaugugacagaccuguuugcugcccagcccggacucaccagcgccguuaucgaagcucugccgcggaauauggugauuacaugucagggcucugaugacaucaaaaagcugcuggagucccaggggagaaaagauaucaagcucauugacaucgcccugagcaaaaccgauucccgcaaguaugaaaacgcggucugggaccaauacaaggaucugugccacaugcauacgggaguggucguggagaaaaagaaacggggcgggaaggaggaaauuacaccucacugugcucuuauggacugcaucauguucgaugccgccguuucuggcggacucaauacccuggugcugagagcuguccucccccgcgacaugguguuucggaccagcacaccuagaguugugcugugaggacuaguuauaagacugacuagcccgaugggccucccaacgggcccuccuccccuccuugcaccgagauuaaucaaaggcucuuuucagagccaccaaaaaaaaaaaaaaaaaaaaaaaaaaaaaaaaaaaaaaaaaaaaaaaaaaaaaaaaaaaaaaaaagaauu

SEQ ID NO: 19116 - RNA, 1955 nt, Artificial Sequence
  mRNA product Design i-3 (hSL-A64-N5) comprising derived and/or modified sequence from LASV(G3010-SLE-2013;Clade IV)__AIT17345__SP-HsPLAT_NP(2-569) (opt5)
aggagaaagcuuaccauggacgccaugaagagaggccugugcugugugcuccugcuuugcggggcugucuucguuagccccagcgccuccaaggagaucaaaucuuuccuguggacccagagccucagacgggaacuguccggcuacugcucuaacauuaaacuucaaguggucaaagacgcucaggcccugcuccacgggcuggauuuuagcgagguuuccaaugugcagcgccuuaugagaaaggaacggcgcgacgauaacgaccugaaaagacuccgggaucugaaucaggcggugaacaaucuggucgagcucaagucuacacaacaaaagagcauccugcgcgugggaacgcuuaccuccgacgaucugcucauucuggcugccgaccuugaaaaacuuaagagcaaaguuacaagaaccgagcggccccucucugccggcguguauauggggaaccuguccagccagcagcuggaucagcgcagagcucuccugucuaugaucggaauguccagcggcguccagggggcccgggcuggacgcgacggcgugguuagagugugggaugucaagaaugccgagcuucugaacaaucaguucggcacaaugccuucucucacccuggcgugucuuacaaaacaggggcaaguggaccugaacgaugugguccaggcccucaccgaccugggacugauuuacacggcuaaguauccgaauaccuccgaccucgaucggcugacacagagccaucccauccuuaacaugaucgacaccaagaaauccucucugaauauuagcggcuacaacuuuucccucggggccgcuguuaaggccggagcgugcaugcuggauggcgggaauaugcuugaaacaaucaaagugagcccucaaaccauggacggcauucugaagucuauccucaaagugaagaaagcccugggaauguucauuuccgagacgcccggcgaacgcaacccuuaugagaacauccuguacaagauuugucucagcggggauggauggcccuauaucgcuucuagaacaagcaucaccggccgggccugggagaauacagucguggaccuggaauccgaugggaagccucagaaagcuggaucuaacaauagcaacaagucccuucagagcgccggcuuuaccgccgggcugaccuacucucagcucaugacacugaaagacgcuaugcugcaacuugauccgaaugcgaagacguggauggacauugagggaagacccgaagauccuguugagguggcccucuaccagcccuccagcggcugcuauauccacuucuuucgcgaaccuaccgaccugaaacaguucaagcaggacgcuaaguacucucauggcauugaugucacagaccuguuugccgcccaacccgggcucaccuccgcugugaucgaugcccugccgcggaacaugguuauuacaugucagggaagcgacgauaucaaaaagcugcuggagucccagggcagaaaagacaucaagcucauugauaucgcgcugucuaaaaccgacagccgcaaguaugagaaugcugugugggaucaguacaaggaccugugccacaugcauacgggggucguggucgaaaagaagaaacggggaggcaaggaggaaauuacaccucacugugcccuuauggauugcaucauguucgacgccgcuguguccgggggccucaacaccucuguucugagagccgugcugccccgcgauauggucuuucggaccagcacaccuagagugguucucugaggacuaguuauaagacugacuagcccgaugggccucccaacgggcccuccuccccuccuugcaccgagauuaaucaaaggcucuuuucagagccaccaaaaaaaaaaaaaaaaaaaaaaaaaaaaaaaaaaaaaaaaaaaaaaaaaaaaaaaaaaaaaaaaagaauu

SEQ ID NO: 19117 - RNA, 1955 nt, Artificial Sequence
  mRNA product Design i-3 (hSL-A64-N5) comprising derived and/or modified sequence from LASV(G502-SLE-2009;Clade IV)__AIT17127__SP-HsPLAT_NP(2-569) (opt5)
aggagaaagcuuaccauggacgccaugaagagaggccugugcugugugcuccugcuuugcggggcugucuucguuagccccagcgccuccaaggagaucaaaucuuuccuguggacccagagccucagacgggaacuguccggcuacugcucuaacauuaagcugcaaguggucaaagacgcucaggcccugcuccacgggcuggauuuuagcgagguuuccaaugugcagcgccuuaugagaaaggaacggcgcgacgauaacgaccugaaaagacuccgggaucugaaucaggcggugaacaaucuggucgagcucaagucuacacaacaaaagagcauccugcgcgugggaacgcuuaccuccgacgaucugcucauucuggcugccgaccuugaaaaacuuaagagcaaaguuaucagaacagagcggccccucucugccggcguguauauggggaaccuguccagccagcagcuggaucagcgcagagcucuccugucuaugauuggaauguccggcgggaaucagggaguccgggccggcaaggacggcgugguucgcgugugggaugucaaaaacgcugagcuucugaauaaccaguucgggaccaugccuagccucacacuggccugucuuaccaagcagggacaaguggaccugaaugaugcggugcaggcccucacagaccugggccugaucuacaccgcuaaguauccgaacacgucugaccucgauagacugacccagucccaucccauccuuaauaugauugacaccaaaaagagcucccugaacaucucuggguacaauuuuagccucggagccgcugucaaagccggcgcgugcaugcuggaugggggaaacaugcuugaaacaauuaagguuuccccucaaacaauggacggcauccugaaaagcauucucaaggugaaaaaggcccugggcauguucaucucugauacccccggggagcggaacccuuaugaaaauauucuguacaagaucugucucuccggagacggcuggcccuauaucgcuagccgcacgucuauuacagggagagccugggagaacaccguggucgaucuggagagcgacggaaaaccucagaaggcuggcuccaauaacucuaauaaaagccuucaguccgccggguuuacagccggacugaccuacagccagcucaugacccugaaggaugcuaugcugcaacuugacccgaacacaaaaacguggauggauaucgaaggccggcccgaggacccuguggaaauugcgcucuaccagcccucuuccggcugcuauauccacuucuuuagagagccuaccgaccugaagcaguucaagcaggaugccaaauacagccaugggauugacguuacagaucuguuugcugcccaacccggacucaccucugccgugaucgacgcucugccgcgcaauauggucaucacaugucagggcuccgaugacauucggaaacuucuggaaagccaggggagaaaggauaucaagcucauugacaucgcccugaacaaaaccgauucccgcaaguaugagaaugcggugugggaccaguacaaggaucugugccacaugcauacgggaguuguggucgagaaaaagaaacggggcgggaaggaagagauuacaccucacugugcucuuauggacugcaucauguucgaugccgccgugucuggcggacucaacaccagcguccugagagcugugcugccccgcgacaugguuuuucggaccuccacaccuagagugguccucugaggacuaguuauaagacugacuagcccgaugggccucccaacgggcccuccuccccuccuugcaccgagauuaaucaaaggcucuuuucagagccaccaaaaaaaaaaaaaaaaaaaaaaaaaaaaaaaaaaaaaaaaaaaaaaaaaaaaaaaaaaaaaaaaagaauu

SEQ ID NO: 19118 - RNA, 1955 nt, Artificial Sequence
  mRNA product Design i-3 (hSL-A64-N5) comprising derived and/or modified sequence from LASV(G733-SLE-2010;Clade IV)__AIT17155__SP-HsPLAT_NP(2-569) (opt5)
aggagaaagcuuaccauggacgccaugaagagaggccugugcugugugcuccugcuuugcggggcugucuucguuagccccagcgccuccaaggagaucaaaucuuuccuguggacccagagccucagacgggaacuguccggcuacugcucuaacauuaagcugcaaguggucaaagacgcucaggcccugcuccacgggcuggauuuuagcgagguuuccaaugugcagcgccuuaugagaaaggaacggcgcgacgauaacgaccugaaaagacuccgggaucugaaucaggcggugaacaaucuggucgagcucaagucuacacaacaaaagagcgugcugcgcguuggaacgcuuaccuccgacgaacugcucgugcuggcugccgaucuugagaaacuuaagagcaaagucaucagaacagagcggccccucucugccggcguguauauggggaaccuguccagccagcagcuggaccagcgcagagcucuccugucuaugauuggaauguccggcgggaaucagggagcccggaccggccgcgauggcguugugagagucugggacgugaagaacgcugaacuucugaauaaccaguucgggacaaugccuagccucacccuggccugucuuacaaaacagggacaaguggaucugaaugacgcgguccaggcccucaccgaucugggccugaucuacacggcuaaguauccgaacaccucugaccucgaccggcugacacagucccaucccauucuuaauaugaucgauaccaagaaaagcucccugaacaucucuggguacaauuuuagccucggagccgcuguuaaggccggcgcgugcaugcuggacgggggaaacaugcuugagacaauuaaaguguccccucaaaccauggauggcauccucaagagcauucugaaagugaagaaagcccugggcauguucaucucugacacgcccggggaacgcaacccuuaugagaauauucuguacaagaucugucucuccggagauggcuggcccuauauugcuagcagaacaucuaucaccgggcgggccugggagaacacagucguggaccuggaaagcgauggaaagccucagaaagcuggcuccaauaacucuaauaagagccuucaguccgccggguuuaccgccggacugaccuacagccagcucaugacacugaaagacgcuaugcugcaacuugauccgaacgcgaagacguggauggacaucgagggcagacccgaagauccuguugagauugcccucuaccagcccucuuccggcugcuauauccacuucuuucgcgaaccuaccgaccugaaacaguucaagcaggacgcuaaguacagccaugggauugaugugacagaccuguuugccgcccaacccggacucaccucugcugucaucgaugcccugccgcggaauauggugauuacaugucagggcuccgacgauaucagaaaacuucuggagagccaggggcgcaaggacaucaaacucauugauaucgcgcuguccaagauugacucucggaaauaugagaacgcuguuugggaucaguacaaggaccugugccacaugcauaccggaguggucguggaaaagaaaaagagaggcgggaaagaggaaaucacgccucacugugcccuuauggauugcauuauguucgacgccgcugucagcggcggacucaauucccuggugcugcgcgccguucucccccgggauaugguguuuagaacaucuaccccucgcgucgugcugugaggacuaguuauaagacugacuagcccgaugggccucccaacgggcccuccuccccuccuugcaccgagauuaaucaaaggcucuuuucagagccaccaaaaaaaaaaaaaaaaaaaaaaaaaaaaaaaaaaaaaaaaaaaaaaaaaaaaaaaaaaaaaaaaagaauu

SEQ ID NO: 19119 - RNA, 1955 nt, Artificial Sequence
  mRNA product Design i-3 (hSL-A64-N5) comprising derived and/or modified sequence from MOPV/LASV reassortant(IGS-1;Clade IV)__AFY05578__SP-HsPLAT_NP(2-569) (opt5)
aggagaaagcuuaccauggacgccaugaagagaggccugugcugugugcuccugcuuugcggggcugucuucguuagccccagcgccuccaaggagaucaaaucuuuccuguggacccagagccucagacgggaacuguccggcuacugcucuaacauuaaacuucaaguggucaaggacgcucaggcccugcuccacgggcuggauuuuagcgagguuuccaaugugcagcgccuuaugagaaaggaacggcgcgacgauaacgaccugaaaagacuccgggaucugaaucaggcggugaacaaucuggucgagcucaagucuacacaacaaaagagcauccugcgcgugggaacgcuuaccuccgacgaucugcucauucuggcugccgaccuugaaaaacugagaagcaagguuauccggacagagcgcccccucucugccggcguguauauggggaaccuguccagccagcagcuggaucagagacgggcucuccugaauaugauuggaaugucuggcgggaaccagggagcccgcgcuggcagagacggcgucgugcggguuugggaugugaaaaaugccgagcuucuguccaaccaguucgggaccaugccuagccucacacuggcgugucuuaccaagcagggacaagucgaccugaaugaugccgugcaggcucucacagaccugggccugaucuacaccgccaaauauccgaacacgucugaccucgaucgccugacccagucccaucccauccuuaauaugauugacacaaagaaaagcucccugaacaucucuggguacaauuuuagccucggagcugccgugaaggcgggcgccugcaugcuggaugggggaaacaugcuugaaaccauuaaggucuccccucaaacaauggacggcauccugaaaagcauucucaagguuaaaaaggcucugggcauguucaucucugauacccccggggagagaaacccuuaugaaaauauucuguacaaaaucugucucuccggagacggcuggcccuauaucgccagccggacgucuauuacagggagagcuugggagaacaccgugguggaucuggagagcgacggaaagccucagaaggccgauuccaauaacucuagcaaaucccuucagagcgccggcuuuacagcugggcugaccuacucucagcucaugacccugaaggacgcgaugcugcaacuugauccgaaugccaaaacauggauggacaucgaaggacgccccgaggacccugucgaaauugcucucuaccagcccuccagcggcugcuauauccacuucuuucgggagccuacggaucugaagcaguucaaacaggacgccaaguacucucauggcauugaugugaccgaccuguuugccacacaacccgggcucaccuccgcuguuaucgaugcccugccgagaaacauggugaucacaugucagggaagcgacgauauucgcaaacuucuggaaucccagggccggaaggacaucaagcucauugauaucgaccugucuaaaaccgauagcagaaaguaugagaaugcggucugggaccaguacaaagaucugugccacaugcauacgggggugguuguggagaagaagaaacgcggaggcaaggaagagauuacaccucacugugcucuuauggacugcaucauguucgacgccgccgucuccgggggccucaacaccucugugcugcgggcuguccugcccagagauaugguguuucgcaccagcacaccucggguugugcucugaggacuaguuauaagacugacuagcccgaugggccucccaacgggcccuccuccccuccuugcaccgagauuaaucaaaggcucuuuucagagccaccaaaaaaaaaaaaaaaaaaaaaaaaaaaaaaaaaaaaaaaaaaaaaaaaaaaaaaaaaaaaaaaaagaauu

SEQ ID NO: 19120 - RNA, 1955 nt, Artificial Sequence
  mRNA product Design i-3 (hSL-A64-N5) comprising derived and/or modified sequence from LASV(LM765-SLE-2012;Clade IV)__AIT17815__SP-HsPLAT_NP(2-569) (opt5)
aggagaaagcuuaccauggacgccaugaagagaggccugugcugugugcuccugcuuugcggggcugucuucguuagccccagcgccuccaaggagaucaaaucuuuccuguggacccagagccucagacgggaacuguccggcuacugcucuaacauuaagcugcaaguggucaaagacgcucaggcccugcuccacgggcuggauuuuagcgagguuuccaaugugcagcgccuuaugagaaaggaacggcgcgacgauaacgaccugaaaagacuccgggaucugaaucaggcggugaacaaucuggucgagcucaagucuacacaacaaaagagcauccugcgcgugggaacgcuuaccuccgacgaucugcucauucuggcugccgaccuugaaaaacuuaagagcaaaguuacaagaaccgagcggccccucucugccggcguguauauggggaaccuguccagccagcagcuggaucagcgcagagcucuccuggacaugaucggaaugucuggcuccaaucagggggcccgggcuggacgcgauggcgucgugagaguuugggacgugaagaacgccgagcuucugaauaaccaguucggcacaaugccuagccucacccuggcgugucuuacaaaacaggggcaagucgaucugaaugacgccgugcaggcucucaccgaccugggacugauuuacacggccaaguauccgaacaccucugaucucgaccggcugacacagucccaucccauccuuaauaugaucgauaccaagaaaagcucccugaacauuucuggcuacaauuuuagccucggggcugccgugaaggcgggagccugcaugcuggacggcgggaacaugcuugaaacaaucaaagucuccccucaaaccauggauggcauucucaagagcauccugaaaguuaagaaagcucugggaauguucauuucugacgcccccggcgagcgcaacccuuaugaaaauauccuguacaagauuugucucuccggggauggauggcccuauaucgcuagcagaacgucuaucacaggccgggccugggagaacaccgugguggaccuggagagcgaugggaagccucagaaagccggauccaauggcucuaacaagagccuucaguccgcuggguuuacagcgggacugaccuacagccagcucaugacccugaaagacgccaugcugcaacuugauccgaaugcuaagacauggauggacauugaaggcagacccgaggacccugucgaaaucgcccucuaccagcccucuuccggcugcuauauucacuucuuucgcgagccuacggaucugaaacaguucaagcaggacgccaaguacagccaugggaucgaugugaccgaccuguuugcugcccaacccggacucacaucugcgguuauugaugcucugccgcggaacauggugaucaccugucagggcuccgacgauaucagaaaacuuuucgaaagccaggggcgcaaggacauuaaacugaucgauauugcccucuccaagacagacucucggaaauaugagaaugccgucugggaucaguacaaggaccugugccacaugcauaccggaaucgugguugagaagaaaaagagaggcgggaaagaagagauuacgccucacugugcucugauggauugcaucauguuugacgccgcugugagcggcggacuuaacacauccguccuccgcgccgugcugccccgggacauggucuucagaaccucuaccccucgcgugguucugugaggacuaguuauaagacugacuagcccgaugggccucccaacgggcccuccuccccuccuugcaccgagauuaaucaaaggcucuuuucagagccaccaaaaaaaaaaaaaaaaaaaaaaaaaaaaaaaaaaaaaaaaaaaaaaaaaaaaaaaaaaaaaaaaagaauu

SEQ ID NO: 19121 - RNA, 1955 nt, Artificial Sequence
  mRNA product Design i-3 (hSL-A64-N5) comprising derived and/or modified sequence from LASV(LM776-SLE-2012;Clade IV)__AIT17825__SP-HsPLAT_NP(2-569) (opt5)
aggagaaagcuuaccauggacgccaugaagagaggccugugcugugugcuccugcuuugcggggcugucuucguuagccccagcgccuccaaggagaucaaaucuuuccuguggacccagagccucagacgggaacuguccucuuacugcagcaacauuaaacuucaaguggucaaggacgcucaggcccugcuccacggccuggauuuuuccgagguuucuaaugugcagcgccuuaugagaaaggaacggcgcgacgauaacgaccugaaaagacuccgggaucugaaucaggcggugaacaaucuggucgagcucaagagcacacaacagaaguccauccugcgcguggggacgcuuaccagcgacgaucugcucauucuggcugccgaccuugaaaaacugaagucuaaaguuacaagaaccgagcggccccucuccgccggaguguauaugggcaaccugagcucucagcagcuggaucaacgcagagcucuccuguccaugaucgggaugagcggaucuaaucagggcgcccgggcugggcgcgacggagucgugagaguuugggaugugaagaacgccgagcuucugaauaaccaguucggcacaaugccuucccucacccuggcgugucuuacaaaacagggccaagucgaccugaaugaugccgugcaggcucucaccgaccuggggcugauuuacacggccaaguauccgaacaccagcgaccucgaucggcugacacagucccaucccauccuuaauaugaucgacaccaagaaaucuagccugaacauuuccggauacaauuuuagccucggcgcugccgugaaggcgggggccugcaugcuggauggaggcaacaugcuugaaacaaucaaagucucuccucaaaccauggacgggauucugaaguccauccucaaaguuaagaaagcucugggaauguucauuagcgauacgcccggcgagcgcaacccuuaugaaaauauccuguacaagauuugucucucuggcgacggguggcccuauaucgccagcagaacauccaucaccggacgggcuugggagaacacagugguggaucuggagucugacggcaagccucagaaagccgggagcaauaacuccaauaagagccuucagucugccggauuuaccgcuggccugaccuacucccagcucaugacacugaaagaugcgaugcugcaacuugacccgaacgccaagacguggauggauauugaagggagacccgaggacccugucgaaguggcucucuaccagcccagcucuggaugcuauauccacuucuuucgcgagccuaccgaccugaaacaguucaagcaggaugccaaguacucccauggcauugacguuacagaucuguuugccgcucaacccggccucaccagcgccgugaucgacgcgcugccgcggaauauggucauuacaugucagggguccgaugacaucagaaaacuucuggaaucucagggacgcaaggauaucaaacucauugacaucgcucugagcaagaccgauucccggaaauaugagaacgccgugugggaccaguacaaggaucugugccacaugcauacgggcguuguggucgagaagaaaaagagagggggaaaagaagagauuacaccucacugugcccuuauggacugcaucauguucgaugcugccgugucuggcgggcucaauaccagcguccugcgcgcugugcugccccgggacaugguuuuuagaaccuccacaccucgcgugguccucugaggacuaguuauaagacugacuagcccgaugggccucccaacgggcccuccuccccuccuugcaccgagauuaaucaaaggcucuuuucagagccaccaaaaaaaaaaaaaaaaaaaaaaaaaaaaaaaaaaaaaaaaaaaaaaaaaaaaaaaaaaaaaaaaagaauu

SEQ ID NO: 19122 - RNA, 1955 nt, Artificial Sequence
  mRNA product Design i-3 (hSL-A64-N5) comprising derived and/or modified sequence from LASV(Mad39;Clade IV)__ANH09723__SP-HsPLAT_NP(2-569) (opt5)
aggagaaagcuuaccauggacgccaugaagagaggccugugcugugugcuccugcuuugcggggcugucuucguuagccccagcgccuccaaggagaucaaaucuuuccuguggacccagagccucagacgggaacuguccggcuacugcucuaacauuaagcugcaaguggucaaagacgcucaggcccugcuccacgggcuggauuuuagcgagguuuccaaugugcagcgccuuaugagaaagcagcggcgcgacgauaacgaccugaaaagacuccgggaucugaaucaagcggugaacaaucuggucgaacucaagucuacacagcaaaagagcgugcugcgcguuggaacgcuuaccuccgacgaucugcucacacuggcugccgaccuugagaaacuuaagagcaaagugaccagaacagaacggccccucaccgccggcgucuauauggggaaccugucuucccagcagcuggaucagcgcagagcucuccugaauaugaucggaaugagcggcgggaaccagggagcccggacaggccgcgacggcgugguuagagugugggaugucaagaaugcugagcuucugaacaaucaguucgggaccaugccuucucucacgcuggccugucuuaccaaacaaggacagguggaccugaacgaugugguccaggcgcucacagaccugggccugauuuacaccgccaaguauccgaauacauccgaccucgaucggcugacccaaagccaucccauccuuaacaugauugacacgaauaagucuucccugaacaucagcggguacaacuuuucccucggagcugccguuaaagcuggcgccugcaugcuggaugggggaaauaugcuugagacaaucaaggugucuccucagaccauggacggcauucugaaaagcauccucaaggugaaaaagucccugggcauguucauuagcgauacacccggggaacgcaacccuuaugagaauauccuguacaaaauuugucucucuggagacggcuggcccuauaucgcguccagaaccagcauuaccgggcgggccugggaaaacacagucguggaucuggagucuggaggcaagccucagaaggcugggagcaauaacuccaauaaaucucuucagagcgccggauuugcugccggccugacguacucccaacucaugacccugaaggacgccaugcugcagcuugauccgaacgcuaaaacauggauggacaucgagggcagacccgaagauccuguugagaucgcgcucuaccagcccauuagcgggugcuauauccacuucuuucgcgaaccuaccgaccugaagcaguucaaacaagacgccaaguacucucauggaauugaugugacagaccuguuugcugcccagcccggccucaccuccgccgucaucgaggcucugccgcggaauauggugauuacgugucaggggagcgaugacaucagaaaacuuuucgaaucucagggacgcaaggauaucaagcugauugacaucgcccucuccaaaacagauagccggaaguaugagaacgcgguuugggaccaauacaaagaucugugccacaugcauaccggcguggucguggagaagaagaaaaagggcgggaaagaagagauuaccccucacugugcucugauggacugcaucauguuugaugccgccgucuccggaggccuuaauacacucgugcugagagcuguucugccccgcgacaugguguuccggaccucuacaccuaaggucgugcucugaggacuaguuauaagacugacuagcccgaugggccucccaacgggcccuccuccccuccuugcaccgagauuaaucaaaggcucuuuucagagccaccaaaaaaaaaaaaaaaaaaaaaaaaaaaaaaaaaaaaaaaaaaaaaaaaaaaaaaaaaaaaaaaaagaauu

SEQ ID NO: 19123 - RNA, 1955 nt, Artificial Sequence
  mRNA product Design i-3 (hSL-A64-N5) comprising derived and/or modified sequence from LASV(Z0947-SLE-2011;Clade IV)__AIT17841__SP-HsPLAT_NP(2-569) (opt5)
aggagaaagcuuaccauggacgccaugaagagaggccugugcugugugcuccugcuuugcggggcugucuucguuagccccagcgccuccaaggagaucaaaucuuuccuguggacccagagccucagacgggaacuguccggcuacugcucuaacauuaagcugcaaguggucaaagacgcucaggcccugcuccacgggcuggauuuuagcgagguuuccaaugugcagcgccuuaugagaaaggaacggcgcgacgauaacgaccugaaaagacuccgggaucugaaucaggcggugaacaaucuggucgagcucaagucuacacaacaaaagagcauccugcgcgugggaacgcuuaccuccgacgaucugcucauucuggcugccgaccuugaaaaacuuaagagcaaaguuacaagaaccgagcggccccucucugccggcguguauauggggaaccuguccagccagcagcuggaucagcgcagagcucuccugaauaugaucggaaugucuggcuccaaccagggggcccggacaggacgcgacggcgucgugagaguuugggaugugaagaaugcugagcuucugaacaaucaguucggcaccaugccuagccucacacuggccugucuuaccaaacaggggcaagucgaccugaacgaugcggugcaggcccucacggaccugggacugauuuacaccgcuaaguauccgaauacaucugaccucgaucggcugacccagucccaucccauccuuaacaugaucgacacaaagaaaagcucccugaauauuucuggcuacaacuuuagccucggggccgcugugaaggccggagcgugcaugcuggauggcgggaacaugcuugaaaccaucaaagucuccccucaaacgauggacggcauucucaagagcauccugaaaguuaagaaagcccugggaauguucauuucugaugcucccggcgagcgcaauccuuaugaaaacauccuguacaagauuugucucuccggggacggauggcccuauaucgccagcagaacaucuaucaccggccgggcuugggagaauacagugguggaucuggagagcgacgggaagccucagaaagccggauccaacggcucuaauaagagccuucaguccgccggguuuaccgcuggacugaccuacagccagcucaugacacugaaagaugcgaugcugcaacuugacccgaacgccaagacguggauggauauugaaggcagacccgaggacccugucgaaaucgcucucuaccagcccucuuccggcugcuauauucacuucuuucgcgagccuaccgaccugaaacaguucaagcaggaugccaaguacagccaugggaucgacgugacagaucuguuugccgcucaacccggacucaccucugccguuauugacgcgcugccgcggaauauggugaucacaugucagggcuccgaugacaucagaaaacuuuucgaaagccaggggcgcaaggauauuaaacugaucgacauugcucucuccaagaccgauucucggaaauaugagaacgccgucugggaccaguacaaggaucugugccacaugcauacgggaaucgugguugagaagaaaaagagaggcgggaaagaagagauuacaccucacugugcccugauggacugcaucauguuugaugcugccgugagcggcggacuuaauaccuccguccuccgcgcugugcugccccgggacauggucuucagaaccucuacaccucgcgugguucugugaggacuaguuauaagacugacuagcccgaugggccucccaacgggcccuccuccccuccuugcaccgagauuaaucaaaggcucuuuucagagccaccaaaaaaaaaaaaaaaaaaaaaaaaaaaaaaaaaaaaaaaaaaaaaaaaaaaaaaaaaaaaaaaaagaauu

SEQ ID NO: 19124 - RNA, 1986 nt, Artificial Sequence
  mRNA product Design i-3 (hSL-A100) comprising derived and/or modified sequence from LASV(Josiah;Clade IV)__NP_694869__SP-HsPLAT_NP(2-569) (opt1)
aggagaaagcuuaccauggacgccaugaagcgcggccugugcugcgugcuccugcugugcggggccgucuucgugagccccagcgccuccaaggagaucaagagcuuccuguggacccagucccuccgccgggagcugagcggcuacugcuccaacaucaagcuccagguggucaaggacgcccaggcgcugcugcacgggcuggacuucagcgagguguccaacgugcagcgccucaugcggaaggagcgccgggacgacaacgaccugaagcgccugcgggaccucaaccaggccgucaacaaccugguggagcucaagagcacccagcagaaguccauccugcgcgugggcacccugaccagcgacgaccugcucauccuggccgccgaccuggagaagcucaaguccaaggucauccggaccgagcgcccccugagcgccgggguguacaugggcaaccuguccagccagcagcucgaccagcggcgcgcgcugcugaacaugaucgggauguccggcggcaaccagggggcccgggccggccgcgacggggugguccgggugugggacgugaagaacgccgagcuccugaacaaccaguucggcaccaugccgagccugacgcucgcgugccugaccaagcaggggcaggucgaccugaacgacgccgugcaggcccucaccgaccugggccugaucuacaccgccaaguaccccaacacguccgaccucgaccgccugacccagagccaccccauccugaacaugaucgacaccaagaaguccagccucaacaucagcggcuacaacuucucccugggggccgcggugaaggccggcgccugcaugcuggacgggggcaacaugcucgagaccaucaaggucagcccccagacgauggacggcauccugaaguccauccugaaggugaagaaggcccucgggauguucaucagcgacaccccgggcgagcggaaccccuacgagaacauccuguacaagaucugccuguccggggacggcuggcccuacaucgccagccgcaccuccaucaccgggcgggcgugggagaacacgguggucgaccucgagagcgacggcaagccccagaaggccgacuccaacaacagcuccaagagccugcaguccgccggcuucaccgccgggcugaccuacagccagcucaugacccugaaggacgccaugcugcagcuggacccgaacgcgaagacguggauggacaucgagggccgccccgaggaccccguggagaucgcccucuaccagcccuccagcgggugcuacauccacuucuuccgggagccgaccgaccugaagcaguucaagcaggacgccaaguacucccacggcaucgacgugaccgaccuguucgccacccagcccgggcucacgagcgccgucaucgacgcgcugccccgcaacauggugaucacgugccagggcuccgacgacauccgcaagcugcucgagagccagggccggaaggacaucaagcugaucgacaucgcccugagcaagaccgacucccgcaaguacgagaacgccgugugggaccaguacaaggaccucugccacaugcacaccggggucguggucgagaagaagaagcggggcgggaaggaggagaucaccccgcacugcgcccugauggacugcaucauguucgacgcggccgugagcggcgggcugaacaccuccgugcuccgcgccguccugccccgggacaugguguuccgcaccagcacgccccgggugguccugugaggacuaguuauaagacugacuagcccgaugggccucccaacgggcccuccuccccuccuugcaccgagauuaaucaaaggcucuuuucagagccaccaaaaaaaaaaaaaaaaaaaaaaaaaaaaaaaaaaaaaaaaaaaaaaaaaaaaaaaaaaaaaaaaaaaaaaaaaaaaaaaaaaaaaaaaaaaaaaaaaaaaa

SEQ ID NO: 19125 - RNA, 1986 nt, Artificial Sequence
  mRNA product Design i-3 (hSL-A100) comprising derived and/or modified sequence from LASV(LP;Clade I)__AAF86702__SP-HsPLAT_NP(2-569) (opt1)
aggagaaagcuuaccauggacgccaugaagcgcggccugugcugcgugcuccugcugugcggggccgucuucgugagccccagcaacuccaaggagaucaagagcuuccuguggacccagucccuccgccgggagcugagcggcuacugcuccaacaucaagcuccagguggucaaggacgcccaggcccugcugcacgggcuggacuucagcgagguguccaacgugcagcgccucaugcggaagcagaagcgcgacgacgcggaccugaagcggcugcgcgaccucaaccaggccgucaacaaccugguggagcucaagagcacccagcagaagaacgugcugcgggucggcacgcuguccagcgacgaccugaucacccucgccgccgaccuggagaagcugaaguccaaggugauccgcaccgagcggccccucagcuccgggguguacaugggcaaccugagcucccagcagcuggaccagcgccgggcccuccugagcaugaucgggauguccggcggcccgcaggggaaccgcaccggcggggacggcgucgugcgggugugggacgucaagaacgcggagcugcucaacaaccaguucgggacgaugcccagccugacccuggccugccucaccaagcagggccagguggaccugaacgacgccgugcaggcccugaccgaccucggccugaucuacacggcgaaguaccccaacuccagcgaccuggacaugcucacccagagccaccccauccuggggauggucgacaccaagaaguccagccugaacaucuccggcuacaacuucagccucggggccgccgugaaggccggcgccugcaugcuggacggcgggaacaugcuggagaccaucaagguguccccgcagacgauggacggcauccucaagagcauccugaaggucaagcgcucccuggggauguucaucagcgacacccccggcgagcggaaccccuacgagaacauccucuacaagaucugccuguccggggagggcuggcccuacaucgcgagccgcaccuccaucaccggccgggccugggagaacacgcugguggaccucgagagcgacaacaagccgcccaagcugaacuccgccgggagcaacaagucccugcaggccgccggccucaacgcggggcugaccuacagccagcugaugacccugaaggacugcaugcuccagcuggaccccuccagcaagaccuggaucgacaucgagggccgccccgaggacccgguggagaucgcccuguuccagcccuccagcgggugcuacauccacuucuuccgggagcccacggaccucaagcaguucaagcaggacgccaaguacagccacggcaucgacgucaccgaccuguucuccacccagcccggccugaccagcgccgugaucgaggcccucccgcgcaacauggugcugacgugccagggguccgacgacaucaagaagcugcucgagagccagggccggcgcgacaucaagcugaucgacaucucccugagcaaggcggacucccgcaaguucgagaacgccgucugggaccaguacaaggaccucugccacaugcacaccgggguggucguggagaagaagaagcggggcgggaaggaggagaucacgccccacugcgcccugcuggacugcaucauguucgacgccgccaccaccggcagccucaacaucaccacccugcgcgcggugcugccccgggacauggucuuccgcaccuccacgcccaagguggugcucugaggacuaguuauaagacugacuagcccgaugggccucccaacgggcccuccuccccuccuugcaccgagauuaaucaaaggcucuuuucagagccaccaaaaaaaaaaaaaaaaaaaaaaaaaaaaaaaaaaaaaaaaaaaaaaaaaaaaaaaaaaaaaaaaaaaaaaaaaaaaaaaaaaaaaaaaaaaaaaaaaaaaa

SEQ ID NO: 19126 - RNA, 1986 nt, Artificial Sequence
  mRNA product Design i-3 (hSL-A100) comprising derived and/or modified sequence from LASV(803213;Clade II)__AAF86704__SP-HsPLAT_NP(2-569) (opt1)
aggagaaagcuuaccauggacgccaugaagcgcggccugugcugcgugcuccugcugugcggggccgucuucgugagccccagcgccuccaaggaggugaaguccuuccuguggacccagagccuccgccgggagcugagcggcuacugcuccaacaucaagcugcaggucgugaaggacgcccaggcgcuccugcacgggcuggacuucagcgaggugaacaacguccagcgccucaugcggaagcagaagcgcgacgacggcgaccugaagcggcugcgcgaccucaaccaggccgugaacaaccugguggagcugaaguccacccagcagaaguccauccuccgggucgggacgcugaccagcgacgaccugcucacccuggccgccgaccuggagaagcucaagagcaaggugauccgcaccgagcggccccuguccagcggcguguacauggggaaccuguccacgcagcagcucgagcagcgccgggcccugcugaacaugaucggcauggucggcggggcgcagggcacccagccggggcgcgacggcguggugcgggucugggacgugaagaaccccgaccuccugaacaaccaguucgggaccaugcccagccugacccucgccugccugacgaagcagggccagguggaccugaacgacgccguccucgcccugaccgaccugggccucaucuacaccgcgaaguaccccaacuccagcgaccuggaccgccugucccagagccacccgauccucaacaugguggacaccaagaaguccagccugaacaucagcggguacaacuucucccugggcgccgccgugaaggccggggccugcaugcucgacggcggcaacaugcuggagacgaucaaggucacgccccagaccauggacgggauccucaagagcauccugaaggugaagcggucccugggcauguucgugagcgacacccccggggagcgcaaccccuacgagaacauccuguacaagaucugccucuccggcgacggguggccguacaucgcgagccggaccuccaucgucggccgcgccugggagaacaccaccguggaccuggagagcgacggcaagccccagaagguggggaccgccggcuccaacaagagccugcaguccgccggguuccccacgggccucaccuacagccagcugaugacccugaaggacuccaugaugcagcuggaccccagcgccaagaccuggaucgacaucgaggggcggccggaggaccccgucgagaucgcgcucuaccagcccauguccggcugcuacauccacuucuuccgcgagcccacggaccugaagcaguucaagcaggacgccaaguacagccacggcaucgacguggccgaccuguucccggcccagcccgggcucaccuccgccgucaucgaggcgcugccccggaacauggugcugaccugccagggcagcgacgacaucaagaagcuccuggacucccaggggcgccgcgacaucaagcugaucgacaucagccucagcaagguggacucccggaaguucgagaacgccgucugggaccagugcaaggaccugugccacaugcacaccggcgugguggucgagaagaagaagcgcgggggcaaggaggagaucacgccccacugcgcccugauggacugcaucauguucgacgccgccgugagcggcgggcucaacaucccggugcugcgggcgguccugccccgcgacaugguguuccggaccuccagccccaaggugguccucugaggacuaguuauaagacugacuagcccgaugggccucccaacgggcccuccuccccuccuugcaccgagauuaaucaaaggcucuuuucagagccaccaaaaaaaaaaaaaaaaaaaaaaaaaaaaaaaaaaaaaaaaaaaaaaaaaaaaaaaaaaaaaaaaaaaaaaaaaaaaaaaaaaaaaaaaaaaaaaaaaaaaa

SEQ ID NO: 19127 - RNA, 1989 nt, Artificial Sequence
  mRNA product Design i-3 (hSL-A100) comprising derived and/or modified sequence from LASV(GA391;Clade III)__CAA36646__SP-HsPLAT_NP(2-570) (opt1)
aggagaaagcuuaccauggacgccaugaagcgcggccugugcugcgugcuccugcugugcggggccgucuucgugagccccagcgccuccaaggaggugcgcagcuuccuguggacccagucccuccggcgcgagcugagcggcuacugcuccaacaucaagcugcaggucgugaaggacgcccaggcgcuccugcacgggcuggacuucagcgagguguccaacguccagcggcucaugcgcaagcagaagcgggacgacggcgaccugaagcgccugcgggaccucaaccaggccgugaacaaccugguggagcucaagagcacccagcagaaguccguccugcgcguggggacccugagcuccgacgaccugcucauccuggccgccgaccuggagaagcucaagagcaaggugacccggaccgagcgcccccuguccagcggcgucuacauggggaaccuguccagccagcagcucgaccagcggcgcgcccugcugaacaugaucggcaugaccggcguguccgggggcgggaagggcgcgagcgacgggaucgugcgggucugggacgugaagaacgccgagcuccugaacaaccaguucggcacgaugccgucccugacccucgccugccugaccaagcagggccagguggaccugaacgacgccguccaggcgcucaccgaccuggggcugaucuacacggccaaguaccccaacagcagcgaccucgaccgccugucccagagccaccccauccugaacaugaucgacaccaagaaguccagccucaacaucuccggcuacaacuucagccugggggccgccgugaaggccggcgcgugcaugcuggacggcgggaacaugcucgagaccaucaaggugagcccccagaccauggacggcauccucaaguccauccugaaggucaagaagucccuggggauguucgugagcgacacgccgggcgagcggaaccccuacgagaacauccuguacaagaucugccuguccggggacggcuggcccuacaucgccagccgcaccuccaucgugggccgggccugggagaacaccgucguggaccucgagcaggacaacaagccccagaagaucgggaacggcgggagcaacaagucccugcagagcgccggcuucgccgcggggcugaccuacucccagcucaugacgcugaaggacuucaagugcuucaaccugaucccgaacgccaagaccuggauggacaucgagggccgccccgaggaccccguggagaucgcccuguaccagcccagcuccggcugcuacguccacuucuuccgggagccgaccgaccucaagcaguucaagcaggacgccaaguacagccacgggaucgacgugaccgaccuguucgccgcgcagcccggccugacgagcgccgucaucgaggcccucccccgcaacauggugaucacgugccagggguccgaggacauccggaagcugcuggagagccagggccgccgcgacaucaagcucaucgacaucacccuguccaaggccgacagccggaaguucgagaacgccgugugggaccaguucaaggaccugugccacaugcacaccggggucgugguggagaagaagaagcgcggcggcaaggaggagaucacgccccacugcgcgcucauggacugcaucauguucgacgccgccgucuccgggggccuggacgccaaggugcugcgggugguccucccgcgcgacaugguguuccggaccagcacccccaaggugguccugugaggacuaguuauaagacugacuagcccgaugggccucccaacgggcccuccuccccuccuugcaccgagauuaaucaaaggcucuuuucagagccaccaaaaaaaaaaaaaaaaaaaaaaaaaaaaaaaaaaaaaaaaaaaaaaaaaaaaaaaaaaaaaaaaaaaaaaaaaaaaaaaaaaaaaaaaaaaaaaaaaaaaa

SEQ ID NO: 19128 - RNA, 1986 nt, Artificial Sequence
  mRNA product Design i-3 (hSL-A100) comprising derived and/or modified sequence from LASV(AV;Clade V)__CCA30315__SP-HsPLAT_NP(2-569) (opt1)
aggagaaagcuuaccauggacgccaugaagcgcggccugugcugcgugcuccugcugugcggggccgucuucgugagccccagcgccuccaaggaggugaaguccuuccuguggacccagagccuccgccgggagcugagcggcuacugcuccaacaucaagcugcaggucgugaaggacgcccaggcgcuccugcacgggcuggacuucagcgagguguccaacguccagcgccucaugcggaagcagcgccgggacgacagcgaccugaagcgccugcgggaccucaaccaggccgugaacaaccugguggagcugaaguccacccagcagaaguccguccuccgcgugggcacgcugagcagcgacgaccugcucacccuggccgccgaccuggagaagcucaaguccaaggugacccggaccgagcgcccccugagcuccggggucuacaugggcaaccugagcucccagcagcucgaccagcggcgcgcccugcugaaccucaucgggaugacgaacggcagccagggcucccaggcggggcgggacggcguggugcgcgucugggacgugaagaacgccgagcugcugaacaaccaguucgggaccaugccgagccucacccuggccugccugaccaagcagggccagguggaccucaacgacgucgugcaggcccugacggaccuggggcucaucuacaccgcgaaguaccccaacaccagcgaccuggaccggcugacccagucccaccccauccucaacaugaucgacacgaagaaguccagccugaacaucagcggcuacaacuucucccugggcgccgccgugaaggccggggccugcaugcucgacggcgggaacaugcuggagaccaucaaggucagcccccaguccauggacggcauccucaagagcauccugaaggugaagcgcgcgcugggcauguucguguccgacaccccgggggagcggaaccccuacgagaacauccuguacaagaucugccucagcggcgacggguggcccuacaucgccucccgcaccagcaucgucggccgggccugggagaacacggugguggaccuggagaccgacgggaagccccagaagaucggcuccggcaacagcaacaagucccugcagagcgccggguucuccgccggccucaccuacagccagcugaugacccugaaggacgcgaugcugcagcucgacccgaacgccaagacguggauggacaucgaggggcgccccgaggaccccgucgagguggcccuguaccagcccaucuccggcugcuacauccacuucuuccgggagccgaccgaccugaagcaguucaagcaggacgccaaguacagccacgggaucgacaucgccgaccucuucgcggcccagcccggccugaccagcgccgucaucgaggcccugccccgcaacauggugaucacgugccagggcuccgaggacaucaagaagcuccuggagagccaggggcgcaaggacaucaagcugaucgacaucgcccucuccaagaucgacagccggaaguucgagaacgcggugugggaccaguacaaggaccugugccacaugcacaccggcgucgugguggagaagaagaagcgcgggggcaaggaggagaucaccccgcacugcgcccugauggacugcaucauguucgacgccgccgucuccgggggccucaacacccuggugcugcgggcggugcucccccgcgacauggucuuccggaccagcacgccccgcguggugcugugaggacuaguuauaagacugacuagcccgaugggccucccaacgggcccuccuccccuccuugcaccgagauuaaucaaaggcucuuuucagagccaccaaaaaaaaaaaaaaaaaaaaaaaaaaaaaaaaaaaaaaaaaaaaaaaaaaaaaaaaaaaaaaaaaaaaaaaaaaaaaaaaaaaaaaaaaaaaaaaaaaaaa

SEQ ID NO: 19129 - RNA, 1986 nt, Artificial Sequence
  mRNA product Design i-3 (hSL-A100) comprising derived and/or modified sequence from LASV(Togo/2016/7082;Clade VI)__AMR44578__SP-HsPLAT_NP(2-569) (opt1)
aggagaaagcuuaccauggacgccaugaagcgcggccugugcugcgugcuccugcugugcggggccgucuucgugagccccagcaacuccaaggaggugaaguccuuccuguggacccagagccuccgccgggagcugagcggcuacugcuccaacaucaagcugcaggucgugaaggacgcccaggcccuccugcacgggcuggacuucagcgagguguccaacguccagcgccucaugcggaagcagaagcgcgacgacggcgaccugaagcggcugcgcgaccucaaccaggcggugaacaaccugguggagcucaagagcguccagcagaaguccauccugcggguggggacccugaccagcgacgaccugcucacccuggccgccgaccuggagaagcucaaguccaaggugacccgcaccgagcggccccugagcuccggcgucuacauggggaaccugagcucccagcagcucgaccagcgccgggcccugcugagcaugaucggcauguccggcgggaaccagaacagccagccgaagggcgacgggguggugcgcgucugggacgugaagaacgccgaccuccugaacaaccaguucggcacgaugcccucccugacccucgcgugccugaccaagcagggccagguggaccugaacgacgccguccaggcccucaccgaccuggggcugaucuacacggccaaguaccccaacagcagcgaccucgaccggcugucccagagccaccccauccugaacaugaucgacaccaagaaguccagccucaacaucuccggcuacaacuucagccugggggcggccaucaagaccggcgccugcaugcuggacgggggcaacaugcucgagaccaucaaggugacgccgcagaccauggacggcauccugaaguccauccugaaggugaagcgcagccucgggauguucaucuccgacacccccggcgagcggaaccccuacgagaacauccuguacaagaucugccugagcggggacggcuggcccuacaucgccucccgcaccgccaucaucgggcgggcgugggagaacacggucguggaccucgagagcgacuccaagccgcagaagaucggcagcaacggcuccaacaagagccugcaguccgccggguucgcccccggccugaccuacagccagcucaugacccugaaggacuccaugcugcagcuggaccccaacgccaagaccuggaucgacaucgaggggcgccccgaggacccgguggaggucgcccucuuccagcccaucagcggcugcuacauccacuucuuccgggagcccacggaccugaagcaguucaagcaggacgcgaaguacagccacgggaucgacgugaccgaccuguucgccgcccagcccggccucaccuccgccgugaucgaggcccugccgcgcaacaugguccugaccugccagggcagcgacgacaucaagaagcuccuggacucccaggggcggcgcgacaucaagcugaucgacgugagccucaacaagaucgacucccgcaaguucgagaacgcggucugggaccaguacaaggaccugugccacaugcacacgggcgugguggucgagaagaagaagaagggcgggaaggaggagaucacgccccacugcgcccugcucgacugcaucauguucgacgccgccgugagcgggggccugaacgccaccgugcugcgggcgguccucccccgcgacaugguguuccggaccuccagccccaaggugguccugugaggacuaguuauaagacugacuagcccgaugggccucccaacgggcccuccuccccuccuugcaccgagauuaaucaaaggcucuuuucagagccaccaaaaaaaaaaaaaaaaaaaaaaaaaaaaaaaaaaaaaaaaaaaaaaaaaaaaaaaaaaaaaaaaaaaaaaaaaaaaaaaaaaaaaaaaaaaaaaaaaaaaa

SEQ ID NO: 19130 - RNA, 1986 nt, Artificial Sequence
  mRNA product Design i-3 (hSL-A100) comprising derived and/or modified sequence from LASV(KAK-428;Clade n.d. (VII))__ANH09741__SP-HsPLAT_NP(2-569) (opt1)
aggagaaagcuuaccauggacgccaugaagcgcggccugugcugcgugcuccugcugugcggggccgucuucgugagccccagcaacuccaaggaggugaaguccuuccuguggacccagagccuccgccgggagcugagcggcuacugcaccaacaucaagcugcaggucgugaaggacgcccaggcccuccugcacgggcuggacuucuccgaggugagcaacguccagcgccucaugcggaagcagaagcgcgacgacaacgaccugaagcggcugcgcgaccucaaccaggcggugaacaaccugguggagcugaaguccguccagcagaaguccgugcucaaggugggcacgcugaacagcgacgaccugcucacccuggccgccgaccuggagaagcucaagagcaaggucgugcggaccgagcgcccccuguccagcgggguguacaugggcaaccuguccagccagcagcucgaccagcggcgcgcccugcugaacaugaucgggauggccggcggcucccaggggaaccagccgagccgggacggcgucgugcgcgugugggacgucaagaacgcggaccuccugaacaaccaguucgggaccaugcccucccugacgcucgccugccugaccaagcagggccagguggaccugaacgacgugguccucgcccugaccgaccuggggcucaucuacaccgccaaguaccccaacagcuccgaccuggaccggcugagccagaaccaccccgugcucaacaugaucgacgugaacaagagcucccugaacaucagcggcuacaacuucucccugggcgcggccgucaaggccggggccugcaugcucgacggcgggaacaugcuggagacgaucaagaucagcccgcagaccguggacggcauccugaaguccauccucaaggugaagcgcgcccugggcauguucgucagcgacacccccggggagcggaaccccuacgagaacauccuguacaaggugugccucuccggcaacggguggcccuacaucgcgagccgcaccuccaucgucggccgggccugggagaacacggugguggaccuggagagcaacaagaaccagccgaaggucgggaacaacggcuccaacaagaugcugcagagcuccggcuucgccaccgggcucaccuacagccagcugaugacccugcgcgacuccaugcugcagcucgaccccacggccaagaccuggaucgacaucgagggccggcccgaggaccccguggagcuggcccuguuccagccgagcuccgggugcuacauccacuucuuccgcgagcccaccgaccucaagcaguucaagcaggacgcgaaguacagccacggcaucgacgugaacgaccuguucuccgcccagcccgggcugaccagcgccguccucgaggcccugccccggaacauggugcugacgugccagggcagcgacgacauccgcaagcuccuggacucccaggaccgcaaggacaucaagcugaucgacaucagccucuccaaggccgacgcgcggaaguucgagaacgacgugugggaccaguucaaggaccugugccacaugcacaccggcaucgucguggagaagaagaagaagggcgggaagcaggagaugaccccgcacugcgcccugcucgacugcaucauguucgacgccgccgugagcgggggccugaacguccccacccugcgcgccgugcuccccacggacaugguguuccggaccaucaccaccaaggucgugcugugaggacuaguuauaagacugacuagcccgaugggccucccaacgggcccuccuccccuccuugcaccgagauuaaucaaaggcucuuuucagagccaccaaaaaaaaaaaaaaaaaaaaaaaaaaaaaaaaaaaaaaaaaaaaaaaaaaaaaaaaaaaaaaaaaaaaaaaaaaaaaaaaaaaaaaaaaaaaaaaaaaaaa

SEQ ID NO: 19131 - RNA, 1986 nt, Artificial Sequence; identical to SEQ ID NO: 19125
  mRNA product Design i-3 (hSL-A100) comprising derived and/or modified sequence from LASV(Pinneo-NIG-1969;Clade I)__AIT17837__SP-HsPLAT_NP(2-569) (opt1)

SEQ ID NO: 19132 - RNA, 1986 nt, Artificial Sequence
  mRNA product Design i-3 (hSL-A100) comprising derived and/or modified sequence from LASV(ISTH0009-NIG-2011;Clade II)__AIT17405__SP-HsPLAT_NP(2-569) (opt1)
aggagaaagcuuaccauggacgccaugaagcgcggccugugcugcgugcuccugcugugcggggccgucuucgugagccccagcguguccaaggaggucaagagcuuccuguggacccagucccuccgccgggagcugagcggcuacugcuccaacaucaagcuccagguggugaaggacgcccaggcccugcugcacgggcuggacuucagcgaggucuccaacgugcagcgccucaugcggaagcagaagcgcgacgacagcgaccugaagcggcugcgcgaccucaaccaggcggugaacaaccuggucgagcugaaguccacccagcagaaguccauccuccgggugggcacccugaccagcgacgaccugcucacccuggccgccgaccuggagaagcucaagagcaaggugauccgcaccgagcggccccuguccagcggggucuacaugggcaaccuguccacgcagcagcucgagcagcgccgggcccugcugaacaugaucgggauggugggcggcgcccaggggacccagccgggccgcgacggggugguccgggugugggacgugaagaaccccgaccuccugaacaaccaguucggcaccaugcccagccugacccucgcgugccugacgaagcaggggcaggucgaccugaacgacgccgugcucgcccugaccgaccugggccucaucuacaccgccaaguaccccaacuccagcgaccuggaccgccugucccagagccacccgauccucaacaugguggacaucaagaaguccagccugaacaucagcggcuacaacuucucccugggggcggccgucaaggccggcgccugcaugcucgacgggggcaacaugcuggagaccaucaaggugacgccccagaccauggacggcauccucaagagcauccugaaggugaagcggucccuggggauguucgucagcgacacccccggcgagcgcaaccccuacgagaacauccuguacaagaucugccucuccggggacggcuggccguacaucgccagccggaccuccaucguggggcgcgcgugggagaacacgaccguggaccuggagagcgacggcaagccccagaaggucggcuccgccgggagcaacaagucccugcagagcgccggcuuccccaccgggcucaccuacucccagcugaugacgcugaaggacagcaugaugcagcuggaccccuccgccaagaccuggaucgacaucgagggccggccggaggaccccguggagaucgcccucuaccagcccaugagcgggugcuacauccacuucuuccgcgagcccaccgaccugaagcaguucaagcaggacgcgaaguacucccacggcaucgacgucgccgaccuguucccggcccagcccggccucaccagcgccgugaucgaggcccugccccggaacauggugcugacgugccaggggagcgacgacaucaagcgccuccuggacucccagggccgccgggacaucaagcugaucgacaucgcgcucagcaaggccgacucccgccgguucgagaacgccgucugggaccagugcaaggaccugugccacaugcacaccggggugguggucgagaagaagaagcgcggcgggaaggaggagaucacgccccacugcgcccugauggacugcaucauguacgacgccgcggugagcggcggccucaacaucccggugcugcgggccguccugccccgcgacaugguguuccggaccuccagccccaaggugguccucugaggacuaguuauaagacugacuagcccgaugggccucccaacgggcccuccuccccuccuugcaccgagauuaaucaaaggcucuuuucagagccaccaaaaaaaaaaaaaaaaaaaaaaaaaaaaaaaaaaaaaaaaaaaaaaaaaaaaaaaaaaaaaaaaaaaaaaaaaaaaaaaaaaaaaaaaaaaaaaaaaaaaa

SEQ ID NO: 19133 - RNA, 1986 nt, Artificial Sequence
  mRNA product Design i-3 (hSL-A100) comprising derived and/or modified sequence from LASV(ISTH2010-NIG-2012;Clade II)__AIT17483__SP-HsPLAT_NP(2-569) (opt1)
aggagaaagcuuaccauggacgccaugaagcgcggccugugcugcgugcuccugcugugcggggccgucuucgugagccccagcgccuccaaggaggugaaguccuuccuguggacccagagccuccgccgggagcugagcggcuacugcuccaacaucaagcugcaggucgugaaggacgcccaggcgcuccugcacgggcuggacuucagcgagguguccaacguccagcgccucaugcggaagcagaagcgcgacgacagcgaccugaagcggcugcgcgaccucaaccaggccgugaacaaccugguggagcugaaguccacccagcagaaguccauccuccgggucggcacgcugaccagcgacgaccugcucacccuggccgccgaccuggagaagcucaagagcaaggugauccgcaccgagcggccccuguccagcgggguguacaugggcaaccuguccacgcagcagcucgagcagcgccgggcccugcugaaccucaucgggauggucggcggcgcgcaggggacccagccgggccgcgacgggguggugcgggucugggacgugaagaaccccgaccugcugaacaaccaguucggcaccaugcccagccucacccuggccugccugacgaagcagggccagguggaccucaacgacgccguccuggcccugaccgaccucgggcugaucuacaccgcgaaguaccccaacuccagcgaccuggaccgccucucccagagccacccgauccugaacaugguggacaccaagaaguccagccugaacaucagcggcuucaacuucucccucggggccgccgugaaggccggcgccugcaugcuggacgggggcaacaugcuggagacgaucaaggucacgccccagaccauggacggcauccucaagagcauccugaaggugaagaagucccuggggauguucgugagcgacacccccggcgagcggaaccccuacgagaacauccucuacaagaucugccuguccggggacggcuggccguacaucgcgagccgcaccuccaucgucgggcgggccugggagaacaccaccguggaccuggagagcgacggcaagccccacaaggugggcaccgccggguccaacaagagccuccaguccgccggcuuccccacggggcugaccuacagccagcugaugacccugaaggacuccaugaugcagcucgaccccagcgccaagaccuggaucgacaucgagggccgcccggaggaccccgucgagaucgcgcuguaccagcccauguccgggugcuacauccacuucuuccgggagcccacggaccugaagcaguucaagcaggacgccaaguacagccacggcaucgacguggccgaccucuucccggcccagcccggccugaccuccgccgucaucgaggcgcugccccgcaacauggugcugaccugccaggggagcgacgacaucaagcggcuccuggacagccagggccgccgcgacaucaagcucaucgacaucgcccuguccaaggccgacagccggcgcuucgagaacgccgugugggaccagugcaaggaccugugccacaugcacaccggggucgugguggagaagaagaagcggggcgggaaggaggagaucacgccccacugcgcccucauggacugcaucauguacgacgcggccgucuccggcggccugaacaucccggugcugcgcgccgugcucccccgggacauggucuuccgcaccagcucccccaagguggugcugugaggacuaguuauaagacugacuagcccgaugggccucccaacgggcccuccuccccuccuugcaccgagauuaaucaaaggcucuuuucagagccaccaaaaaaaaaaaaaaaaaaaaaaaaaaaaaaaaaaaaaaaaaaaaaaaaaaaaaaaaaaaaaaaaaaaaaaaaaaaaaaaaaaaaaaaaaaaaaaaaaaaaa

SEQ ID NO: 19134 - RNA, 1986 nt, Artificial Sequence
  mRNA product Design i-3 (hSL-A100) comprising derived and/or modified sequence from LASV(Lassa virus/H.sapiens-wt/NGA/2015/ISTH_0543;Clade II)__AVO03640__SP-HsPLAT_NP(2-569) (opt1)
aggagaaagcuuaccauggacgccaugaagcgcggccugugcugcgugcuccugcugugcggggccgucuucgugagccccagcgccuccaaggaggugaaguccuuccuguggacccagagccuccgccgggagcugagcggcuacugcuccaacaucaagcugcaggucgugaaggacgcccaggcgcuccugcacgggcuggacuucagcgagguguccaacguccagcgccucaugcggaagcagaagcgcgacgacagcgaccugaagcggcugcgcgaccucaaccaggccgugaacaaccugguggagcugaaguccacccagcagaaguccauccuccgggucggcacgcugaccagcgacgaccugcucacccuggccgccgaccuggagaagcucaagagcaaggugauccgcaccgagcggccccuguccagcgggguguacaugggcaaccuguccacgcagcagcucgagcagcgccgggcccugcugaacaugaucgggauggucggcggcgcgcaggggacccagccgggccgcgacgggguggugcgggucugggacgugaagaaccccgaccuccugaacaaccaguucggcaccaugcccagccugacccucgccugccugacgaagcagggccagguggaccugaacgacgccguccucgcccugaccgaccuggggcucaucuacaccgcgaaguaccccaacuccagcgaccuggaccgccugucccagagccacccgauccucaacaugguggacaccaagaaguccagccugaacaucagcggcuacaacuucucccugggggccgccgugaaggccggcgccugcaugcucgacgggggcaacaugcuggagacgaucaaggucacgccccagaccauggacggcauccucaagagcauccugaaggugaagaagucccuggggauguucgugagcgacacccccggcgagcggaaccccuacgagaacauccuguacaagaucugccucuccggggacggcuggccguacaucgcgagccgcaccuccaucgucgggcgggccugggagaacaccaccguggaccuggagagcgacggcaagccccagaaggugggcuccgccgggagcaacaagucccugcagagcgccggcuuccccaccgggcucacguacucccagcugaugacccugaaggacagcaugaugcagcuggaccccuccgccaagaccuggaucgacaucgagggccgcccggaggaccccgucgagaucgcgcucuaccagcccaugagcgggugcuacauccacuucuuccgggagcccaccgaccugaagcaguucaagcaggacgccaaguacucccacggcaucgacguggccgaccuguucccggcccagcccggccucacgagcgccgucaucgaggcgcugccccgcaacauggugcugaccugccaggggagcgacgacaucaagcggcuccuggacucccagggccgcaaggacaucaagcugaucgacaucgcccucagcaaggccgacucccgccgguucgagaacgccgugugggaccagugcaaggaccugugccacaugcacaccggggucgugguggagaagaagaagcgcggcgggaaggaggagaucacgccccacugcgcccugauggacugcaucauguacgacgcggccgucagcggcggccucaacaucccggugcugcgggccgugcugccccgcgacauggucuuccggaccuccagccccaagguggugcucugaggacuaguuauaagacugacuagcccgaugggccucccaacgggcccuccuccccuccuugcaccgagauuaaucaaaggcucuuuucagagccaccaaaaaaaaaaaaaaaaaaaaaaaaaaaaaaaaaaaaaaaaaaaaaaaaaaaaaaaaaaaaaaaaaaaaaaaaaaaaaaaaaaaaaaaaaaaaaaaaaaaaa

SEQ ID NO: 19135 - RNA, 1986 nt, Artificial Sequence
  mRNA product Design i-3 (hSL-A100) comprising derived and/or modified sequence from LASV(Lassa virus/H.sapiens-wt/NGA/2016/ISTH_0009;Clade II)__AVO03572__SP-HsPLAT_NP(2-569) (opt1)
aggagaaagcuuaccauggacgccaugaagcgcggccugugcugcgugcuccugcugugcggggccgucuucgugagccccagcgccuccaaggaggugaaguccuuccuguggacccagagccuccgccgggagcugagcggcuacugcuccaacaucaagcugcaggucgugaaggacgcccaggcgcuccugcacgggcuggacuucagcgagguguccaacguccagcgccucaugcggaagcagaagcgcgacgacagcgaccugaagcggcugcgcgaccucaaccaggccgugaacaaccugguggagcugaaguccacccagcagaaguccauccuccgggucggcacgcugaccagcgacgaccugcucacccuggccgccgaccuggagaagcucaagagcaaggugauccgcaccgagcggccccuguccagcgggguguacaugggcaaccuguccacgcagcagcucgagcagcgccgggcccugcugaacaugaucgggauggucggcggcgcgcaggggacccagccgggccgcgacgggguggugcgggucugggacgugaagaaccccgaccuccugaacaaccaguucggcaccaugcccagccugacccucgccugccugacgaagcagggccagguggaccugaacgacgccguccucgcccugaccgaccuggggcucaucuacaccgcgaaguaccccaacuccagcgaccuggaccgccugucccagagccacccgauccucaacaugguggacaccaagaaguccagccugaacaucagcggcuacaacuucucccugggggccgccgugaaggccggcgccugcaugcucgacgggggcaacaugcuggagacgaucaaggucacgccccagaccauggacggcauccucaagagcauccugaaggugaagaagucccuggggauguucgugagcgacacccccggcgagcggaaccccuacgagaacauccuguacaagaucugccucuccggggacggcuggccguacaucgcgagccgcaccuccaucgucgggcgggccugggagaacaccaccguggaccuggagagcgacggcaagccccagaaggugggcuccgccgggagcaacaagucccugcagagcgccggcuuccccaccgggcucacguacucccagcugaugacccugaaggacagcaugaugcagcuggaccccuccgccaagaccuggaucgacaucgagggccgcccggaggaccccgucgagaucgcgcucuaccagcccaugagcgggugcuacauccacuucuuccgggagcccaccgaccugaagcaguucaagcaggacgccaaguacucccacggcaucgacguggccgaccuguucccggcccagcccggccucacgagcgccgucaucgaggcgcugccccgcaacauggugcugaccugccaggggagcgacgacaucaagcggcuccuggacucccagggccgccgcgacaucaagcugaucgacaucgcccucagcaaggccgacucccggcgcuucgagaacgccgugugggaccagugcaaggaccugugccacaugcacaccggggucgugguggagaagaagaagcggggcgggaaggaggagaucacgccccacugcgcccugauggacugcaucauguacgacgcggccgucagcggcggccucaacaucccggugcugcgcgccgugcugccccgggacauggucuuccgcaccuccagccccaagguggugcucugaggacuaguuauaagacugacuagcccgaugggccucccaacgggcccuccuccccuccuugcaccgagauuaaucaaaggcucuuuucagagccaccaaaaaaaaaaaaaaaaaaaaaaaaaaaaaaaaaaaaaaaaaaaaaaaaaaaaaaaaaaaaaaaaaaaaaaaaaaaaaaaaaaaaaaaaaaaaaaaaaaaaa

SEQ ID NO: 19136 - RNA, 1986 nt, Artificial Sequence
  mRNA product Design i-3 (hSL-A100) comprising derived and/or modified sequence from LASV(Lassa virus/H.sapiens-wt/NGA/2016/ISTH_0017;Clade II)__AVO03568__SP-HsPLAT_NP(2-569) (opt1)
aggagaaagcuuaccauggacgccaugaagcgcggccugugcugcgugcuccugcugugcggggccgucuucgugagccccagcgccuccaaggaggugaaguccuuccuguggacccagagccuccgccgggagcugagcggcuacugcuccagcaucaagcugcaggucgugaaggacgcccaggcgcuccugcacgggcuggacuucuccgaggugagcaacguccagcgccucaugcggaagcagaagcgcgacgacuccgaccugaagcggcugcgcgaccucaaccaggccgugaacaaccugguggagcucaagagcacccagcagaaguccauccugcgggucggcacgcugaccagcgacgaccugcucacccuggccgccgaccuggagaagcucaaguccaaggugauccgcaccgagcggccccugagcuccgggguguacaugggcaaccugagcacgcagcagcucgagcagcgccgggcccugcugaacaugaucgggauggcgggcggcgcccaggggacccagccgggccgcgacggggucgugcgggugugggacgucaagaaccccgaccuccugaacaaccaguucggcaccaugcccucccugacccucgccugccugacgaagcagggccagguggaccugaacgacgccgugcucgcgcugaccgaccuggggcucaucuacaccgccaaguaccccaacagcuccgaccuggaccgccugagccagagccacccgauccucaacauggucgacaccaagaaguccagccugaacaucuccggcuacaacuucagccugggggccgccgugaaggccggcgcgugcaugcucgacgggggcaacaugcuggagacgaucaaggugacgccccagaccauggacggcauccugaaguccauccucaaggucaagcggagccuggggauguucguguccgacgcccccggcgagcgcaaccccuacgagaacauccuguacaagaucugccucagcggggacggcuggccguacaucgccucccggaccagcaucguggggcgcgccugggagaacaccaccgucgaccuggaguccgacggcaagccccagaaggugggcgccaccgggagcaacaagucccugcagagcgcgggcuuccccaccgggcucacguacucccagcugaugacccugaaggacagcaugaugcagcuggaccccuccgccaagaccuggaucgacaucgagggccggccggaggaccccguggaggucgcccucuaccagcccgugagcgggugcuacauccacuucuuccgcgagcccaccgaccugaagcaguucaagcaggacgccaaguacucccacggcaucgacgucgccgaccuguucccggcgcagcccggccucacgagcgccgugaucgaggcccugccccggaacauggugcugaccugccaggggagcgacgacaucaagaagcuccuggacucccagggccgcaaggacaucaagcugaucgacaucgcccucagcaaggccgacucccgccgguucgagaacgcggucugggaccagugcaaggaccugugccacaugcacaccggggugguggucgagaagaagaagcgcggcgggaaggaggagaucacgccccacugcgcccugauggacugcaucauguacgacgccgccgugagcggcggccucaacaucccggugcugcgggcgguccugccccgcgacaugguguuccggaccuccagccccaaggugguccucugaggacuaguuauaagacugacuagcccgaugggccucccaacgggcccuccuccccuccuugcaccgagauuaaucaaaggcucuuuucagagccaccaaaaaaaaaaaaaaaaaaaaaaaaaaaaaaaaaaaaaaaaaaaaaaaaaaaaaaaaaaaaaaaaaaaaaaaaaaaaaaaaaaaaaaaaaaaaaaaaaaaaa

SEQ ID NO: 19137 - RNA, 1986 nt, Artificial Sequence
  mRNA product Design i-3 (hSL-A100) comprising derived and/or modified sequence from LASV(Lassa virus/H.sapiens-wt/NGA/2018/ISTH_0959;Clade II)__AVV65100__SP-HsPLAT_NP(2-569) (opt1)
aggagaaagcuuaccauggacgccaugaagcgcggccugugcugcgugcuccugcugugcggggccgucuucgugagccccagcgccuccaaggaggugaaguccuuccuguggacccagagccuccgccgggagcugagcggcuacugcuccaacaucaagcugcaggucgugaaggacgcccaggcgcuccugcacgggcuggacuucagcgagguguccaacguccagcgccucaugcggaagcagaagcgcgacgacagcgaccugaagcggcugcgcgaccucaaccaggccgugaacaaccugguggagcugaaguccacccagcagaaguccauccuccgggucggcacccugaccagcgacgaccugcucacccuggccgccgaccuggagaagcucaagagcaaggugauccgcaccgagcggccccuguccagcgggguguacaugggcaaccuguccacgcagcagcucgagcagcgccgggcccugcugaaccucaucgggauggucggcggcgcgcaggggacccagccgggccgcgacgggguggugcgggucugggacgugaagaaccccgaccugcugaacaaccaguucggcaccaugcccagccucacccuggccugccugacgaagcagggccagguggaccucaacgacgucgugcuggcccugaccgaccucgggcugaucuacaccgccaaguaccccaacuccagcgaccuggaccgccucucccagagccacccgauccugaacaugguggacaccaagaaguccagccugaacaucagcggcuucaacuucucccucggggcggccgucaaggccggcgccugcaugcuggacgggggcaacaugcuggagacgaucaaggugacgccccagaccauggacggcauccucaagagcauccugaaggugaagaagucccuggggauguucgucagcgacacccccggcgagcggaaccccuacgagaacauccucuacaagaucugccuguccggggacggcuggccguacaucgccagccgcaccuccaucguggggcgggcgugggagaacaccaccguggaccuggagagcgacggcaagccccacaaggucggcaccgccggguccaacaagagccuccaguccgccggcuuccccacggggcugaccuacagccagcugaugacccugaaggacuccaugaugcagcucgaccccagcgccaagaccuggaucgacaucgagggccgcccggaggaccccguggagaucgcccuguaccagcccauguccgggugcuacauccacuucuuccgggagcccacggaccugaagcaguucaagcaggacgcgaaguacagccacggcaucgacgucgccgaccucuucccggcccagcccggccugaccuccgccgugaucgaggcccugccccgcaacauggugcugaccugccaggggagcgacgacaucaagcggcuccuggacagccagggccgcaaggacaucaagcucaucgacaucgcgcuguccaagaccgacagccgccgguucgagaacgccgucugggaccagugcaaggaccugugccacaugcacacgggggugguggucgagaagaagaagcgcggcgggaaggaggagaucacgccccacugcgcccucauggacugcaucauguacgacgccgccguguccggcggccugaacaucccggugcugcgggcgguccucccccgcgacaugguguuccggaccagcucccccaaggugguccugugaggacuaguuauaagacugacuagcccgaugggccucccaacgggcccuccuccccuccuugcaccgagauuaaucaaaggcucuuuucagagccaccaaaaaaaaaaaaaaaaaaaaaaaaaaaaaaaaaaaaaaaaaaaaaaaaaaaaaaaaaaaaaaaaaaaaaaaaaaaaaaaaaaaaaaaaaaaaaaaaaaaaa

SEQ ID NO: 19138 - RNA, 1986 nt, Artificial Sequence
  mRNA product Design i-3 (hSL-A100) comprising derived and/or modified sequence from LASV(LASV003-NIG-2008;Clade II)__AIT17581__SP-HsPLAT_NP(2-569) (opt1)
aggagaaagcuuaccauggacgccaugaagcgcggccugugcugcgugcuccugcugugcggggccgucuucgugagccccagcgccuccaaggaggugaaguccuuccuguggacccagagccuccgccgggagcugagcggcuacugcuccagcaucaagcugcaggucgugaaggacgcccaggcgcuccugcacgggcuggacuucuccgaggugagcaacguccagcgccucaugcggaagcagaagcgcgacgacuccgaccugaagcggcugcgcgaccucaaccaggccgugaacaaccugguggagcucaagagcacccagcagaaguccguccugcgggugggcacccugaccagcgacgaccugcucacccuggccgccgaccuggagaagcucaaguccaaggugauccgcaccgagcggccccugagcuccggggucuacaugggcaaccugagcgcccagcagcucgagcagcgccggacgcugcugaacaugaucgggauggugggcggcgcgcaggggacccagccgggccgcgacggggugguccgggugugggacgugaagaaccccgaccuccugaacaaccaguucggcaccaugcccucccugacccucgccugccugacgaagcaggggcaggucgaccugaacgacguggugcucgcccugaccgaccugggccucaucuacaccgccaaguaccccaacagcuccgaccuggaccgccugagccagagccacccgauccucuccauggucgacaccaagaaguccagccugaacaucagcggcuacaacuucucccugggggcggccgugaaggccggcgccugcaugcucgacgggggcaacaugcuggagacgaucaaggugacgccccagaccauggacggcauccucaagagcauccugaaggucaagaagucccuggggauguucgugagcgacacccccggcgagcggaaccccuacgagaacauccuguacaagaucugccucuccggggacggcuggccguacaucgccagccgcaccuccaucguggggcgggcgugggagaacaccaccgucgaccuggagagcgacggcaagccccagaaggugggcaccgccggguccaacaagagccugcaguccgccggcuuccccacggggcucaccuacagccagcugaugacccugaaggacuccaugaugcagcuggaccccagcgccaagaccuggaucgacaucgagggccgcccggaggaccccgucgagaucgcccucuaccagcccauguccgggugcuacauccacuucuuccgggagcccacggaccugaagcaguucaagcaggacgcgaaguacagccacggcaucgacgugaccgaccuguucccggcccagcccggccucaccagcgccgugaucgaggcccugccccgcaacaugguccugaccugccagggguccgacgacaucaagcggcuccuggacagccagggccgccgcgacaucaagcugaucgacaucgcccucuccaaggcggacagccggcgcuucgagaacgccgugugggaccagugcaaggaccugugccacaugcacacggggguggucguggagaagaagaagcggggcgggaaggaggagaucacgccccacugcgcccugauggacugcaucauguacgacgccgccguguccggcggccucaacaucccgguccugcgcgcggugcugccccgggacaugguguuccgcaccagcucccccaaggucgugcucugaggacuaguuauaagacugacuagcccgaugggccucccaacgggcccuccuccccuccuugcaccgagauuaaucaaaggcucuuuucagagccaccaaaaaaaaaaaaaaaaaaaaaaaaaaaaaaaaaaaaaaaaaaaaaaaaaaaaaaaaaaaaaaaaaaaaaaaaaaaaaaaaaaaaaaaaaaaaaaaaaaaaa

SEQ ID NO: 19139 - RNA, 1986 nt, Artificial Sequence
  mRNA product Design i-3 (hSL-A100) comprising derived and/or modified sequence from LASV(LASV035-NIG-2009;Clade II)__AIT17589__SP-HsPLAT_NP(2-569) (opt1)
aggagaaagcuuaccauggacgccaugaagcgcggccugugcugcgugcuccugcugugcggggccgucuucgugagccccagcgccuccaaggaggugaaguccuuccuguggacccagagccuccgccgggagcugagcggcuacugcuccagcaucaagcugcaggucgugaaggacgcccaggcgcuccugcacgggcuggacuucuccgaggugagcaacguccagcgccucaugcggaagcagaagcgcgacgacuccgaccugaagcggcugcgcgaccucaaccaggccgugaacaaccugguggagcucaagagcacccagcagaaguccauccugcgggucggcacgcugaccagcgacgaccugcucacccuggccgccgaccuggagaagcucaaguccaaggugauccgcaccgagcggccccugagcuccgggguguacaugggcaaccugagcgcccagcagcucgagcagcgccgggcgcugcugaacaugaucgggauggucggcggcgcccaggggacgcagccgggccgcgacgggguggugcgggucugggacgugaagaaccccgaccuccugaacaaccaguucggcaccaugcccucccugacccucgccugccugaccaagcagggccagguggaccugaacgacgccguccucgcgcugacggaccuggggcucaucuacaccgccaaguaccccaacagcuccgaccuggaccgccugagccagagccacccgauccucaacaugguggacaccaagaaguccagccugaacaucuccggcuacaacuucagccugggggccgccgugaaggccggcgcgugcaugcucgacgggggcaacaugcuggagaccaucaaggucacgccccagaccauggacggcauccugaaguccauccucaaggugaagcggagccuggggauguucguguccgacacccccggcgagcgcaaccccuacgagaacauccuguacaagaucugccucagcggggacggcuggccguacaucgccucccggaccagcaucgucgggcgcgccugggagaacacgaccguggaccuggaguccgacggcaagccccagaaggugggcaccaccgggagcaacaagucccugcagagcgccggcuuccccacggggcucaccuacucccagcugaugacccugaaggacagcaugaugcagcuggaccccuccgccaagaccuggaucgacaucgagggccggccggaggaccccgucgagaucgcgcucuaccagcccaugagcgggugcuacauccacuucuuccgcgagcccacggaccugaagcaguucaagcaggacgccaaguacucccacggcaucgacguggccgaccuguucccggcccagcccggccucaccagcgccgucaucgaggcgcugccccggaacauggugcugaccugccaggggagcgacgacaucaagaagcuccuggacucccagggccgccgcgacaucaagcugaucgacaucgcccucagcaaggccgacucccggaaguucgagaacgccgugugggaccagugcaaggaccugugccacaugcacaccggggucgugguggagaagaagaagcgcggcgggaaggaggagaucacgccccacugcgcccugauggacugcaucauguacgacgcggccgucagcggcggccucaacaucccggugcugcgggccgugcugccccgcgacauggucuuccggaccuccagccccaagguggugcucugaggacuaguuauaagacugacuagcccgaugggccucccaacgggcccuccuccccuccuugcaccgagauuaaucaaaggcucuuuucagagccaccaaaaaaaaaaaaaaaaaaaaaaaaaaaaaaaaaaaaaaaaaaaaaaaaaaaaaaaaaaaaaaaaaaaaaaaaaaaaaaaaaaaaaaaaaaaaaaaaaaaaa

SEQ ID NO: 19140 - RNA, 1986 nt, Artificial Sequence
  mRNA product Design i-3 (hSL-A100) comprising derived and/or modified sequence from LASV(LASV1000-NIG-2009;Clade II)__AIT17783__SP-HsPLAT_NP(2-569) (opt1)
aggagaaagcuuaccauggacgccaugaagcgcggccugugcugcgugcuccugcugugcggggccgucuucgugagccccagcgccuccaaggaggugaaguccuuccuguggacccagagccuccgccgggagcugagcggcuacugcuccaacaucaagcugcaggucgugaaggacgcccaggcgcuccugcacgggcuggacuucagcgagguguccaacguccagcgccucaugcggaagcagaagcgcgacgacagcgaccugaagcggcugcgcgaccucaaccaggccgugaacaaccugguggagcugaaguccacccagcagaaguccauccuccgggucggcacgcugaccagcgacgaccugcucacccuggccgccgaccuggagaagcucaagagcaaggugauccgcaccgagcggccccuguccagcgggguguacaugggcaaccuguccacgcagcagcucgagcagcgccgggcccugcugaacaugaucgggauggucggcggcgcgcaggggacccagccgggccgcgacgggguggugcgggucugggacgugaagaaccccgaccuccugaacaaccaguucggcaccaugcccagccugacccucgccugccugacgaagcagggccagguggaccugaacgacgucgugcucgcccugaccgaccuggggcucaucuacaccgccaaguaccccaacuccagcgaccuggaccgccugucccagagccacccgauccucaacaugguggacaccaagaaguccagccugaacaucagcggcuacaacuucucccugggggcggccgucaaggccggcgccugcaugcucgacgggggcaacaugcuggagacgaucaaggugacgccccagaccauggacggcauccucaagagcauccugaaggugaagaagucccuggggauguucgucagcgacacccccggcgagcggaaccccuacgagaacauccuguacaagaucugccucuccggggacggcuggccguacaucgccagccgcaccuccaucguggggcgggcgugggagaacaccaccguggaccuggagagcgacggcaagccccagaaggucggcaccgccggguccaacaagagccugcaguccgccggcuuccccacggggcucaccuacagccagcugaugacccugaaggacuccaugaugcagcuggaccccagcgccaagaccuggaucgacaucgagggccgcccggaggaccccguggagaucgcccucuaccagcccgucuccgggugcuacauccacuucuuccgggagcccacggaccugaagcaguucaagcaggacgcgaaguacagccacggcaucgacguggccgaccuguucccggcccagcccggccucaccuccgccgugaucgaggcccugccccgcaacaugguccugaccugccaggggagcgacgacaucaagcggcuccuggacagccagggccgccgcgacaucaagcugaucgacaucgcgcucuccaaggccgacagccggcgcuucgagaacgccgugugggaccagugcaaggaccugugccacaugcacaccgggguggucguggagaagaagaagcggggcgggaaggaggagaucacgccccacugcgcccugauggacugcaucauguacgacgccgcgguguccggcggccucaacaucccgguccugcgcgccgugcugccccgggacaugguguuccgcaccagcucccccaaggucgugcucugaggacuaguuauaagacugacuagcccgaugggccucccaacgggcccuccuccccuccuugcaccgagauuaaucaaaggcucuuuucagagccaccaaaaaaaaaaaaaaaaaaaaaaaaaaaaaaaaaaaaaaaaaaaaaaaaaaaaaaaaaaaaaaaaaaaaaaaaaaaaaaaaaaaaaaaaaaaaaaaaaaaaa

SEQ ID NO: 19141 - RNA, 1986 nt, Artificial Sequence
  mRNA product Design i-3 (hSL-A100) comprising derived and/or modified sequence from LASV(LASV221-NIG-2010;Clade II)__AIT17625__SP-HsPLAT_NP(2-569) (opt1)
aggagaaagcuuaccauggacgccaugaagcgcggccugugcugcgugcuccugcugugcggggccgucuucgugagccccagcgccuccaaggaggugaaguccuuccuguggacccagagccuccgccgggagcugagcggcuacugcuccagcaucaagcugcaggucgugaaggacgcccaggcgcuccugcacgggcuggacuucuccgaggugagcaacguccagcgccucaugcggaagcagcgccgggacgacuccgaccugaagcgccugcgggaccucaaccaggccgugaacaaccugguggagcucaagagcacccagcagaaguccauccugcgcgucggcacgcugaccagcgacgaccugcucacccuggccgccgaccuggagaagcucaaguccaaggugauccggaccgagcgcccccugagcuccgggguguacaugggcaaccugagcacgcagcagcucgagcagcggcgcgcccugcugaacaugaucgggauggucggcggcgcgcaggggacccagccgggccgggacgggguggugcgcgucugggacgugaagaaccccgaccuccugaacaaccaguucggcaccaugcccucccugacccucgccugccugacgaagcagggccagguggaccugaacgacgccguccucgcccugaccgaccuggggcucaucuacaccgcgaaguaccccaacagcuccgaccuggaccggcugagccagagccacccgauccucaacaugguggacaccaagaaguccagccugaacaucuccggcuacaacuucagccugggggccgccgugaaggccggcgccugcaugcucgacgggggcaacaugcuggagacgaucaaggucacgccccagaccguggacggcauccugaaguccauccucaaggugaagcgcagccuggggauguucgucuccgacacccccggcgagcggaaccccuacgagaacauccuguacaagaucugccucagcggggacggcuggccguacaucgcgucccgcaccagcaucguggggcgggccugggagaacaccaccguggaccuggaguccgacggcaagccccagaaggucggcaccgccgggagcaacaagucccugcagagcgccggcuuccccacggggcucaccuacucccagcugaugacccugaaggacagcaugaugcagcuggaccccuccgccaagaccuggaucgacaucgagggccgcccggaggaccccguggagaucgcgcucuaccagcccaugagcgggugcuacauccacuucuuccgggagcccacggaccugaagcaguucaagcaggacgccaaguacucccacggcaucgacgucgccgaccuguucccggcccagcccggccucaccagcgccgugaucgaggcgcugccccgcaacauggugcugaccugccaggggagcgacgacaucaagcgccuccuggacucccagggccggcgcgacaucaagcugaucgacaucgcccucagcaaggccgacucccggaaguucgagaacgccgucugggaccagugcaaggaccugugccacaugcacaccggggugguggucgagaagaagaagcgcggcgggaaggaggagaucacgccccacugcgcccugauggacugcaucauguacgacgcggccgugagcggcggccucaacaucccggugcugcgggccguccugccccgcgacaugguguuccggaccuccagccccaaggugguccucugaggacuaguuauaagacugacuagcccgaugggccucccaacgggcccuccuccccuccuugcaccgagauuaaucaaaggcucuuuucagagccaccaaaaaaaaaaaaaaaaaaaaaaaaaaaaaaaaaaaaaaaaaaaaaaaaaaaaaaaaaaaaaaaaaaaaaaaaaaaaaaaaaaaaaaaaaaaaaaaaaaaaa

SEQ ID NO: 19142 - RNA, 1986 nt, Artificial Sequence
  mRNA product Design i-3 (hSL-A100) comprising derived and/or modified sequence from LASV(LASV237-NIG-2010;Clade II)__AIT17639__SP-HsPLAT_NP(2-569) (opt1)
aggagaaagcuuaccauggacgccaugaagcgcggccugugcugcgugcuccugcugugcggggccgucuucgugagccccagcgccuccaaggaggugaaguccuuccuguggacccagagccuccgccgggagcugagcggcuacugcuccaacaucaagcugcaggucgugaaggacgcccaggcgcuccugcacgggcuggacuucagcgagguguccaacguccagcgccucaugcggaagcagaagcgcgacgacagcgaccugaagcggcugcgcgaccucaaccaggccgugaacaaccugguggagcugaaguccacccagcagaaguccauccuccgggucggcacccugaccagcgacgaccugcucacccuggccgccgaccuggagaagcucaagagcaaggugauccgcaccgagcggccccuguccagcgggguguacaugggcaaccuguccacgcagcagcucgagcagcgccgggcccugcugaacaugaucgggauggucggcggcgcgcaggggacccagccgggccgcgacgggguggugcgggucugggacgugaagaaccccgaccuccugaacaaccaguucggcaccaugcccagccugacccucgccugccugacgaagcagggccagguggaccugaacgacgccguccucgcccugaccgaccuggggcucaucuacaccgcgaaguaccccaacuccagcgaccuggaccgccugucccagagccacccgauccucaacaugguggacaucaagaaguccagccugaacaucagcggcuacaacuucucccugggggccgccgugaaggccggcgccugcaugcucgacgggggcaacaugcuggagaccaucaaggucacgccccagaccauggacggcauccucaagagcauccugaaggugaagcggucccuggggauguucgugagcgacacccccggcgagcgcaaccccuacgagaacauccuguacaagaucugccucuccggggacggcuggccguacaucgcgagccggaccuccaucgucgggcgcgccugggagaacacgaccguggaccuggagagcgacggcaagccccagaaggugggcuccgccgggagcaacaagucccugcagagcgccggcuuccccaccgggcucaccuacucccagcugaugacgcugaaggacagcaugaugcagcuggaccccuccgccaagaccuggaucgacaucgagggccggccggaggaccccgucgagaucgcgcucuaccagcccaugagcgggugcuacauccacuucuuccgcgagcccaccgaccugaagcaguucaagcaggacgccaaguacucccacggcaucgacguggccgaccuguucccggcccagcccggccucaccagcgccgucaucgaggcgcugccccggaacauggugcugacgugccaggggagcgacgacaucaagcgccuccuggacucccagggccgccgggacaucaagcugaucgacaucgcccucagcaaggccgacucccgccgguucgagaacgccgugugggaccagugcaaggaccugugccacaugcacaccggggucgugguggagaagaagaagcgcggcgggaaggaggagaucacgccccacugcgcccugauggacugcaucauguacgacgcggccgucagcggcggccucaacaucccggugcugcgggccgugcugccccgcgacauggucuuccggaccuccagccccaagguggugcucugaggacuaguuauaagacugacuagcccgaugggccucccaacgggcccuccuccccuccuugcaccgagauuaaucaaaggcucuuuucagagccaccaaaaaaaaaaaaaaaaaaaaaaaaaaaaaaaaaaaaaaaaaaaaaaaaaaaaaaaaaaaaaaaaaaaaaaaaaaaaaaaaaaaaaaaaaaaaaaaaaaaaa

SEQ ID NO: 19143 - RNA, 1986 nt, Artificial Sequence
  mRNA product Design i-3 (hSL-A100) comprising derived and/or modified sequence from LASV(LASV253-NIG-2011;Clade II)__AIT17671__SP-HsPLAT_NP(2-569) (opt1)
aggagaaagcuuaccauggacgccaugaagcgcggccugugcugcgugcuccugcugugcggggccgucuucgugagccccagcgccuccaaggaggugaaguccuuccuguggacccagagccuccgccgggagcugagcggcuacugcuccagcaucaagcugcaggucgugaaggacgcccaggcgcuccugcacgggcuggacuucuccgaggugagcaacguccagcgccucaugcggaagcagaagcgcgacgacuccgaccugaagcggcugcgcgaccucaaccaggccgugaacaaccugguggagcucaagagcacccagcagaaguccguccugcgggugggcacccugaccagcgacgaccugcucacccuggccgccgaccuggagaagcucaaguccaaggugauccgcaccgagcggccccugagcuccggggucuacaugggcaaccugagcacgcagcagcucgagcagcgccgggcccugcugaacaugaucgggauggugggcggcgcgcaggggacccagccgggccgcgacggggugguccgggugugggacgugaagaaccccgaccuccugaacaaccaguucggcaccaugcccucccugacccucgccugccugacgaagcaggggcaggucgaccugaacgacguggugcucgcccugaccgaccugggccucaucuacaccgccaaguaccccaacagcuccgaccuggaccgccugagccagagccacccgauccucaacauggucgacaccaagaaguccagccugaacaucuccggcuacaacuucagccugggggcggccgugaaggccggcgccugcaugcucgacgggggcaacaugcuggagacgaucaaggugacgccccagaccauggacggcauccugaaguccauccucaaggucaagaagucccuggggauguucgugagcgacacccccggcgagcggaaccccuacgagaacauccuguacaagaucugccucagcggggacggcuggccguacaucgccucccgcaccagcaucguggggcgggcgugggagaacaccaccgucgaccuggaguccgacggcaagccccagaaggugggcaccgccgggagcaacaagucccugcagagcgccggcuuccccacggggcucaccuacucccagcugaugacccugaaggacagcaugaugcagcuggaccccuccgccaagaccuggaucgacaucgagggccgcccggaggaccccgucgagaucgcccucuaccagcccaugagcgggugcuacauccacuucuuccgggagcccacggaccugaagcaguucaagcaggacgcgaaguacucccacggcaucgacgugaccgaccuguucccggcccagcccggccucaccagcgccgugaucgaggcccugccccgcaacaugguccugaccugccaggggagcgacgacaucaagcggcuccuggacucccagggccgccgcgacaucaagcugaucgacaucgcccucagcaaggcggacucccggcgcuucgagaacgccgugugggaccagugcaaggaccugugccacaugcacacggggguggucguggagaagaagaagcggggcgggaaggaggagaucacgccccacugcgcccugauggacugcaucauguacgacgccgccgugagcggcggccucaacaucccgguccugcgcgcggugcugccccgggacaugguguuccgcaccuccagccccaaggucgugcucugaggacuaguuauaagacugacuagcccgaugggccucccaacgggcccuccuccccuccuugcaccgagauuaaucaaaggcucuuuucagagccaccaaaaaaaaaaaaaaaaaaaaaaaaaaaaaaaaaaaaaaaaaaaaaaaaaaaaaaaaaaaaaaaaaaaaaaaaaaaaaaaaaaaaaaaaaaaaaaaaaaaaa

SEQ ID NO: 19144 - RNA, 1986 nt, Artificial Sequence
  mRNA product Design i-3 (hSL-A100) comprising derived and/or modified sequence from LASV(LASV254-NIG-2011;Clade II)__AIT17675__SP-HsPLAT_NP(2-569) (opt1)
aggagaaagcuuaccauggacgccaugaagcgcggccugugcugcgugcuccugcugugcggggccgucuucgugagccccagcgccuccaaggaggugaaguccuuccuguggacccagagccuccgccgggagcugagcggcuacugcuccagcaucaagcugcaggucgugaaggacgcccaggcgcuccugcacgggcuggacuucuccgaggugagcaacguccagcgccucaugcggaagcagaagcgcgacgacuccgaccugaagcggcugcgcgaccucaaccaggccgugaacaaccugguggagcucaagagcacccagcagaaguccguccugcgggugggcacgcugaccagcgacgaccugcucacccuggccgccgaccuggagaagcucaaguccaaggugauccgcaccgagcggccccugagcuccggggucuacaugggcaaccugagcacgcagcagcucgagcagcgccgggcccugcugaacaugaucgggauggugggcggcgcgcaggggacccagccgggccgcgacggggugguccgggugugggacgugaagaaccccgaccuccugaacaaccaguucggcaccaugcccucccugacccucgccugccugacgaagcaggggcaggucgaccugaacgacgccgugcucgcccugaccgaccugggccucaucuacaccgcgaaguaccccaacagcuccgaccuggaccgccugagccagagccacccgauccucaacaugguggacaccaagaaguccagccugaacaucuccggcuacaacuucagccugggggccgccgucaaggccggcgccugcaugcucgacgggggcaacaugcuggagacgaucaaggugacgccccagaccauggacggcauccugaaguccauccucaaggugaagaagucccuggggauguucgucagcgacacccccggcgagcggaaccccuacgagaacauccuguacaagaucugccucagcggggacggcuggccguacaucgcgucccgcaccagcaucguggggcgggccugggagaacaccaucguggaccuggaguccgacggcaagccccagaaggucggcaccgccgggagcaacaagucccugcagagcgccggcuuccccaccgggcucacguacucccagcugaugacccugaaggacagcaugaugcagcuggaccccuccgccaagaccuggaucgacaucgagggccgcccggaggaccccguggagaucgcgcucuaccagcccaugagcgggugcuacauccacuucuuccgggagcccaccgaccugaagcaguucaagcaggacgccaaguacucccacggcaucgacgucgccgaccuguucccggcccagcccggccucacgagcgccgugaucgaggcgcugccccgcaacauggugcugaccugccaggggagcgacgacaucaagcggcuccuggacucccagggccgccgcgacaucaagcugaucgacaucgcccucagcaaggccgacucccggcgcuucgagaacgccgucugggaccagugcaaggaccugugccacaugcacaccggggugguggucgagaagaagaagcggggcgggaaggaggagaucacgccccacugcgcccugauggacugcaucauguacgacgcggccgugagcggcggccucaacaucccggugcugcgcgccguccugccccgggacaugguguuccgcaccuccagccccaaggugguccucugaggacuaguuauaagacugacuagcccgaugggccucccaacgggcccuccuccccuccuugcaccgagauuaaucaaaggcucuuuucagagccaccaaaaaaaaaaaaaaaaaaaaaaaaaaaaaaaaaaaaaaaaaaaaaaaaaaaaaaaaaaaaaaaaaaaaaaaaaaaaaaaaaaaaaaaaaaaaaaaaaaaaa

SEQ ID NO: 19145 - RNA, 1986 nt, Artificial Sequence
  mRNA product Design i-3 (hSL-A100) comprising derived and/or modified sequence from LASV(Nig08-04;Clade II)__ADU56611__SP-HsPLAT_NP(2-569) (opt1)
aggagaaagcuuaccauggacgccaugaagcgcggccugugcugcgugcuccugcugugcggggccgucuucgugagccccagcgccuccaaggaggugaaguccuuccuguggacccagagccuccgccgggagcugagcggcuacugcuccaacaucaagcugcaggucgugaaggacgcccaggcgcuccugcacgggcuggacuucagcgagguguccaacguccagcgccucaugcggaagcagaagcgcgacgacggcgaccugaagcggcugcgcgaccucaaccaggccgugaacaaccugguggagcucaagagcacccagcagaaguccguccugcggguggggacccugaccagcgacgaccugcucacccuggccgccgaccuggagaagcucaaguccaaggugauccgcaccgagcggccccugagcuccggcgucuacauggggaaccugagcacgcagcagcucgagcagcgcaaggcccugcuguccaugaucggcauggugggcggggcgcagggcacccagccggggcgggacggcgugguccgcgugugggacgugaagaaccccgaccuccugaacaaccaguucgggaccaugcccagccugacccucgccugccugacgaagcagggccaggucgaccugaacgacgccgugcucgcccugaccgaccugggccucaucuacaccgcgaaguaccccaacuccagcgaccuggaccggcugucccagagccacccgauccucaacaugguggacaccaagaaguccagccugaacaucagcggguacaacuucucccugggcgccgccgucaaggccggggccugcaugcucgacggcggcaacaugcuggagacgaucaaggugacgccccagaccauggacgggauccucaagagcauccugaaggugaagcgcucccugggcauguucgucagcgacacccccggggagcggaaccccuacgagaacauccuguacaagaucugccucuccggcgacggguggccguacaucgcgagccgcaccuccaucgugggccgggccugggagaacaccaccguggaccuggagagcgacggcaagccccagaaggucgggaccgccggcuccaacaagagccugcaguccgccggguuccccacgggccucaccuacagccagcugaugacccugaaggacuccaugaugcagcuggaccccagcgccaagaccuggaucgacaucgaggggcgcccggaggaccccguggagaucgcgcucuaccagcccauguccggcugcuacauccacuucuuccgggagcccacggaccugaagcaguucaagcaggacgccaaguacagccacggcaucgacgucaccgaccuguucuccgcccagccggggcucaccagcgccgugaucgaggcccugccccgcaacauggugcugaccugccagggcagcgacgacaucaagaagcuccuggacucccaggggcggcgcgacaucaagcugaucgacaucagccucaacaaggcggacucccgccgguucgagaacgccgucugggaccagugcaaggaccugugccacaugcacacgggcgugguggucgagaagaagaagcgcgggggcaaggaggagaucacgccccacugcgcccugauggacugcaucauguucgacgccgccgugagcggcgggcucaacauccccauccugcgggcggugcugccgcgcgacauggucuuccggaccuccagccccaagguggugcucugaggacuaguuauaagacugacuagcccgaugggccucccaacgggcccuccuccccuccuugcaccgagauuaaucaaaggcucuuuucagagccaccaaaaaaaaaaaaaaaaaaaaaaaaaaaaaaaaaaaaaaaaaaaaaaaaaaaaaaaaaaaaaaaaaaaaaaaaaaaaaaaaaaaaaaaaaaaaaaaaaaaaa

SEQ ID NO: 19146 - RNA, 1989 nt, Artificial Sequence
  mRNA product Design i-3 (hSL-A100) comprising derived and/or modified sequence from LASV(GA391;Clade III)__AAA46284__SP-HsPLAT_NP(2-570) (opt1)
aggagaaagcuuaccauggacgccaugaagcgcggccugugcugcgugcuccugcugugcggggccgucuucgugagccccagcgccuccaaggaggugcgcagcugccuguggacccagucccuccggcgcgagcugagcggcuacugcuccaacaucaagcugcaggucgugaaggacgcccaggcgcuccugcacgggcuggacuucagcgagguguccaacguccagcggcucaugcgcaagcagaagcgggacgacggcgaccugaagcgccugcgggaccucaaccaggccgugaacaaccugguggagcugaaguccacccagcagaaguccguccuccgcguggggacgcugagcuccgacgaccugcucauccuggccgccgaccuggagaagcucaagagcaaggugacccggaccgagcgcccccuguccagcggcgucuacauggggaaccuguccagccagcagcucgaccagcggcgcgcccugcugaacaugaucggcaugaccggcguguccgggggcgggaagggcgcgagcaacgggaucgugcgggucugggacgugaagaacgccgagcuccugaacaaccaguucggcacgaugccgucccugacccucgccugccugaccaagcagggccagguggaccugaacgacgccguccaggcgcucaccgaccuggggcugaucuacacggccaaguaccccaacagcagcgaccucgaccgccugucccagagccaccccauccugaacaugaucgacaccaagaaguccagccucaacaucuccggcuacaacuucagccugggggccgccgugaaggccggcgcgugcaugcuggacggcgggaacaugcucgagaccaucaaggugagcccccagaccauggacggcauccucaagagcauccugaaggucaagaagucccuggggauguucgugagcgacacgccgggcgagcggaaccccuacgagaacauccuguacaagaucugccuguccggggacggcuggagcuacaucgccucccgcaccagcaucgugggccgggccugggagaacaccgucguggaccucgagcaggacaacaagccccagaagaucgggaacggcggguccaacaagagccugcaguccgccggcuucgccgcggggcugaucuacagccagcucaugacccugaaggacuucaagugcuucaaccugauccccaacgccaagacguggauggacaucgagggccgcccggaggaccccguggagaucgcccuguaccagcccuccagcggcugcuacguccacuucuuccgggagcccaccgaccucaagcaguucaagcaggacgccaaguacagccacgggcgcgacgugaccgaccuguucgccgcgcagccgggccugaccuccgccgucaucgaggcccucccccggaacauggugaucacgugccaggggagcgaggacauccgcaagcugcuggagucccagggccgccgggacaucaagcucaucgacaucacccugagcaaggccgacucccgcaaguucgagaacgccgugugggaccaguucaaggaccugugccacaugcacaccggggucgugguggagaagaagaagcggggcggcaaggaggagaucacgccccacugcgcgcucauggacugcaucauguucgacgccgccgucagcgggggccuggacgccaaggugcugcgcgugguccucccccgggacaugguguuccgcaccuccaccccgaaggugguccugugaggacuaguuauaagacugacuagcccgaugggccucccaacgggcccuccuccccuccuugcaccgagauuaaucaaaggcucuuuucagagccaccaaaaaaaaaaaaaaaaaaaaaaaaaaaaaaaaaaaaaaaaaaaaaaaaaaaaaaaaaaaaaaaaaaaaaaaaaaaaaaaaaaaaaaaaaaaaaaaaaaaaa

SEQ ID NO: 19147 - RNA, 1986 nt, Artificial Sequence
  mRNA product Design i-3 (hSL-A100) comprising derived and/or modified sequence from LASV(Nig08-A19;Clade III)__ADU56619__SP-HsPLAT_NP(2-569) (opt1)
aggagaaagcuuaccauggacgccaugaagcgcggccugugcugcgugcuccugcugugcggggccgucuucgugagccccagcgccuccaaggaggugaaguccuuccuguggacccagucccuccgccgggagcugagcggcuacugcuccaacaucaagcugcaggucgugaaggacgcccaggcgcuccugcacgggcuggacuucagcgagguguccaacguccagcgccucaugcggaagcagaagcgcgacgacggcgaccugaagcggcugcgcgaccucaaccaggccgugaacaaccugguggagcucaagagcacccagcagaaguccguccugcggguggggacccugagcuccgacgaccugcucgugcuggccgccgaccuggagaagcucaagagcaaggucgugcgcaccgagcggccccuguccagcggcaucuacauggggaaccuguccagccagcagcucgaccagcgcaaggcccugcugaacaugaucggcaugaccggcgggaacggcgggcggaacaccacguccgacggcaucgugcgcgucugggacgugaagaacgcggagcuccugaacaaccaguucgggaccaugccgagccugacccucgccugccugaccaagcagggccagguggaccugaacgacgccguccaggcccucacggaccugggccugaucuacaccgcgaaguaccccaacuccagcgaccucgaccggcuggcccagagccaccccauccugaacaugaucgacaccaagaaguccagccucaacaucuccggguacaacuucagccugggcgccgccgugaaggccggggcgugcaugcuggacggcggcaacaugcucgagaccaucaaggugagcccccagacgauggacgggauccucaagagcauccugaaggucaagcgcucccugggcauguucaucagcgacaccccgggggagcggaaccccuacgagaacauccuguacaagaucugccuguccggcgacggguggcccuacaucgccagccgcaccuccaucgugggccgggccugggagaacaccguggucgaccucgagagcgacaacaagccccagaagacgggcaacgggggcuccaacaagagccugcaguccgccggguucgccgcgggccugaccuacagccagcucaugacccugaaggacuccaugcugcagcuggacccgaacgccaagaccuggauggacaucgaggggcgccccgaggaccccguggagaucgcccucuaccagcccagcuccggcugcuacauccacuucuuccgggagccgacggaccugaagcaguucaagcaggacgccaaguacagccacggcaucgacgugaccgaccuguucgccgcgcagcccgggcucaccagcgccgucaucgaggcccugccccgcaacauggugaucacgugccagggcuccgaggacauccggaagcugcucgagagccaggggcgccgcgacaucaagcugaucgacaucucccugagcaaggucgacucccggaaguucgagaacgccgugugggaccaguucaaggaccucugccacaugcacaccggcaucguggucgagaagaagaagcgcgggggcaaggaggagaucacgccccacugcgcccugauggacugcaucauguucgacgcggccgugagcggcgggguggacgccaagguccugcgggccgugcucccgcgcgacaugguguuccggaccuccacccccaaggucgugcugugaggacuaguuauaagacugacuagcccgaugggccucccaacgggcccuccuccccuccuugcaccgagauuaaucaaaggcucuuuucagagccaccaaaaaaaaaaaaaaaaaaaaaaaaaaaaaaaaaaaaaaaaaaaaaaaaaaaaaaaaaaaaaaaaaaaaaaaaaaaaaaaaaaaaaaaaaaaaaaaaaaaaa

SEQ ID NO: 19148 - RNA, 1986 nt, Artificial Sequence
  mRNA product Design i-3 (hSL-A100) comprising derived and/or modified sequence from LASV(G1180-SLE-2010;Clade IV)__AIT17169__SP-HsPLAT_NP(2-569) (opt1)
aggagaaagcuuaccauggacgccaugaagcgcggccugugcugcgugcuccugcugugcggggccgucuucgugagccccagcgccuccaaggagaucaagagcuuccuguggacccagucccuccgccgggagcugagcggcuacugcuccaacaucaagcuccagguggucaaggacgcccaggcgcugcugcacgggcuggacuucagcgagguguccaacgugcagcgccucaugcggaaggagcgccgggacgacaacgaccugaagcgccugcgggaccucaaccaggccgucaacaaccugguggagcucaagagcacccagcagaaguccauccugcgcgugggcacccugaccagcgacgaccugcucauccuggccgccgaccuggagaagcucaaguccaaggucauccggaccgagcgcccccugagcgccgggguguacaugggcaaccuguccagccagcagcucgaccagcggcgcgcgcugcuguccaugaucgggaugagcuccggcaaccagcgggcccaggccggccgcgacggggugguccgggugugggacgugaagaacgucgagcuccugaacaaccaguucggcaccaugccgagccugacgcucgccugccugaccaagcagggccagguggaccugaacgacgcggugcaggcccucaccgaccuggggcugaucuacaccgccaaguaccccaacacguccgaccucgaccgccugacccagagccaccccauccugaacaugaucgacaccaagaaguccagccucaacaucagcggguacaacuucucccugggcgccgccgucaaggcgggcgccugcaugcuggacgggggcaacaugcucgagaccaucaaggugagcccccagacgauggacgggauccugaaguccauccugaaggugaagaaggcccucggcauguucaucagcgacaccccgggcgagcggaaccccuacgagaacauccuguacaagaucugccuguccggggacggcuggcccuacaucgccagccgcaccuccaucaccgggcgggccugggagaacacggucguggaccucgagagcgacggcaagccccagaaggcgggguccaacaacagcaacaagucccugcagagcgugggcuucaccgccggccugaccuacucccagcucaugacccugaaggacgccaugcugcagcuggacccgaacgccaagacguggauggacaucgaggggcgccccgaggaccccgucgagaucgcccucuaccagcccagcuccggcugcuacauccacuucuuccgggagccgaccgaccugaagcaguucaagcaggacgcgaaguacagccacgggaucgacgugaccgaccuguucgccgcccagcccggccucaccuccgccgugaucgacgcccugccccgcaacauggucaucacgugccaggggagcgacgacauccgcaagcugcucgagagccagggccggaaggacaucaagcugaucgacaucgcgcuguccaagaccgacagccgcaaguacgagaacgccgugugggaccaguacaaggaccucugccacaugcacaccggcgucgugguggagaagaagaagcgcgggggcaaggaggagaucacgccccacugcgcccugauggacugcaucauguucgacgccgcggucuccgggggccugaacaccagcgugcuccgggccgugcugccgcgggacauggucuuccgcaccuccacgccccggguggugcugugaggacuaguuauaagacugacuagcccgaugggccucccaacgggcccuccuccccuccuugcaccgagauuaaucaaaggcucuuuucagagccaccaaaaaaaaaaaaaaaaaaaaaaaaaaaaaaaaaaaaaaaaaaaaaaaaaaaaaaaaaaaaaaaaaaaaaaaaaaaaaaaaaaaaaaaaaaaaaaaaaaaaa

SEQ ID NO: 19149 - RNA, 1986 nt, Artificial Sequence
  mRNA product Design i-3 (hSL-A100) comprising derived and/or modified sequence from LASV(G1442-SLE-2011;Clade IV)__AIT17181__SP-HsPLAT_NP(2-569) (opt1)
aggagaaagcuuaccauggacgccaugaagcgcggccugugcugcgugcuccugcugugcggggccgucuucgugagccccagcgccuccaaggaggugaaguccuuccuguggacccagagccuccgccgggagcugagcggcuacugcuccaacaucaagcugcaggucgugaaggacgcccaggcgcuccugcacgggcuggacuucagcgagguguccaacguccagcgccucaugcggaagcagcgccgggacgacaacgaccugaagcgccugcgggaccucaaccaggccgugaacaaccugguggagcucaagagcacccagcagaaguccguccugcgcgugggcacccugaccagcgacgaccugcucgugcuggccgccgaccuggagaagcucaaguccaaggucauccggaccgagcgcccccugagcgccgggguguacaugggcaaccuguccagccagcagcucgaccagcggcgcgcgcugcugaacaugaucgggauguccggcggcauccaggggacccggacgggccgcgacggggugguccgggugugggacgugaagaacgccgaccuccugaacaaccaguucggcaccaugccgagccugacccucgccugccugaccaagcaggggcaggucgaccugaacgacguggugcaggcccucacggaccugggccugaucuacaccgcgaaguaccccaacgccuccgaccucgaccgccugacccagagccaccccauccugaacaugaucgacaccaagaaguccagccucaacaucagcggcuacaacuucucccugggggccgccgucaaggccggcgcgugcaugcuggacgggggcaacaugcucgagacgaucaaggugagcccccagaccauggacggcauccugaaguccauccugaaggugaagaagacccucgggauguucaucagcgacaccccgggcgagcggaaccccuacgagaacauccuguacaagaucugccuguccggggacggcuggcccuacaucgccagccgcacguccaucaccgggcgggccugggagaacaccgucguggaccucgagagcgacggcaagccccagaaggccggcuccaacaacagcaacaagucccugcagagcgccggguucgcggccggccugaccuacucccagcucaugacgcugaaggacgccaugcugcagcuggacccgaacgccaagaccuggauggacaucgaggggcgccccgaggaccccguggagaucgcccucuaccagcccagcuccggcugcuacauccacuucuuccgggagccgaccgaccugaagcaguucaagcaggacgcgaaguacagccacgggaucgacgucaccgaccuguucgccgcccagcccggccucacguccgccgugaucgaggcccugccccgcaacauggucaucacgugccagggcagcgacgacaucaagaagcugcucgagucccaggggcgcaaggacaucaagcugaucgacaucgcgcugagcaagaccgacagccggaaguacgagaacgccgugugggaccaguacaaggaccucugccacaugcacaccggcguggucguggagaagaagaagcgcgggggcaaggaggagaucaccccgcacugcgcccugauggacugcaucauguucgacgccgcgguguccgggggccugaacacccucguccugcgggccgugcugccccgcgacaugguguuccggaccagcacgccccgcgucgugcucugaggacuaguuauaagacugacuagcccgaugggccucccaacgggcccuccuccccuccuugcaccgagauuaaucaaaggcucuuuucagagccaccaaaaaaaaaaaaaaaaaaaaaaaaaaaaaaaaaaaaaaaaaaaaaaaaaaaaaaaaaaaaaaaaaaaaaaaaaaaaaaaaaaaaaaaaaaaaaaaaaaaaa

SEQ ID NO: 19150 - RNA, 1986 nt, Artificial Sequence
  mRNA product Design i-3 (hSL-A100) comprising derived and/or modified sequence from LASV(G3010-SLE-2013;Clade IV)__AIT17345__SP-HsPLAT_NP(2-569) (opt1)
aggagaaagcuuaccauggacgccaugaagcgcggccugugcugcgugcuccugcugugcggggccgucuucgugagccccagcgccuccaaggagaucaagagcuuccuguggacccagucccuccgccgggagcugagcggcuacugcuccaacaucaagcuccagguggucaaggacgcccaggcgcugcugcacgggcuggacuucagcgagguguccaacgugcagcgccucaugcggaaggagcgccgggacgacaacgaccugaagcgccugcgggaccucaaccaggccgucaacaaccugguggagcucaagagcacccagcagaaguccauccugcgcgugggcacccugaccagcgacgaccugcucauccuggccgccgaccuggagaagcucaaguccaaggucacccggaccgagcgcccccugagcgccgggguguacaugggcaaccuguccagccagcagcucgaccagcggcgcgcgcugcuguccaugaucgggaugagcuccggcgugcagggcgcccgggccgggcgcgacggcgucgugcgggugugggacgucaagaacgccgagcuccugaacaaccaguucgggacgaugccgagccugacccucgcgugccugaccaagcagggccagguggaccugaacgacgugguccaggcccucaccgaccuggggcugaucuacacggccaaguaccccaacaccuccgaccucgaccgccugacccagagccaccccauccugaacaugaucgacaccaagaaguccagccucaacaucagcggcuacaacuucucccugggcgccgccgugaaggcgggggccugcaugcuggacggcgggaacaugcucgagacgaucaaggugagcccccagaccauggacggcauccugaaguccauccugaaggucaagaaggcccucggcauguucaucagcgagaccccgggggagcggaaccccuacgagaacauccuguacaagaucugccuguccggcgacggguggcccuacaucgccagccgcaccuccaucacgggccgggccugggagaacaccgugguggaccucgagagcgacgggaagccccagaaggcgggcuccaacaacagcaacaagucccugcagagcgccggcuucaccgccgggcugaccuacucccagcucaugacgcugaaggacgccaugcugcagcuggacccgaacgccaagaccuggauggacaucgagggccgccccgaggaccccgucgagguggcgcucuaccagcccagcuccgggugcuacauccacuucuuccgggagccgaccgaccugaagcaguucaagcaggacgccaaguacagccacggcaucgacgugaccgaccuguucgccgcccagcccgggcucacguccgccgucaucgacgcgcugccccgcaacauggugaucacgugccagggcagcgacgacaucaagaagcugcucgagagccagggccgcaaggacaucaagcugaucgacaucgcccuguccaagaccgacagccggaaguacgagaacgccgucugggaccaguacaaggaccucugccacaugcacaccggggugguggucgagaagaagaagcgcggcgggaaggaggagaucaccccgcacugcgcccugauggacugcaucauguucgacgcggccguguccggcgggcugaacaccagcgugcuccgggccguccugccccgcgacaugguguuccggaccuccacgccccgcgugguccugugaggacuaguuauaagacugacuagcccgaugggccucccaacgggcccuccuccccuccuugcaccgagauuaaucaaaggcucuuuucagagccaccaaaaaaaaaaaaaaaaaaaaaaaaaaaaaaaaaaaaaaaaaaaaaaaaaaaaaaaaaaaaaaaaaaaaaaaaaaaaaaaaaaaaaaaaaaaaaaaaaaaaa

SEQ ID NO: 19151 - RNA, 1986 nt, Artificial Sequence
  mRNA product Design i-3 (hSL-A100) comprising derived and/or modified sequence from LASV(G502-SLE-2009;Clade IV)__AIT17127__SP-HsPLAT_NP(2-569) (opt1)
aggagaaagcuuaccauggacgccaugaagcgcggccugugcugcgugcuccugcugugcggggccgucuucgugagccccagcgccuccaaggagaucaagagcuuccuguggacccagucccuccgccgggagcugagcggcuacugcuccaacaucaagcuccagguggucaaggacgcccaggcgcugcugcacgggcuggacuucagcgagguguccaacgugcagcgccucaugcggaaggagcgccgggacgacaacgaccugaagcgccugcgggaccucaaccaggccgucaacaaccugguggagcucaagagcacccagcagaaguccauccugcgcgugggcacccugaccagcgacgaccugcucauccuggccgccgaccuggagaagcucaaguccaaggucauccggaccgagcgcccccugagcgccgggguguacaugggcaaccuguccagccagcagcucgaccagcggcgcgcgcugcuguccaugaucgggaugagcggcggcaaccagggggugcgggccggcaaggacggggucgugcgcgugugggacgucaagaacgccgagcuccugaacaaccaguucggcaccaugccgucccugacgcucgccugccugaccaagcagggccagguggaccugaacgacgcggugcaggcccucaccgaccuggggcugaucuacaccgccaaguaccccaacacgagcgaccucgaccggcugacccagucccaccccauccugaacaugaucgacaccaagaaguccagccucaacaucuccggcuacaacuucagccugggggccgccgucaaggcgggcgccugcaugcuggacgggggcaacaugcucgagaccaucaaggugagcccccagacgauggacggcauccucaagagcauccugaaggugaagaaggcccuggggauguucaucuccgacaccccgggcgagcgcaaccccuacgagaacauccuguacaagaucugccugagcggggacggcuggcccuacaucgccucccggaccagcaucaccgggcgcgccugggagaacacggucguggaccucgaguccgacggcaagccccagaaggcgggcagcaacaacuccaacaagagccugcaguccgccggguucaccgccggccugaccuacagccagcucaugacccugaaggacgccaugcugcagcuggacccgaacacgaagaccuggauggacaucgaggggcggcccgaggaccccguggagaucgcccucuaccagcccuccagcggcugcuacauccacuucuuccgcgagccgaccgaccugaagcaguucaagcaggacgcgaaguacucccacgggaucgacgucaccgaccuguucgccgcccagcccggccucacgagcgccgugaucgacgcccugccccggaacauggugaucacgugccagggcuccgacgacauccgcaagcugcucgagagccaggggcgcaaggacaucaagcugaucgacaucgcgcugaacaagaccgacagccggaaguacgagaacgccgucugggaccaguacaaggaccucugccacaugcacaccggcguggucguggagaagaagaagcgcgggggcaaggaggagaucaccccgcacugcgcccugauggacugcaucauguucgacgccgcgguguccgggggccugaacaccagcguccuccgggccgugcugccccgcgacaugguguuccggaccuccacgccccgcgucgugcugugaggacuaguuauaagacugacuagcccgaugggccucccaacgggcccuccuccccuccuugcaccgagauuaaucaaaggcucuuuucagagccaccaaaaaaaaaaaaaaaaaaaaaaaaaaaaaaaaaaaaaaaaaaaaaaaaaaaaaaaaaaaaaaaaaaaaaaaaaaaaaaaaaaaaaaaaaaaaaaaaaaaaa

SEQ ID NO: 19152 - RNA, 1986 nt, Artificial Sequence
  mRNA product Design i-3 (hSL-A100) comprising derived and/or modified sequence from LASV(G733-SLE-2010;Clade IV)__AIT17155__SP-HsPLAT_NP(2-569) (opt1)
aggagaaagcuuaccauggacgccaugaagcgcggccugugcugcgugcuccugcugugcggggccgucuucgugagccccagcgccuccaaggagaucaagagcuuccuguggacccagucccuccgccgggagcugagcggcuacugcuccaacaucaagcuccagguggucaaggacgcccaggcgcugcugcacgggcuggacuucagcgagguguccaacgugcagcgccucaugcggaaggagcgccgggacgacaacgaccugaagcgccugcgggaccucaaccaggccgucaacaaccugguggagcucaagagcacccagcagaaguccgugcugcgcgucggcacccugaccagcgacgagcugcucgugcuggccgccgaccuggagaagcucaaguccaaggugauccggaccgagcgcccccugagcgccggggucuacaugggcaaccuguccagccagcagcucgaccagcggcgcgcgcugcuguccaugaucgggaugagcggcggcaaccagggggcccggaccggccgcgacgggguggugcgggucugggacgugaagaacgccgagcuccugaacaaccaguucggcaccaugccgucccugacccucgccugccugaccaagcagggccagguggaccugaacgacgcgguccaggcccucaccgaccuggggcugaucuacacggccaaguaccccaacaccagcgaccucgaccgccugacccagucccaccccauccugaacaugaucgacaccaagaaguccagccucaacaucuccggcuacaacuucagccugggggccgccgugaaggcgggcgccugcaugcuggacgggggcaacaugcucgagacgaucaaggugagcccccagaccauggacggcauccucaagagcauccugaaggucaagaaggcccuggggauguucaucuccgacaccccgggcgagcggaaccccuacgagaacauccuguacaagaucugccugagcggggacggcuggcccuacaucgccucccgcaccagcaucacggggcgggccugggagaacaccgugguggaccucgaguccgacggcaagccccagaaggcgggcagcaacaacuccaacaagagccugcaguccgccggguucaccgccggccugaccuacagccagcucaugacgcugaaggacgccaugcugcagcuggacccgaacgccaagaccuggauggacaucgaggggcgccccgaggaccccgucgagaucgcgcucuaccagcccuccagcggcugcuacauccacuucuuccgggagccgaccgaccugaagcaguucaagcaggacgccaaguacucccacgggaucgacgugaccgaccuguucgccgcccagcccggccucacgagcgccgugaucgacgcgcugccccgcaacauggucaucacgugccagggcuccgacgacauccgcaagcugcucgagagccaggggcggaaggacaucaagcugaucgacaucgcccugagcaagaucgacucccgcaaguacgagaacgccgugugggaccaguacaaggaccucugccacaugcacaccggcgucgugguggagaagaagaagcgcgggggcaaggaggagaucacgccccacugcgcccugauggacugcaucauguucgacgcggccgucagcgggggccugaacucccucgugcugcgggccgugcugccgcgggacauggucuuccgcaccagcacgccccggguggugcucugaggacuaguuauaagacugacuagcccgaugggccucccaacgggcccuccuccccuccuugcaccgagauuaaucaaaggcucuuuucagagccaccaaaaaaaaaaaaaaaaaaaaaaaaaaaaaaaaaaaaaaaaaaaaaaaaaaaaaaaaaaaaaaaaaaaaaaaaaaaaaaaaaaaaaaaaaaaaaaaaaaaaa

SEQ ID NO: 19153 - RNA, 1986 nt, Artificial Sequence
  mRNA product Design i-3 (hSL-A100) comprising derived and/or modified sequence from MOPV/LASV reassortant(IGS-1;Clade IV)__AFY05578__SP-HsPLAT_NP(2-569) (opt1)
aggagaaagcuuaccauggacgccaugaagcgcggccugugcugcgugcuccugcugugcggggccgucuucgugagccccagcgccuccaaggagaucaagagcuuccuguggacccagucccuccgccgggagcugagcggcuacugcuccaacaucaagcuccagguggucaaggacgcccaggcgcugcugcacgggcuggacuucagcgagguguccaacgugcagcgccucaugcggaaggagcgccgggacgacaacgaccugaagcgccugcgggaccucaaccaggccgucaacaaccugguggagcucaagagcacccagcagaaguccauccugcgcgugggcacccugaccagcgacgaccugcucauccuggccgccgaccuggagaagcuccgguccaaggucauccgcaccgagcggccccugagcgccgggguguacaugggcaaccuguccagccagcagcucgaccagcgccgggcgcugcugaacaugaucgggauguccggcggcaaccagggggcccgcgccggccgggacggggugguccgcgugugggacgugaagaacgccgagcuccugagcaaccaguucggcaccaugccgucccugacgcucgcgugccugaccaagcaggggcaggucgaccugaacgacgccgugcaggcccucaccgaccugggccugaucuacaccgccaaguaccccaacacgagcgaccucgaccggcugacccagucccaccccauccugaacaugaucgacaccaagaaguccagccucaacaucuccggcuacaacuucagccugggggccgcggugaaggccggcgccugcaugcuggacgggggcaacaugcucgagaccaucaaggucagcccccagacgauggacggcauccucaagagcauccugaaggugaagaaggcccuggggauguucaucuccgacaccccgggcgagcgcaaccccuacgagaacauccuguacaagaucugccugagcggggacggcuggcccuacaucgccucccggaccagcaucaccgggcgcgcgugggagaacacgguggucgaccucgaguccgacggcaagccccagaaggccgacagcaacaacuccagcaagucccugcagagcgccggcuucaccgccgggcugaccuacucccagcucaugacccugaaggacgccaugcugcagcuggacccgaacgcgaagacguggauggacaucgagggccggcccgaggaccccguggagaucgcccucuaccagcccagcuccgggugcuacauccacuucuuccgcgagccgaccgaccugaagcaguucaagcaggacgccaaguacagccacggcaucgacgugaccgaccuguucgccacccagcccgggcucacguccgccgucaucgacgcgcugccccgcaacauggugaucacgugccagggcagcgacgacauccggaagcugcucgagagccagggccgcaaggacaucaagcugaucgacaucgaccuguccaagaccgacagccggaaguacgagaacgccgugugggaccaguacaaggaccucugccacaugcacaccggggucguggucgagaagaagaagcgcggcgggaaggaggagaucaccccgcacugcgcccugauggacugcaucauguucgacgccgcgguguccggcgggcugaacaccagcgugcuccgggccguccugccccgcgacaugguguuccggaccuccacgccccgcgugguccugugaggacuaguuauaagacugacuagcccgaugggccucccaacgggcccuccuccccuccuugcaccgagauuaaucaaaggcucuuuucagagccaccaaaaaaaaaaaaaaaaaaaaaaaaaaaaaaaaaaaaaaaaaaaaaaaaaaaaaaaaaaaaaaaaaaaaaaaaaaaaaaaaaaaaaaaaaaaaaaaaaaaaa

SEQ ID NO: 19154 - RNA, 1986 nt, Artificial Sequence
  mRNA product Design i-3 (hSL-A100) comprising derived and/or modified sequence from LASV(LM765-SLE-2012;Clade IV)__AIT17815__SP-HsPLAT_NP(2-569) (opt1)
aggagaaagcuuaccauggacgccaugaagcgcggccugugcugcgugcuccugcugugcggggccgucuucgugagccccagcgccuccaaggagaucaagagcuuccuguggacccagucccuccgccgggagcugagcggcuacugcuccaacaucaagcuccagguggucaaggacgcccaggcgcugcugcacgggcuggacuucagcgagguguccaacgugcagcgccucaugcggaaggagcgccgggacgacaacgaccugaagcgccugcgggaccucaaccaggccgucaacaaccugguggagcucaagagcacccagcagaaguccauccugcgcgugggcacccugaccagcgacgaccugcucauccuggccgccgaccuggagaagcucaaguccaaggucacccggaccgagcgcccccugagcgccgggguguacaugggcaaccuguccagccagcagcucgaccagcggcgcgcgcugcuggacaugaucgggauguccggcagcaaccagggcgcccgggccgggcgcgacggcgugguccgggugugggacgugaagaacgccgagcuccugaacaaccaguucgggacgaugccgucccugacccucgcgugccugaccaagcagggccaggucgaccugaacgacgccgugcaggcccucaccgaccuggggcugaucuacacggccaaguaccccaacaccagcgaccucgaccgccugacccagucccaccccauccugaacaugaucgacaccaagaaguccagccucaacaucuccggcuacaacuucagccugggcgccgcggugaaggccggggccugcaugcuggacggcgggaacaugcucgagacgaucaaggucagcccccagaccauggacggcauccucaagagcauccugaaggugaagaaggcccugggcauguucaucuccgacgccccgggggagcggaaccccuacgagaacauccuguacaagaucugccugagcggcgacggguggcccuacaucgcgucccgcaccagcaucaccggccgggccugggagaacacgguggucgaccucgaguccgacgggaagccccagaaggccggcagcaacggcuccaacaagagccugcaguccgccggguucaccgccggccugaccuacagccagcucaugacccugaaggacgcgaugcugcagcuggacccgaacgccaagacguggauggacaucgaggggcgccccgaggaccccguggagaucgcccucuaccagcccuccagcggcugcuacauccacuucuuccgggagccgaccgaccugaagcaguucaagcaggacgccaaguacucccacgggaucgacgugaccgaccuguucgccgcgcagcccggccucaccagcgccgucaucgacgcccugccccgcaacauggugaucacgugccagggcuccgacgacauccgcaagcuguucgagagccaggggcggaaggacaucaagcucaucgacaucgcccugagcaagaccgacucccgcaaguacgagaacgcggugugggaccaguacaaggaccugugccacaugcacaccggcaucgucguggagaagaagaagcgcgggggcaaggaggagaucacgccccacugcgcccucauggacugcaucauguucgacgccgccgucagcgggggccugaacaccuccgugcugcgggccgugcucccgcgggacauggucuuccgcaccagcacgccccggguggugcugugaggacuaguuauaagacugacuagcccgaugggccucccaacgggcccuccuccccuccuugcaccgagauuaaucaaaggcucuuuucagagccaccaaaaaaaaaaaaaaaaaaaaaaaaaaaaaaaaaaaaaaaaaaaaaaaaaaaaaaaaaaaaaaaaaaaaaaaaaaaaaaaaaaaaaaaaaaaaaaaaaaaaa

SEQ ID NO: 19155 - RNA, 1986 nt, Artificial Sequence
  mRNA product Design i-3 (hSL-A100) comprising derived and/or modified sequence from LASV(LM776-SLE-2012;Clade IV)__AIT17825__SP-HsPLAT_NP(2-569) (opt1)
aggagaaagcuuaccauggacgccaugaagcgcggccugugcugcgugcuccugcugugcggggccgucuucgugagccccagcgccuccaaggagaucaagagcuuccuguggacccagucccuccgccgggagcugagcuccuacugcagcaacaucaagcuccagguggucaaggacgcccaggcgcugcugcacggccuggacuucuccgaggugagcaacgugcagcgccucaugcggaaggagcgccgggacgacaacgaccugaagcgccugcgggaccucaaccaggccgucaacaaccugguggagcugaaguccacccagcagaaguccauccuccgcguggggacccugaccuccgacgaccugcucauccuggccgccgaccuggagaagcucaagagcaaggucacccggaccgagcgcccccuguccgccggcguguacauggggaaccugagcucccagcagcucgaccagcggcgcgcgcugcugagcaugaucggcauguccgggagcaaccagggcgcccgggccggccgcgacggggugguccgggugugggacgugaagaacgccgagcuccugaacaaccaguucggcacgaugccgucccugacccucgcgugccugaccaagcaggggcaggucgaccugaacgacgccgugcaggcccucaccgaccugggccugaucuacacggccaaguaccccaacaccagcgaccucgaccgccugacccagagccaccccauccugaacaugaucgacaccaagaaguccagccucaacaucuccggguacaacuucagccugggcgccgcggugaaggccggcgccugcaugcuggacgggggcaacaugcucgagacgaucaaggucagcccccagaccauggacgggauccucaagagcauccugaaggugaagaaggcccugggcauguucaucuccgacaccccgggcgagcggaaccccuacgagaacauccuguacaagaucugccugagcggggacggcuggcccuacaucgccucccgcaccagcaucacggggcgggcgugggagaacaccguggucgaccucgaguccgacggcaagccccagaaggccgggagcaacaacuccaacaagagccugcaguccgccggcuucaccgccggccugaccuacagccagcucaugacgcugaaggacgccaugcugcagcuggacccgaacgcgaagaccuggauggacaucgaggggcgccccgaggaccccguggagguggcccucuaccagcccuccagcggcugcuacauccacuucuuccgggagccgaccgaccugaagcaguucaagcaggacgccaaguacucccacgggaucgacgucaccgaccuguucgccgcccagcccggccucacgagcgcggugaucgacgcccugccccgcaacauggugaucacgugccaggggagcgacgacauccgcaagcugcucgagucccagggccggaaggacaucaagcugaucgacaucgcccugagcaagaccgacucccgcaaguacgagaacgccgucugggaccaguacaaggaccucugccacaugcacaccggcguggucguggagaagaagaagcgcgggggcaaggaggagaucaccccgcacugcgcgcugauggacugcaucauguucgacgccgccgugagcgggggccugaacaccuccguccuccgggccgugcugccccgggacaugguguuccgcaccagcacgccccgggucgugcugugaggacuaguuauaagacugacuagcccgaugggccucccaacgggcccuccuccccuccuugcaccgagauuaaucaaaggcucuuuucagagccaccaaaaaaaaaaaaaaaaaaaaaaaaaaaaaaaaaaaaaaaaaaaaaaaaaaaaaaaaaaaaaaaaaaaaaaaaaaaaaaaaaaaaaaaaaaaaaaaaaaaaa

SEQ ID NO: 19156 - RNA, 1986 nt, Artificial Sequence
  mRNA product Design i-3 (hSL-A100) comprising derived and/or modified sequence from LASV(Mad39;Clade IV)__ANH09723__SP-HsPLAT_NP(2-569) (opt1)
aggagaaagcuuaccauggacgccaugaagcgcggccugugcugcgugcuccugcugugcggggccgucuucgugagccccagcgccuccaaggagaucaagagcuuccuguggacccagucccuccgccgggagcugagcggcuacugcuccaacaucaagcuccagguggucaaggacgcccaggcgcugcugcacgggcuggacuucagcgagguguccaacgugcagcgccucaugcggaagcagcgccgggacgacaacgaccugaagcgccugcgggaccucaaccaggccgucaacaaccugguggagcugaaguccacccagcagaaguccgugcuccgcgucggcacgcugaccagcgacgaccugcucacccuggccgccgaccuggagaagcucaaguccaaggugacccggacggagcgcccccugaccgccgggguguacaugggcaaccugagcucccagcagcucgaccagcggcgcgcgcugcugaacaugaucgggaugagcggcggcaaccagggggcccggaccggccgcgacggggucgugcgggugugggacgucaagaacgccgagcuccugaacaaccaguucggcaccaugccgucccugacgcucgccugccugaccaagcagggccagguggaccugaacgacgugguccaggcgcucaccgaccuggggcugaucuacaccgccaaguaccccaacacgagcgaccucgaccgccugacccagucccaccccauccugaacaugaucgacaccaacaagagcucccucaacaucagcggcuacaacuucagccugggggccgccgugaaggccggcgcgugcaugcuggacgggggcaacaugcucgagaccaucaaggugagcccccagacgauggacggcauccucaagagcauccugaaggucaagaagucccuggggauguucaucagcgacaccccgggcgagcggaaccccuacgagaacauccuguacaagaucugccuguccggggacggcuggcccuacaucgccagccgcaccuccaucaccgggcgggccugggagaacacggugguggaccucgagagcggcggcaagccccagaaggccggguccaacaacagcaacaagucccugcagagcgccggcuucgcggccgggcugaccuacucccagcucaugacccugaaggacgccaugcugcagcuggacccgaacgccaagaccuggauggacaucgagggccgccccgaggaccccgucgagaucgcccucuaccagcccaucagcgggugcuacauccacuucuuccgggagccgacggaccugaagcaguucaagcaggacgcgaaguacucccacggcaucgacgugaccgaccuguucgccgcccagcccggccucaccagcgccgugaucgaggcccugccccgcaacauggucaucacgugccagggguccgacgacauccgcaagcuguucgagagccagggccggaaggacaucaagcucaucgacaucgcgcuguccaagaccgacagccgcaaguacgagaacgccgugugggaccaguacaaggaccugugccacaugcacaccggggucgugguggagaagaagaagaagggcgggaaggaggagaucacgccccacugcgcccucauggacugcaucauguucgacgccgcggucagcggcggccugaacacccuggugcuccgggccgugcugccgcgcgacauggucuuccggaccuccacccccaagguggugcugugaggacuaguuauaagacugacuagcccgaugggccucccaacgggcccuccuccccuccuugcaccgagauuaaucaaaggcucuuuucagagccaccaaaaaaaaaaaaaaaaaaaaaaaaaaaaaaaaaaaaaaaaaaaaaaaaaaaaaaaaaaaaaaaaaaaaaaaaaaaaaaaaaaaaaaaaaaaaaaaaaaaaa

SEQ ID NO: 19157 - RNA, 1986 nt, Artificial Sequence
  mRNA product Design i-3 (hSL-A100) comprising derived and/or modified sequence from LASV(Z0947-SLE-2011;Clade IV)__AIT17841__SP-HsPLAT_NP(2-569) (opt1)
aggagaaagcuuaccauggacgccaugaagcgcggccugugcugcgugcuccugcugugcggggccgucuucgugagccccagcgccuccaaggagaucaagagcuuccuguggacccagucccuccgccgggagcugagcggcuacugcuccaacaucaagcuccagguggucaaggacgcccaggcgcugcugcacgggcuggacuucagcgagguguccaacgugcagcgccucaugcggaaggagcgccgggacgacaacgaccugaagcgccugcgggaccucaaccaggccgucaacaaccugguggagcucaagagcacccagcagaaguccauccugcgcgugggcacccugaccagcgacgaccugcucauccuggccgccgaccuggagaagcucaaguccaaggucacccggaccgagcgcccccugagcgccgggguguacaugggcaaccuguccagccagcagcucgaccagcggcgcgcgcugcugaacaugaucgggauguccggcagcaaccagggcgcccggacggggcgcgacggcgugguccgggugugggacgugaagaacgccgagcuccugaacaaccaguucgggaccaugccgucccugacccucgccugccugaccaagcagggccaggucgaccugaacgacgcggugcaggcccucacggaccuggggcugaucuacaccgccaaguaccccaacaccagcgaccucgaccgccugacccagucccaccccauccugaacaugaucgacacgaagaaguccagccucaacaucuccggcuacaacuucagccugggcgccgccgugaaggcgggggccugcaugcuggacggcgggaacaugcucgagaccaucaaggucagcccccagaccauggacggcauccucaagagcauccugaaggugaagaaggcccugggcauguucaucuccgacgccccgggggagcggaaccccuacgagaacauccuguacaagaucugccugagcggcgacggguggcccuacaucgccucccgcaccagcaucacgggccgggcgugggagaacaccguggucgaccucgaguccgacgggaagccccagaaggccggcagcaacggcuccaacaagagccugcaguccgccggguucaccgccggccugaccuacagccagcucaugacgcugaaggacgccaugcugcagcuggacccgaacgcgaagaccuggauggacaucgaggggcgccccgaggaccccguggagaucgcccucuaccagcccuccagcggcugcuacauccacuucuuccgggagccgaccgaccugaagcaguucaagcaggacgccaaguacucccacgggaucgacgugaccgaccuguucgccgcccagcccggccucacgagcgcggucaucgacgcccugccccgcaacauggugaucacgugccagggcuccgacgacauccgcaagcuguucgagagccaggggcggaaggacaucaagcucaucgacaucgcccugagcaagaccgacucccgcaaguacgagaacgccgugugggaccaguacaaggaccugugccacaugcacaccggcaucgucguggagaagaagaagcgcgggggcaaggaggagaucaccccgcacugcgcgcucauggacugcaucauguucgacgccgccgucagcgggggccugaacaccuccgugcugcgggccgugcucccccgggacauggucuuccgcaccagcacgccccggguggugcugugaggacuaguuauaagacugacuagcccgaugggccucccaacgggcccuccuccccuccuugcaccgagauuaaucaaaggcucuuuucagagccaccaaaaaaaaaaaaaaaaaaaaaaaaaaaaaaaaaaaaaaaaaaaaaaaaaaaaaaaaaaaaaaaaaaaaaaaaaaaaaaaaaaaaaaaaaaaaaaaaaaaaa

SEQ ID NO: 19158 - RNA, 1986 nt, Artificial Sequence
  mRNA product Design i-3 (hSL-A100) comprising derived and/or modified sequence from LASV(Josiah;Clade IV)__NP_694869__SP-HsPLAT_NP(2-569) (opt4)
aggagaaagcuuaccauggacgccaugaagagaggccugugcugcgugcugcugcugugcggcgccguguucgugagccccagcgccagcaaggagaucaagagcuuccuguggacccagagccugagaagagagcugagcggcuacugcagcaacaucaagcugcagguggugaaggacgcccaggcccugcugcacggccuggacuucagcgaggugagcaacgugcagagacugaugagaaaggagagaagagacgacaacgaccugaagagacugagagaccugaaccaggccgugaacaaccugguggagcugaagagcacccagcagaagagcauccugagagugggcacccugaccagcgacgaccugcugauccuggccgccgaccuggagaagcugaagagcaaggugaucagaaccgagagaccccugagcgccggcguguacaugggcaaccugagcagccagcagcuggaccagagaagagcccugcugaacaugaucggcaugagcggcggcaaccagggcgccagagccggcagagacggcguggugagagugugggacgugaagaacgccgagcugcugaacaaccaguucggcaccaugcccagccugacccuggccugccugaccaagcagggccagguggaccugaacgacgccgugcaggcccugaccgaccugggccugaucuacaccgccaaguaccccaacaccagcgaccuggacagacugacccagagccaccccauccugaacaugaucgacaccaagaagagcagccugaacaucagcggcuacaacuucagccugggcgccgccgugaaggccggcgccugcaugcuggacggcggcaacaugcuggagaccaucaaggugagcccccagaccauggacggcauccugaagagcauccugaaggugaagaaggcccugggcauguucaucagcgacacccccggcgagagaaaccccuacgagaacauccuguacaagaucugccugagcggcgacggcuggcccuacaucgccagcagaaccagcaucaccggcagagccugggagaacaccgugguggaccuggagagcgacggcaagccccagaaggccgacagcaacaacagcagcaagagccugcagagcgccggcuucaccgccggccugaccuacagccagcugaugacccugaaggacgccaugcugcagcuggaccccaacgccaagaccuggauggacaucgagggcagacccgaggaccccguggagaucgcccuguaccagcccagcagcggcugcuacauccacuucuucagagagcccaccgaccugaagcaguucaagcaggacgccaaguacagccacggcaucgacgugaccgaccuguucgccacccagcccggccugaccagcgccgugaucgacgcccugcccagaaacauggugaucaccugccagggcagcgacgacaucagaaagcugcuggagagccagggcagaaaggacaucaagcugaucgacaucgcccugagcaagaccgacagcagaaaguacgagaacgccgugugggaccaguacaaggaccugugccacaugcacaccggcguggugguggagaagaagaagagaggcggcaaggaggagaucaccccccacugcgcccugauggacugcaucauguucgacgccgccgugagcggcggccugaacaccagcgugcugagagccgugcugcccagagacaugguguucagaaccagcacccccagaguggugcugugaggacuaguuauaagacugacuagcccgaugggccucccaacgggcccuccuccccuccuugcaccgagauuaaucaaaggcucuuuucagagccaccaaaaaaaaaaaaaaaaaaaaaaaaaaaaaaaaaaaaaaaaaaaaaaaaaaaaaaaaaaaaaaaaaaaaaaaaaaaaaaaaaaaaaaaaaaaaaaaaaaaaa

SEQ ID NO: 19159 - RNA, 1986 nt, Artificial Sequence
  mRNA product Design i-3 (hSL-A100) comprising derived and/or modified sequence from LASV(LP;Clade I)__AAF86702__SP-HsPLAT_NP(2-569) (opt4)
aggagaaagcuuaccauggacgccaugaagagaggccugugcugcgugcugcugcugugcggcgccguguucgugagccccagcaacagcaaggagaucaagagcuuccuguggacccagagccugagaagagagcugagcggcuacugcagcaacaucaagcugcagguggugaaggacgcccaggcccugcugcacggccuggacuucagcgaggugagcaacgugcagagacugaugagaaagcagaagagagacgacgccgaccugaagagacugagagaccugaaccaggccgugaacaaccugguggagcugaagagcacccagcagaagaacgugcugagagugggcacccugagcagcgacgaccugaucacccuggccgccgaccuggagaagcugaagagcaaggugaucagaaccgagagaccccugagcagcggcguguacaugggcaaccugagcagccagcagcuggaccagagaagagcccugcugagcaugaucggcaugagcggcggcccccagggcaacagaaccggcggcgacggcguggugagagugugggacgugaagaacgccgagcugcugaacaaccaguucggcaccaugcccagccugacccuggccugccugaccaagcagggccagguggaccugaacgacgccgugcaggcccugaccgaccugggccugaucuacaccgccaaguaccccaacagcagcgaccuggacaugcugacccagagccaccccauccugggcaugguggacaccaagaagagcagccugaacaucagcggcuacaacuucagccugggcgccgccgugaaggccggcgccugcaugcuggacggcggcaacaugcuggagaccaucaaggugagcccccagaccauggacggcauccugaagagcauccugaaggugaagagaagccugggcauguucaucagcgacacccccggcgagagaaaccccuacgagaacauccuguacaagaucugccugagcggcgagggcuggcccuacaucgccagcagaaccagcaucaccggcagagccugggagaacacccugguggaccuggagagcgacaacaagccccccaagcugaacagcgccggcagcaacaagagccugcaggccgccggccugaacgccggccugaccuacagccagcugaugacccugaaggacugcaugcugcagcuggaccccagcagcaagaccuggaucgacaucgagggcagacccgaggaccccguggagaucgcccuguuccagcccagcagcggcugcuacauccacuucuucagagagcccaccgaccugaagcaguucaagcaggacgccaaguacagccacggcaucgacgugaccgaccuguucagcacccagcccggccugaccagcgccgugaucgaggcccugcccagaaacauggugcugaccugccagggcagcgacgacaucaagaagcugcuggagagccagggcagaagagacaucaagcugaucgacaucagccugagcaaggccgacagcagaaaguucgagaacgccgugugggaccaguacaaggaccugugccacaugcacaccggcguggugguggagaagaagaagagaggcggcaaggaggagaucaccccccacugcgcccugcuggacugcaucauguucgacgccgccaccaccggcagccugaacaucaccacccugagagccgugcugcccagagacaugguguucagaaccagcacccccaagguggugcugugaggacuaguuauaagacugacuagcccgaugggccucccaacgggcccuccuccccuccuugcaccgagauuaaucaaaggcucuuuucagagccaccaaaaaaaaaaaaaaaaaaaaaaaaaaaaaaaaaaaaaaaaaaaaaaaaaaaaaaaaaaaaaaaaaaaaaaaaaaaaaaaaaaaaaaaaaaaaaaaaaaaaa

SEQ ID NO: 19160 - RNA, 1986 nt, Artificial Sequence
  mRNA product Design i-3 (hSL-A100) comprising derived and/or modified sequence from LASV(803213;Clade II)__AAF86704__SP-HsPLAT_NP(2-569) (opt4)
aggagaaagcuuaccauggacgccaugaagagaggccugugcugcgugcugcugcugugcggcgccguguucgugagccccagcgccagcaaggaggugaagagcuuccuguggacccagagccugagaagagagcugagcggcuacugcagcaacaucaagcugcagguggugaaggacgcccaggcccugcugcacggccuggacuucagcgaggugaacaacgugcagagacugaugagaaagcagaagagagacgacggcgaccugaagagacugagagaccugaaccaggccgugaacaaccugguggagcugaagagcacccagcagaagagcauccugagagugggcacccugaccagcgacgaccugcugacccuggccgccgaccuggagaagcugaagagcaaggugaucagaaccgagagaccccugagcagcggcguguacaugggcaaccugagcacccagcagcuggagcagagaagagcccugcugaacaugaucggcauggugggcggcgcccagggcacccagcccggcagagacggcguggugagagugugggacgugaagaaccccgaccugcugaacaaccaguucggcaccaugcccagccugacccuggccugccugaccaagcagggccagguggaccugaacgacgccgugcuggcccugaccgaccugggccugaucuacaccgccaaguaccccaacagcagcgaccuggacagacugagccagagccaccccauccugaacaugguggacaccaagaagagcagccugaacaucagcggcuacaacuucagccugggcgccgccgugaaggccggcgccugcaugcuggacggcggcaacaugcuggagaccaucaaggugaccccccagaccauggacggcauccugaagagcauccugaaggugaagagaagccugggcauguucgugagcgacacccccggcgagagaaaccccuacgagaacauccuguacaagaucugccugagcggcgacggcuggcccuacaucgccagcagaaccagcaucgugggcagagccugggagaacaccaccguggaccuggagagcgacggcaagccccagaaggugggcaccgccggcagcaacaagagccugcagagcgccggcuuccccaccggccugaccuacagccagcugaugacccugaaggacagcaugaugcagcuggaccccagcgccaagaccuggaucgacaucgagggcagacccgaggaccccguggagaucgcccuguaccagcccaugagcggcugcuacauccacuucuucagagagcccaccgaccugaagcaguucaagcaggacgccaaguacagccacggcaucgacguggccgaccuguuccccgcccagcccggccugaccagcgccgugaucgaggcccugcccagaaacauggugcugaccugccagggcagcgacgacaucaagaagcugcuggacagccagggcagaagagacaucaagcugaucgacaucagccugagcaagguggacagcagaaaguucgagaacgccgugugggaccagugcaaggaccugugccacaugcacaccggcguggugguggagaagaagaagagaggcggcaaggaggagaucaccccccacugcgcccugauggacugcaucauguucgacgccgccgugagcggcggccugaacauccccgugcugagagccgugcugcccagagacaugguguucagaaccagcagccccaagguggugcugugaggacuaguuauaagacugacuagcccgaugggccucccaacgggcccuccuccccuccuugcaccgagauuaaucaaaggcucuuuucagagccaccaaaaaaaaaaaaaaaaaaaaaaaaaaaaaaaaaaaaaaaaaaaaaaaaaaaaaaaaaaaaaaaaaaaaaaaaaaaaaaaaaaaaaaaaaaaaaaaaaaaaa

SEQ ID NO: 19161 - RNA, 1989 nt, Artificial Sequence
  mRNA product Design i-3 (hSL-A100) comprising derived and/or modified sequence from LASV(GA391;Clade III)__CAA36646__SP-HsPLAT_NP(2-570) (opt4)
aggagaaagcuuaccauggacgccaugaagagaggccugugcugcgugcugcugcugugcggcgccguguucgugagccccagcgccagcaaggaggugagaagcuuccuguggacccagagccugagaagagagcugagcggcuacugcagcaacaucaagcugcagguggugaaggacgcccaggcccugcugcacggccuggacuucagcgaggugagcaacgugcagagacugaugagaaagcagaagagagacgacggcgaccugaagagacugagagaccugaaccaggccgugaacaaccugguggagcugaagagcacccagcagaagagcgugcugagagugggcacccugagcagcgacgaccugcugauccuggccgccgaccuggagaagcugaagagcaaggugaccagaaccgagagaccccugagcagcggcguguacaugggcaaccugagcagccagcagcuggaccagagaagagcccugcugaacaugaucggcaugaccggcgugagcggcggcggcaagggcgccagcgacggcaucgugagagugugggacgugaagaacgccgagcugcugaacaaccaguucggcaccaugcccagccugacccuggccugccugaccaagcagggccagguggaccugaacgacgccgugcaggcccugaccgaccugggccugaucuacaccgccaaguaccccaacagcagcgaccuggacagacugagccagagccaccccauccugaacaugaucgacaccaagaagagcagccugaacaucagcggcuacaacuucagccugggcgccgccgugaaggccggcgccugcaugcuggacggcggcaacaugcuggagaccaucaaggugagcccccagaccauggacggcauccugaagagcauccugaaggugaagaagagccugggcauguucgugagcgacacccccggcgagagaaaccccuacgagaacauccuguacaagaucugccugagcggcgacggcuggcccuacaucgccagcagaaccagcaucgugggcagagccugggagaacaccgugguggaccuggagcaggacaacaagccccagaagaucggcaacggcggcagcaacaagagccugcagagcgccggcuucgccgccggccugaccuacagccagcugaugacccugaaggacuucaagugcuucaaccugauccccaacgccaagaccuggauggacaucgagggcagacccgaggaccccguggagaucgcccuguaccagcccagcagcggcugcuacgugcacuucuucagagagcccaccgaccugaagcaguucaagcaggacgccaaguacagccacggcaucgacgugaccgaccuguucgccgcccagcccggccugaccagcgccgugaucgaggcccugcccagaaacauggugaucaccugccagggcagcgaggacaucagaaagcugcuggagagccagggcagaagagacaucaagcugaucgacaucacccugagcaaggccgacagcagaaaguucgagaacgccgugugggaccaguucaaggaccugugccacaugcacaccggcguggugguggagaagaagaagagaggcggcaaggaggagaucaccccccacugcgcccugauggacugcaucauguucgacgccgccgugagcggcggccuggacgccaaggugcugagaguggugcugcccagagacaugguguucagaaccagcacccccaagguggugcugugaggacuaguuauaagacugacuagcccgaugggccucccaacgggcccuccuccccuccuugcaccgagauuaaucaaaggcucuuuucagagccaccaaaaaaaaaaaaaaaaaaaaaaaaaaaaaaaaaaaaaaaaaaaaaaaaaaaaaaaaaaaaaaaaaaaaaaaaaaaaaaaaaaaaaaaaaaaaaaaaaaaaa

SEQ ID NO: 19162 - RNA, 1986 nt, Artificial Sequence
  mRNA product Design i-3 (hSL-A100) comprising derived and/or modified sequence from LASV(AV;Clade V)__CCA30315__SP-HsPLAT_NP(2-569) (opt4)
aggagaaagcuuaccauggacgccaugaagagaggccugugcugcgugcugcugcugugcggcgccguguucgugagccccagcgccagcaaggaggugaagagcuuccuguggacccagagccugagaagagagcugagcggcuacugcagcaacaucaagcugcagguggugaaggacgcccaggcccugcugcacggccuggacuucagcgaggugagcaacgugcagagacugaugagaaagcagagaagagacgacagcgaccugaagagacugagagaccugaaccaggccgugaacaaccugguggagcugaagagcacccagcagaagagcgugcugagagugggcacccugagcagcgacgaccugcugacccuggccgccgaccuggagaagcugaagagcaaggugaccagaaccgagagaccccugagcagcggcguguacaugggcaaccugagcagccagcagcuggaccagagaagagcccugcugaaccugaucggcaugaccaacggcagccagggcagccaggccggcagagacggcguggugagagugugggacgugaagaacgccgagcugcugaacaaccaguucggcaccaugcccagccugacccuggccugccugaccaagcagggccagguggaccugaacgacguggugcaggcccugaccgaccugggccugaucuacaccgccaaguaccccaacaccagcgaccuggacagacugacccagagccaccccauccugaacaugaucgacaccaagaagagcagccugaacaucagcggcuacaacuucagccugggcgccgccgugaaggccggcgccugcaugcuggacggcggcaacaugcuggagaccaucaaggugagcccccagagcauggacggcauccugaagagcauccugaaggugaagagagcccugggcauguucgugagcgacacccccggcgagagaaaccccuacgagaacauccuguacaagaucugccugagcggcgacggcuggcccuacaucgccagcagaaccagcaucgugggcagagccugggagaacaccgugguggaccuggagaccgacggcaagccccagaagaucggcagcggcaacagcaacaagagccugcagagcgccggcuucagcgccggccugaccuacagccagcugaugacccugaaggacgccaugcugcagcuggaccccaacgccaagaccuggauggacaucgagggcagacccgaggaccccguggagguggcccuguaccagcccaucagcggcugcuacauccacuucuucagagagcccaccgaccugaagcaguucaagcaggacgccaaguacagccacggcaucgacaucgccgaccuguucgccgcccagcccggccugaccagcgccgugaucgaggcccugcccagaaacauggugaucaccugccagggcagcgaggacaucaagaagcugcuggagagccagggcagaaaggacaucaagcugaucgacaucgcccugagcaagaucgacagcagaaaguucgagaacgccgugugggaccaguacaaggaccugugccacaugcacaccggcguggugguggagaagaagaagagaggcggcaaggaggagaucaccccccacugcgcccugauggacugcaucauguucgacgccgccgugagcggcggccugaacacccuggugcugagagccgugcugcccagagacaugguguucagaaccagcacccccagaguggugcugugaggacuaguuauaagacugacuagcccgaugggccucccaacgggcccuccuccccuccuugcaccgagauuaaucaaaggcucuuuucagagccaccaaaaaaaaaaaaaaaaaaaaaaaaaaaaaaaaaaaaaaaaaaaaaaaaaaaaaaaaaaaaaaaaaaaaaaaaaaaaaaaaaaaaaaaaaaaaaaaaaaaaa

SEQ ID NO: 19163 - RNA, 1986 nt, Artificial Sequence
  mRNA product Design i-3 (hSL-A100) comprising derived and/or modified sequence from LASV(Togo/2016/7082;Clade VI)__AMR44578__SP-HsPLAT_NP(2-569) (opt4)
aggagaaagcuuaccauggacgccaugaagagaggccugugcugcgugcugcugcugugcggcgccguguucgugagccccagcaacagcaaggaggugaagagcuuccuguggacccagagccugagaagagagcugagcggcuacugcagcaacaucaagcugcagguggugaaggacgcccaggcccugcugcacggccuggacuucagcgaggugagcaacgugcagagacugaugagaaagcagaagagagacgacggcgaccugaagagacugagagaccugaaccaggccgugaacaaccugguggagcugaagagcgugcagcagaagagcauccugagagugggcacccugaccagcgacgaccugcugacccuggccgccgaccuggagaagcugaagagcaaggugaccagaaccgagagaccccugagcagcggcguguacaugggcaaccugagcagccagcagcuggaccagagaagagcccugcugagcaugaucggcaugagcggcggcaaccagaacagccagcccaagggcgacggcguggugagagugugggacgugaagaacgccgaccugcugaacaaccaguucggcaccaugcccagccugacccuggccugccugaccaagcagggccagguggaccugaacgacgccgugcaggcccugaccgaccugggccugaucuacaccgccaaguaccccaacagcagcgaccuggacagacugagccagagccaccccauccugaacaugaucgacaccaagaagagcagccugaacaucagcggcuacaacuucagccugggcgccgccaucaagaccggcgccugcaugcuggacggcggcaacaugcuggagaccaucaaggugaccccccagaccauggacggcauccugaagagcauccugaaggugaagagaagccugggcauguucaucagcgacacccccggcgagagaaaccccuacgagaacauccuguacaagaucugccugagcggcgacggcuggcccuacaucgccagcagaaccgccaucaucggcagagccugggagaacaccgugguggaccuggagagcgacagcaagccccagaagaucggcagcaacggcagcaacaagagccugcagagcgccggcuucgcccccggccugaccuacagccagcugaugacccugaaggacagcaugcugcagcuggaccccaacgccaagaccuggaucgacaucgagggcagacccgaggaccccguggagguggcccuguuccagcccaucagcggcugcuacauccacuucuucagagagcccaccgaccugaagcaguucaagcaggacgccaaguacagccacggcaucgacgugaccgaccuguucgccgcccagcccggccugaccagcgccgugaucgaggcccugcccagaaacauggugcugaccugccagggcagcgacgacaucaagaagcugcuggacagccagggcagaagagacaucaagcugaucgacgugagccugaacaagaucgacagcagaaaguucgagaacgccgugugggaccaguacaaggaccugugccacaugcacaccggcguggugguggagaagaagaagaagggcggcaaggaggagaucaccccccacugcgcccugcuggacugcaucauguucgacgccgccgugagcggcggccugaacgccaccgugcugagagccgugcugcccagagacaugguguucagaaccagcagccccaagguggugcugugaggacuaguuauaagacugacuagcccgaugggccucccaacgggcccuccuccccuccuugcaccgagauuaaucaaaggcucuuuucagagccaccaaaaaaaaaaaaaaaaaaaaaaaaaaaaaaaaaaaaaaaaaaaaaaaaaaaaaaaaaaaaaaaaaaaaaaaaaaaaaaaaaaaaaaaaaaaaaaaaaaaaa

SEQ ID NO: 19164 - RNA, 1986 nt, Artificial Sequence
  mRNA product Design i-3 (hSL-A100) comprising derived and/or modified sequence from LASV(KAK-428;Clade n.d. (VII))__ANH09741__SP-HsPLAT_NP(2-569) (opt4)
aggagaaagcuuaccauggacgccaugaagagaggccugugcugcgugcugcugcugugcggcgccguguucgugagccccagcaacagcaaggaggugaagagcuuccuguggacccagagccugagaagagagcugagcggcuacugcaccaacaucaagcugcagguggugaaggacgcccaggcccugcugcacggccuggacuucagcgaggugagcaacgugcagagacugaugagaaagcagaagagagacgacaacgaccugaagagacugagagaccugaaccaggccgugaacaaccugguggagcugaagagcgugcagcagaagagcgugcugaaggugggcacccugaacagcgacgaccugcugacccuggccgccgaccuggagaagcugaagagcaagguggugagaaccgagagaccccugagcagcggcguguacaugggcaaccugagcagccagcagcuggaccagagaagagcccugcugaacaugaucggcauggccggcggcagccagggcaaccagcccagcagagacggcguggugagagugugggacgugaagaacgccgaccugcugaacaaccaguucggcaccaugcccagccugacccuggccugccugaccaagcagggccagguggaccugaacgacguggugcuggcccugaccgaccugggccugaucuacaccgccaaguaccccaacagcagcgaccuggacagacugagccagaaccaccccgugcugaacaugaucgacgugaacaagagcagccugaacaucagcggcuacaacuucagccugggcgccgccgugaaggccggcgccugcaugcuggacggcggcaacaugcuggagaccaucaagaucagcccccagaccguggacggcauccugaagagcauccugaaggugaagagagcccugggcauguucgugagcgacacccccggcgagagaaaccccuacgagaacauccuguacaaggugugccugagcggcaacggcuggcccuacaucgccagcagaaccagcaucgugggcagagccugggagaacaccgugguggaccuggagagcaacaagaaccagcccaaggugggcaacaacggcagcaacaagaugcugcagagcagcggcuucgccaccggccugaccuacagccagcugaugacccugagagacagcaugcugcagcuggaccccaccgccaagaccuggaucgacaucgagggcagacccgaggaccccguggagcuggcccuguuccagcccagcagcggcugcuacauccacuucuucagagagcccaccgaccugaagcaguucaagcaggacgccaaguacagccacggcaucgacgugaacgaccuguucagcgcccagcccggccugaccagcgccgugcuggaggcccugcccagaaacauggugcugaccugccagggcagcgacgacaucagaaagcugcuggacagccaggacagaaaggacaucaagcugaucgacaucagccugagcaaggccgacgccagaaaguucgagaacgacgugugggaccaguucaaggaccugugccacaugcacaccggcaucgugguggagaagaagaagaagggcggcaagcaggagaugaccccccacugcgcccugcuggacugcaucauguucgacgccgccgugagcggcggccugaacgugcccacccugagagccgugcugcccaccgacaugguguucagaaccaucaccaccaagguggugcugugaggacuaguuauaagacugacuagcccgaugggccucccaacgggcccuccuccccuccuugcaccgagauuaaucaaaggcucuuuucagagccaccaaaaaaaaaaaaaaaaaaaaaaaaaaaaaaaaaaaaaaaaaaaaaaaaaaaaaaaaaaaaaaaaaaaaaaaaaaaaaaaaaaaaaaaaaaaaaaaaaaaaa

SEQ ID NO: 19165 - RNA, 1986 nt, Artificial Sequence; identical to SEQ ID NO: 19159
  mRNA product Design i-3 (hSL-A100) comprising derived and/or modified sequence from LASV(Pinneo-NIG-1969;Clade I)__AIT17837__SP-HsPLAT_NP(2-569) (opt4)

SEQ ID NO: 19166 - RNA, 1986 nt, Artificial Sequence
  mRNA product Design i-3 (hSL-A100) comprising derived and/or modified sequence from LASV(ISTH0009-NIG-2011;Clade II)__AIT17405__SP-HsPLAT_NP(2-569) (opt4)
aggagaaagcuuaccauggacgccaugaagagaggccugugcugcgugcugcugcugugcggcgccguguucgugagccccagcgugagcaaggaggugaagagcuuccuguggacccagagccugagaagagagcugagcggcuacugcagcaacaucaagcugcagguggugaaggacgcccaggcccugcugcacggccuggacuucagcgaggugagcaacgugcagagacugaugagaaagcagaagagagacgacagcgaccugaagagacugagagaccugaaccaggccgugaacaaccugguggagcugaagagcacccagcagaagagcauccugagagugggcacccugaccagcgacgaccugcugacccuggccgccgaccuggagaagcugaagagcaaggugaucagaaccgagagaccccugagcagcggcguguacaugggcaaccugagcacccagcagcuggagcagagaagagcccugcugaacaugaucggcauggugggcggcgcccagggcacccagcccggcagagacggcguggugagagugugggacgugaagaaccccgaccugcugaacaaccaguucggcaccaugcccagccugacccuggccugccugaccaagcagggccagguggaccugaacgacgccgugcuggcccugaccgaccugggccugaucuacaccgccaaguaccccaacagcagcgaccuggacagacugagccagagccaccccauccugaacaugguggacaucaagaagagcagccugaacaucagcggcuacaacuucagccugggcgccgccgugaaggccggcgccugcaugcuggacggcggcaacaugcuggagaccaucaaggugaccccccagaccauggacggcauccugaagagcauccugaaggugaagagaagccugggcauguucgugagcgacacccccggcgagagaaaccccuacgagaacauccuguacaagaucugccugagcggcgacggcuggcccuacaucgccagcagaaccagcaucgugggcagagccugggagaacaccaccguggaccuggagagcgacggcaagccccagaaggugggcagcgccggcagcaacaagagccugcagagcgccggcuuccccaccggccugaccuacagccagcugaugacccugaaggacagcaugaugcagcuggaccccagcgccaagaccuggaucgacaucgagggcagacccgaggaccccguggagaucgcccuguaccagcccaugagcggcugcuacauccacuucuucagagagcccaccgaccugaagcaguucaagcaggacgccaaguacagccacggcaucgacguggccgaccuguuccccgcccagcccggccugaccagcgccgugaucgaggcccugcccagaaacauggugcugaccugccagggcagcgacgacaucaagagacugcuggacagccagggcagaagagacaucaagcugaucgacaucgcccugagcaaggccgacagcagaagauucgagaacgccgugugggaccagugcaaggaccugugccacaugcacaccggcguggugguggagaagaagaagagaggcggcaaggaggagaucaccccccacugcgcccugauggacugcaucauguacgacgccgccgugagcggcggccugaacauccccgugcugagagccgugcugcccagagacaugguguucagaaccagcagccccaagguggugcugugaggacuaguuauaagacugacuagcccgaugggccucccaacgggcccuccuccccuccuugcaccgagauuaaucaaaggcucuuuucagagccaccaaaaaaaaaaaaaaaaaaaaaaaaaaaaaaaaaaaaaaaaaaaaaaaaaaaaaaaaaaaaaaaaaaaaaaaaaaaaaaaaaaaaaaaaaaaaaaaaaaaaa

SEQ ID NO: 19167 - RNA, 1986 nt, Artificial Sequence
  mRNA product Design i-3 (hSL-A100) comprising derived and/or modified sequence from LASV(ISTH2010-NIG-2012;Clade II)__AIT17483__SP-HsPLAT_NP(2-569) (opt4)
aggagaaagcuuaccauggacgccaugaagagaggccugugcugcgugcugcugcugugcggcgccguguucgugagccccagcgccagcaaggaggugaagagcuuccuguggacccagagccugagaagagagcugagcggcuacugcagcaacaucaagcugcagguggugaaggacgcccaggcccugcugcacggccuggacuucagcgaggugagcaacgugcagagacugaugagaaagcagaagagagacgacagcgaccugaagagacugagagaccugaaccaggccgugaacaaccugguggagcugaagagcacccagcagaagagcauccugagagugggcacccugaccagcgacgaccugcugacccuggccgccgaccuggagaagcugaagagcaaggugaucagaaccgagagaccccugagcagcggcguguacaugggcaaccugagcacccagcagcuggagcagagaagagcccugcugaaccugaucggcauggugggcggcgcccagggcacccagcccggcagagacggcguggugagagugugggacgugaagaaccccgaccugcugaacaaccaguucggcaccaugcccagccugacccuggccugccugaccaagcagggccagguggaccugaacgacgccgugcuggcccugaccgaccugggccugaucuacaccgccaaguaccccaacagcagcgaccuggacagacugagccagagccaccccauccugaacaugguggacaccaagaagagcagccugaacaucagcggcuucaacuucagccugggcgccgccgugaaggccggcgccugcaugcuggacggcggcaacaugcuggagaccaucaaggugaccccccagaccauggacggcauccugaagagcauccugaaggugaagaagagccugggcauguucgugagcgacacccccggcgagagaaaccccuacgagaacauccuguacaagaucugccugagcggcgacggcuggcccuacaucgccagcagaaccagcaucgugggcagagccugggagaacaccaccguggaccuggagagcgacggcaagccccacaaggugggcaccgccggcagcaacaagagccugcagagcgccggcuuccccaccggccugaccuacagccagcugaugacccugaaggacagcaugaugcagcuggaccccagcgccaagaccuggaucgacaucgagggcagacccgaggaccccguggagaucgcccuguaccagcccaugagcggcugcuacauccacuucuucagagagcccaccgaccugaagcaguucaagcaggacgccaaguacagccacggcaucgacguggccgaccuguuccccgcccagcccggccugaccagcgccgugaucgaggcccugcccagaaacauggugcugaccugccagggcagcgacgacaucaagagacugcuggacagccagggcagaagagacaucaagcugaucgacaucgcccugagcaaggccgacagcagaagauucgagaacgccgugugggaccagugcaaggaccugugccacaugcacaccggcguggugguggagaagaagaagagaggcggcaaggaggagaucaccccccacugcgcccugauggacugcaucauguacgacgccgccgugagcggcggccugaacauccccgugcugagagccgugcugcccagagacaugguguucagaaccagcagccccaagguggugcugugaggacuaguuauaagacugacuagcccgaugggccucccaacgggcccuccuccccuccuugcaccgagauuaaucaaaggcucuuuucagagccaccaaaaaaaaaaaaaaaaaaaaaaaaaaaaaaaaaaaaaaaaaaaaaaaaaaaaaaaaaaaaaaaaaaaaaaaaaaaaaaaaaaaaaaaaaaaaaaaaaaaaa

SEQ ID NO: 19168 - RNA, 1986 nt, Artificial Sequence
  mRNA product Design i-3 (hSL-A100) comprising derived and/or modified sequence from LASV(Lassa virus/H.sapiens-wt/NGA/2015/ISTH_0543;Clade II)__AVO03640__SP-HsPLAT_NP(2-569) (opt4)
aggagaaagcuuaccauggacgccaugaagagaggccugugcugcgugcugcugcugugcggcgccguguucgugagccccagcgccagcaaggaggugaagagcuuccuguggacccagagccugagaagagagcugagcggcuacugcagcaacaucaagcugcagguggugaaggacgcccaggcccugcugcacggccuggacuucagcgaggugagcaacgugcagagacugaugagaaagcagaagagagacgacagcgaccugaagagacugagagaccugaaccaggccgugaacaaccugguggagcugaagagcacccagcagaagagcauccugagagugggcacccugaccagcgacgaccugcugacccuggccgccgaccuggagaagcugaagagcaaggugaucagaaccgagagaccccugagcagcggcguguacaugggcaaccugagcacccagcagcuggagcagagaagagcccugcugaacaugaucggcauggugggcggcgcccagggcacccagcccggcagagacggcguggugagagugugggacgugaagaaccccgaccugcugaacaaccaguucggcaccaugcccagccugacccuggccugccugaccaagcagggccagguggaccugaacgacgccgugcuggcccugaccgaccugggccugaucuacaccgccaaguaccccaacagcagcgaccuggacagacugagccagagccaccccauccugaacaugguggacaccaagaagagcagccugaacaucagcggcuacaacuucagccugggcgccgccgugaaggccggcgccugcaugcuggacggcggcaacaugcuggagaccaucaaggugaccccccagaccauggacggcauccugaagagcauccugaaggugaagaagagccugggcauguucgugagcgacacccccggcgagagaaaccccuacgagaacauccuguacaagaucugccugagcggcgacggcuggcccuacaucgccagcagaaccagcaucgugggcagagccugggagaacaccaccguggaccuggagagcgacggcaagccccagaaggugggcagcgccggcagcaacaagagccugcagagcgccggcuuccccaccggccugaccuacagccagcugaugacccugaaggacagcaugaugcagcuggaccccagcgccaagaccuggaucgacaucgagggcagacccgaggaccccguggagaucgcccuguaccagcccaugagcggcugcuacauccacuucuucagagagcccaccgaccugaagcaguucaagcaggacgccaaguacagccacggcaucgacguggccgaccuguuccccgcccagcccggccugaccagcgccgugaucgaggcccugcccagaaacauggugcugaccugccagggcagcgacgacaucaagagacugcuggacagccagggcagaaaggacaucaagcugaucgacaucgcccugagcaaggccgacagcagaagauucgagaacgccgugugggaccagugcaaggaccugugccacaugcacaccggcguggugguggagaagaagaagagaggcggcaaggaggagaucaccccccacugcgcccugauggacugcaucauguacgacgccgccgugagcggcggccugaacauccccgugcugagagccgugcugcccagagacaugguguucagaaccagcagccccaagguggugcugugaggacuaguuauaagacugacuagcccgaugggccucccaacgggcccuccuccccuccuugcaccgagauuaaucaaaggcucuuuucagagccaccaaaaaaaaaaaaaaaaaaaaaaaaaaaaaaaaaaaaaaaaaaaaaaaaaaaaaaaaaaaaaaaaaaaaaaaaaaaaaaaaaaaaaaaaaaaaaaaaaaaaa

SEQ ID NO: 19169 - RNA, 1986 nt, Artificial Sequence
  mRNA product Design i-3 (hSL-A100) comprising derived and/or modified sequence from LASV(Lassa virus/H.sapiens-wt/NGA/2016/ISTH_0009;Clade II)__AVO03572__SP-HsPLAT_NP(2-569) (opt4)
aggagaaagcuuaccauggacgccaugaagagaggccugugcugcgugcugcugcugugcggcgccguguucgugagccccagcgccagcaaggaggugaagagcuuccuguggacccagagccugagaagagagcugagcggcuacugcagcaacaucaagcugcagguggugaaggacgcccaggcccugcugcacggccuggacuucagcgaggugagcaacgugcagagacugaugagaaagcagaagagagacgacagcgaccugaagagacugagagaccugaaccaggccgugaacaaccugguggagcugaagagcacccagcagaagagcauccugagagugggcacccugaccagcgacgaccugcugacccuggccgccgaccuggagaagcugaagagcaaggugaucagaaccgagagaccccugagcagcggcguguacaugggcaaccugagcacccagcagcuggagcagagaagagcccugcugaacaugaucggcauggugggcggcgcccagggcacccagcccggcagagacggcguggugagagugugggacgugaagaaccccgaccugcugaacaaccaguucggcaccaugcccagccugacccuggccugccugaccaagcagggccagguggaccugaacgacgccgugcuggcccugaccgaccugggccugaucuacaccgccaaguaccccaacagcagcgaccuggacagacugagccagagccaccccauccugaacaugguggacaccaagaagagcagccugaacaucagcggcuacaacuucagccugggcgccgccgugaaggccggcgccugcaugcuggacggcggcaacaugcuggagaccaucaaggugaccccccagaccauggacggcauccugaagagcauccugaaggugaagaagagccugggcauguucgugagcgacacccccggcgagagaaaccccuacgagaacauccuguacaagaucugccugagcggcgacggcuggcccuacaucgccagcagaaccagcaucgugggcagagccugggagaacaccaccguggaccuggagagcgacggcaagccccagaaggugggcagcgccggcagcaacaagagccugcagagcgccggcuuccccaccggccugaccuacagccagcugaugacccugaaggacagcaugaugcagcuggaccccagcgccaagaccuggaucgacaucgagggcagacccgaggaccccguggagaucgcccuguaccagcccaugagcggcugcuacauccacuucuucagagagcccaccgaccugaagcaguucaagcaggacgccaaguacagccacggcaucgacguggccgaccuguuccccgcccagcccggccugaccagcgccgugaucgaggcccugcccagaaacauggugcugaccugccagggcagcgacgacaucaagagacugcuggacagccagggcagaagagacaucaagcugaucgacaucgcccugagcaaggccgacagcagaagauucgagaacgccgugugggaccagugcaaggaccugugccacaugcacaccggcguggugguggagaagaagaagagaggcggcaaggaggagaucaccccccacugcgcccugauggacugcaucauguacgacgccgccgugagcggcggccugaacauccccgugcugagagccgugcugcccagagacaugguguucagaaccagcagccccaagguggugcugugaggacuaguuauaagacugacuagcccgaugggccucccaacgggcccuccuccccuccuugcaccgagauuaaucaaaggcucuuuucagagccaccaaaaaaaaaaaaaaaaaaaaaaaaaaaaaaaaaaaaaaaaaaaaaaaaaaaaaaaaaaaaaaaaaaaaaaaaaaaaaaaaaaaaaaaaaaaaaaaaaaaaa

SEQ ID NO: 19170 - RNA, 1986 nt, Artificial Sequence
  mRNA product Design i-3 (hSL-A100) comprising derived and/or modified sequence from LASV(Lassa virus/H.sapiens-wt/NGA/2016/ISTH_0017;Clade II)__AVO03568__SP-HsPLAT_NP(2-569) (opt4)
aggagaaagcuuaccauggacgccaugaagagaggccugugcugcgugcugcugcugugcggcgccguguucgugagccccagcgccagcaaggaggugaagagcuuccuguggacccagagccugagaagagagcugagcggcuacugcagcagcaucaagcugcagguggugaaggacgcccaggcccugcugcacggccuggacuucagcgaggugagcaacgugcagagacugaugagaaagcagaagagagacgacagcgaccugaagagacugagagaccugaaccaggccgugaacaaccugguggagcugaagagcacccagcagaagagcauccugagagugggcacccugaccagcgacgaccugcugacccuggccgccgaccuggagaagcugaagagcaaggugaucagaaccgagagaccccugagcagcggcguguacaugggcaaccugagcacccagcagcuggagcagagaagagcccugcugaacaugaucggcauggccggcggcgcccagggcacccagcccggcagagacggcguggugagagugugggacgugaagaaccccgaccugcugaacaaccaguucggcaccaugcccagccugacccuggccugccugaccaagcagggccagguggaccugaacgacgccgugcuggcccugaccgaccugggccugaucuacaccgccaaguaccccaacagcagcgaccuggacagacugagccagagccaccccauccugaacaugguggacaccaagaagagcagccugaacaucagcggcuacaacuucagccugggcgccgccgugaaggccggcgccugcaugcuggacggcggcaacaugcuggagaccaucaaggugaccccccagaccauggacggcauccugaagagcauccugaaggugaagagaagccugggcauguucgugagcgacgcccccggcgagagaaaccccuacgagaacauccuguacaagaucugccugagcggcgacggcuggcccuacaucgccagcagaaccagcaucgugggcagagccugggagaacaccaccguggaccuggagagcgacggcaagccccagaaggugggcgccaccggcagcaacaagagccugcagagcgccggcuuccccaccggccugaccuacagccagcugaugacccugaaggacagcaugaugcagcuggaccccagcgccaagaccuggaucgacaucgagggcagacccgaggaccccguggagguggcccuguaccagcccgugagcggcugcuacauccacuucuucagagagcccaccgaccugaagcaguucaagcaggacgccaaguacagccacggcaucgacguggccgaccuguuccccgcccagcccggccugaccagcgccgugaucgaggcccugcccagaaacauggugcugaccugccagggcagcgacgacaucaagaagcugcuggacagccagggcagaaaggacaucaagcugaucgacaucgcccugagcaaggccgacagcagaagauucgagaacgccgugugggaccagugcaaggaccugugccacaugcacaccggcguggugguggagaagaagaagagaggcggcaaggaggagaucaccccccacugcgcccugauggacugcaucauguacgacgccgccgugagcggcggccugaacauccccgugcugagagccgugcugcccagagacaugguguucagaaccagcagccccaagguggugcugugaggacuaguuauaagacugacuagcccgaugggccucccaacgggcccuccuccccuccuugcaccgagauuaaucaaaggcucuuuucagagccaccaaaaaaaaaaaaaaaaaaaaaaaaaaaaaaaaaaaaaaaaaaaaaaaaaaaaaaaaaaaaaaaaaaaaaaaaaaaaaaaaaaaaaaaaaaaaaaaaaaaaa

SEQ ID NO: 19171 - RNA, 1986 nt, Artificial Sequence
  mRNA product Design i-3 (hSL-A100) comprising derived and/or modified sequence from LASV(Lassa virus/H.sapiens-wt/NGA/2018/ISTH_0959;Clade II)__AVV65100__SP-HsPLAT_NP(2-569) (opt4)
aggagaaagcuuaccauggacgccaugaagagaggccugugcugcgugcugcugcugugcggcgccguguucgugagccccagcgccagcaaggaggugaagagcuuccuguggacccagagccugagaagagagcugagcggcuacugcagcaacaucaagcugcagguggugaaggacgcccaggcccugcugcacggccuggacuucagcgaggugagcaacgugcagagacugaugagaaagcagaagagagacgacagcgaccugaagagacugagagaccugaaccaggccgugaacaaccugguggagcugaagagcacccagcagaagagcauccugagagugggcacccugaccagcgacgaccugcugacccuggccgccgaccuggagaagcugaagagcaaggugaucagaaccgagagaccccugagcagcggcguguacaugggcaaccugagcacccagcagcuggagcagagaagagcccugcugaaccugaucggcauggugggcggcgcccagggcacccagcccggcagagacggcguggugagagugugggacgugaagaaccccgaccugcugaacaaccaguucggcaccaugcccagccugacccuggccugccugaccaagcagggccagguggaccugaacgacguggugcuggcccugaccgaccugggccugaucuacaccgccaaguaccccaacagcagcgaccuggacagacugagccagagccaccccauccugaacaugguggacaccaagaagagcagccugaacaucagcggcuucaacuucagccugggcgccgccgugaaggccggcgccugcaugcuggacggcggcaacaugcuggagaccaucaaggugaccccccagaccauggacggcauccugaagagcauccugaaggugaagaagagccugggcauguucgugagcgacacccccggcgagagaaaccccuacgagaacauccuguacaagaucugccugagcggcgacggcuggcccuacaucgccagcagaaccagcaucgugggcagagccugggagaacaccaccguggaccuggagagcgacggcaagccccacaaggugggcaccgccggcagcaacaagagccugcagagcgccggcuuccccaccggccugaccuacagccagcugaugacccugaaggacagcaugaugcagcuggaccccagcgccaagaccuggaucgacaucgagggcagacccgaggaccccguggagaucgcccuguaccagcccaugagcggcugcuacauccacuucuucagagagcccaccgaccugaagcaguucaagcaggacgccaaguacagccacggcaucgacguggccgaccuguuccccgcccagcccggccugaccagcgccgugaucgaggcccugcccagaaacauggugcugaccugccagggcagcgacgacaucaagagacugcuggacagccagggcagaaaggacaucaagcugaucgacaucgcccugagcaagaccgacagcagaagauucgagaacgccgugugggaccagugcaaggaccugugccacaugcacaccggcguggugguggagaagaagaagagaggcggcaaggaggagaucaccccccacugcgcccugauggacugcaucauguacgacgccgccgugagcggcggccugaacauccccgugcugagagccgugcugcccagagacaugguguucagaaccagcagccccaagguggugcugugaggacuaguuauaagacugacuagcccgaugggccucccaacgggcccuccuccccuccuugcaccgagauuaaucaaaggcucuuuucagagccaccaaaaaaaaaaaaaaaaaaaaaaaaaaaaaaaaaaaaaaaaaaaaaaaaaaaaaaaaaaaaaaaaaaaaaaaaaaaaaaaaaaaaaaaaaaaaaaaaaaaaa

SEQ ID NO: 19172 - RNA, 1986 nt, Artificial Sequence
  mRNA product Design i-3 (hSL-A100) comprising derived and/or modified sequence from LASV(LASV003-NIG-2008;Clade II)__AIT17581__SP-HsPLAT_NP(2-569) (opt4)
aggagaaagcuuaccauggacgccaugaagagaggccugugcugcgugcugcugcugugcggcgccguguucgugagccccagcgccagcaaggaggugaagagcuuccuguggacccagagccugagaagagagcugagcggcuacugcagcagcaucaagcugcagguggugaaggacgcccaggcccugcugcacggccuggacuucagcgaggugagcaacgugcagagacugaugagaaagcagaagagagacgacagcgaccugaagagacugagagaccugaaccaggccgugaacaaccugguggagcugaagagcacccagcagaagagcgugcugagagugggcacccugaccagcgacgaccugcugacccuggccgccgaccuggagaagcugaagagcaaggugaucagaaccgagagaccccugagcagcggcguguacaugggcaaccugagcgcccagcagcuggagcagagaagaacccugcugaacaugaucggcauggugggcggcgcccagggcacccagcccggcagagacggcguggugagagugugggacgugaagaaccccgaccugcugaacaaccaguucggcaccaugcccagccugacccuggccugccugaccaagcagggccagguggaccugaacgacguggugcuggcccugaccgaccugggccugaucuacaccgccaaguaccccaacagcagcgaccuggacagacugagccagagccaccccauccugagcaugguggacaccaagaagagcagccugaacaucagcggcuacaacuucagccugggcgccgccgugaaggccggcgccugcaugcuggacggcggcaacaugcuggagaccaucaaggugaccccccagaccauggacggcauccugaagagcauccugaaggugaagaagagccugggcauguucgugagcgacacccccggcgagagaaaccccuacgagaacauccuguacaagaucugccugagcggcgacggcuggcccuacaucgccagcagaaccagcaucgugggcagagccugggagaacaccaccguggaccuggagagcgacggcaagccccagaaggugggcaccgccggcagcaacaagagccugcagagcgccggcuuccccaccggccugaccuacagccagcugaugacccugaaggacagcaugaugcagcuggaccccagcgccaagaccuggaucgacaucgagggcagacccgaggaccccguggagaucgcccuguaccagcccaugagcggcugcuacauccacuucuucagagagcccaccgaccugaagcaguucaagcaggacgccaaguacagccacggcaucgacgugaccgaccuguuccccgcccagcccggccugaccagcgccgugaucgaggcccugcccagaaacauggugcugaccugccagggcagcgacgacaucaagagacugcuggacagccagggcagaagagacaucaagcugaucgacaucgcccugagcaaggccgacagcagaagauucgagaacgccgugugggaccagugcaaggaccugugccacaugcacaccggcguggugguggagaagaagaagagaggcggcaaggaggagaucaccccccacugcgcccugauggacugcaucauguacgacgccgccgugagcggcggccugaacauccccgugcugagagccgugcugcccagagacaugguguucagaaccagcagccccaagguggugcugugaggacuaguuauaagacugacuagcccgaugggccucccaacgggcccuccuccccuccuugcaccgagauuaaucaaaggcucuuuucagagccaccaaaaaaaaaaaaaaaaaaaaaaaaaaaaaaaaaaaaaaaaaaaaaaaaaaaaaaaaaaaaaaaaaaaaaaaaaaaaaaaaaaaaaaaaaaaaaaaaaaaaa

SEQ ID NO: 19173 - RNA, 1986 nt, Artificial Sequence
  mRNA product Design i-3 (hSL-A100) comprising derived and/or modified sequence from LASV(LASV035-NIG-2009;Clade II)__AIT17589__SP-HsPLAT_NP(2-569) (opt4)
aggagaaagcuuaccauggacgccaugaagagaggccugugcugcgugcugcugcugugcggcgccguguucgugagccccagcgccagcaaggaggugaagagcuuccuguggacccagagccugagaagagagcugagcggcuacugcagcagcaucaagcugcagguggugaaggacgcccaggcccugcugcacggccuggacuucagcgaggugagcaacgugcagagacugaugagaaagcagaagagagacgacagcgaccugaagagacugagagaccugaaccaggccgugaacaaccugguggagcugaagagcacccagcagaagagcauccugagagugggcacccugaccagcgacgaccugcugacccuggccgccgaccuggagaagcugaagagcaaggugaucagaaccgagagaccccugagcagcggcguguacaugggcaaccugagcgcccagcagcuggagcagagaagagcccugcugaacaugaucggcauggugggcggcgcccagggcacccagcccggcagagacggcguggugagagugugggacgugaagaaccccgaccugcugaacaaccaguucggcaccaugcccagccugacccuggccugccugaccaagcagggccagguggaccugaacgacgccgugcuggcccugaccgaccugggccugaucuacaccgccaaguaccccaacagcagcgaccuggacagacugagccagagccaccccauccugaacaugguggacaccaagaagagcagccugaacaucagcggcuacaacuucagccugggcgccgccgugaaggccggcgccugcaugcuggacggcggcaacaugcuggagaccaucaaggugaccccccagaccauggacggcauccugaagagcauccugaaggugaagagaagccugggcauguucgugagcgacacccccggcgagagaaaccccuacgagaacauccuguacaagaucugccugagcggcgacggcuggcccuacaucgccagcagaaccagcaucgugggcagagccugggagaacaccaccguggaccuggagagcgacggcaagccccagaaggugggcaccaccggcagcaacaagagccugcagagcgccggcuuccccaccggccugaccuacagccagcugaugacccugaaggacagcaugaugcagcuggaccccagcgccaagaccuggaucgacaucgagggcagacccgaggaccccguggagaucgcccuguaccagcccaugagcggcugcuacauccacuucuucagagagcccaccgaccugaagcaguucaagcaggacgccaaguacagccacggcaucgacguggccgaccuguuccccgcccagcccggccugaccagcgccgugaucgaggcccugcccagaaacauggugcugaccugccagggcagcgacgacaucaagaagcugcuggacagccagggcagaagagacaucaagcugaucgacaucgcccugagcaaggccgacagcagaaaguucgagaacgccgugugggaccagugcaaggaccugugccacaugcacaccggcguggugguggagaagaagaagagaggcggcaaggaggagaucaccccccacugcgcccugauggacugcaucauguacgacgccgccgugagcggcggccugaacauccccgugcugagagccgugcugcccagagacaugguguucagaaccagcagccccaagguggugcugugaggacuaguuauaagacugacuagcccgaugggccucccaacgggcccuccuccccuccuugcaccgagauuaaucaaaggcucuuuucagagccaccaaaaaaaaaaaaaaaaaaaaaaaaaaaaaaaaaaaaaaaaaaaaaaaaaaaaaaaaaaaaaaaaaaaaaaaaaaaaaaaaaaaaaaaaaaaaaaaaaaaaa

SEQ ID NO: 19174 - RNA, 1986 nt, Artificial Sequence
  mRNA product Design i-3 (hSL-A100) comprising derived and/or modified sequence from LASV(LASV1000-NIG-2009;Clade II)__AIT17783__SP-HsPLAT_NP(2-569) (opt4)
aggagaaagcuuaccauggacgccaugaagagaggccugugcugcgugcugcugcugugcggcgccguguucgugagccccagcgccagcaaggaggugaagagcuuccuguggacccagagccugagaagagagcugagcggcuacugcagcaacaucaagcugcagguggugaaggacgcccaggcccugcugcacggccuggacuucagcgaggugagcaacgugcagagacugaugagaaagcagaagagagacgacagcgaccugaagagacugagagaccugaaccaggccgugaacaaccugguggagcugaagagcacccagcagaagagcauccugagagugggcacccugaccagcgacgaccugcugacccuggccgccgaccuggagaagcugaagagcaaggugaucagaaccgagagaccccugagcagcggcguguacaugggcaaccugagcacccagcagcuggagcagagaagagcccugcugaacaugaucggcauggugggcggcgcccagggcacccagcccggcagagacggcguggugagagugugggacgugaagaaccccgaccugcugaacaaccaguucggcaccaugcccagccugacccuggccugccugaccaagcagggccagguggaccugaacgacguggugcuggcccugaccgaccugggccugaucuacaccgccaaguaccccaacagcagcgaccuggacagacugagccagagccaccccauccugaacaugguggacaccaagaagagcagccugaacaucagcggcuacaacuucagccugggcgccgccgugaaggccggcgccugcaugcuggacggcggcaacaugcuggagaccaucaaggugaccccccagaccauggacggcauccugaagagcauccugaaggugaagaagagccugggcauguucgugagcgacacccccggcgagagaaaccccuacgagaacauccuguacaagaucugccugagcggcgacggcuggcccuacaucgccagcagaaccagcaucgugggcagagccugggagaacaccaccguggaccuggagagcgacggcaagccccagaaggugggcaccgccggcagcaacaagagccugcagagcgccggcuuccccaccggccugaccuacagccagcugaugacccugaaggacagcaugaugcagcuggaccccagcgccaagaccuggaucgacaucgagggcagacccgaggaccccguggagaucgcccuguaccagcccgugagcggcugcuacauccacuucuucagagagcccaccgaccugaagcaguucaagcaggacgccaaguacagccacggcaucgacguggccgaccuguuccccgcccagcccggccugaccagcgccgugaucgaggcccugcccagaaacauggugcugaccugccagggcagcgacgacaucaagagacugcuggacagccagggcagaagagacaucaagcugaucgacaucgcccugagcaaggccgacagcagaagauucgagaacgccgugugggaccagugcaaggaccugugccacaugcacaccggcguggugguggagaagaagaagagaggcggcaaggaggagaucaccccccacugcgcccugauggacugcaucauguacgacgccgccgugagcggcggccugaacauccccgugcugagagccgugcugcccagagacaugguguucagaaccagcagccccaagguggugcugugaggacuaguuauaagacugacuagcccgaugggccucccaacgggcccuccuccccuccuugcaccgagauuaaucaaaggcucuuuucagagccaccaaaaaaaaaaaaaaaaaaaaaaaaaaaaaaaaaaaaaaaaaaaaaaaaaaaaaaaaaaaaaaaaaaaaaaaaaaaaaaaaaaaaaaaaaaaaaaaaaaaaa

SEQ ID NO: 19175 - RNA, 1986 nt, Artificial Sequence
  mRNA product Design i-3 (hSL-A100) comprising derived and/or modified sequence from LASV(LASV221-NIG-2010;Clade II)__AIT17625__SP-HsPLAT_NP(2-569) (opt4)
aggagaaagcuuaccauggacgccaugaagagaggccugugcugcgugcugcugcugugcggcgccguguucgugagccccagcgccagcaaggaggugaagagcuuccuguggacccagagccugagaagagagcugagcggcuacugcagcagcaucaagcugcagguggugaaggacgcccaggcccugcugcacggccuggacuucagcgaggugagcaacgugcagagacugaugagaaagcagagaagagacgacagcgaccugaagagacugagagaccugaaccaggccgugaacaaccugguggagcugaagagcacccagcagaagagcauccugagagugggcacccugaccagcgacgaccugcugacccuggccgccgaccuggagaagcugaagagcaaggugaucagaaccgagagaccccugagcagcggcguguacaugggcaaccugagcacccagcagcuggagcagagaagagcccugcugaacaugaucggcauggugggcggcgcccagggcacccagcccggcagagacggcguggugagagugugggacgugaagaaccccgaccugcugaacaaccaguucggcaccaugcccagccugacccuggccugccugaccaagcagggccagguggaccugaacgacgccgugcuggcccugaccgaccugggccugaucuacaccgccaaguaccccaacagcagcgaccuggacagacugagccagagccaccccauccugaacaugguggacaccaagaagagcagccugaacaucagcggcuacaacuucagccugggcgccgccgugaaggccggcgccugcaugcuggacggcggcaacaugcuggagaccaucaaggugaccccccagaccguggacggcauccugaagagcauccugaaggugaagagaagccugggcauguucgugagcgacacccccggcgagagaaaccccuacgagaacauccuguacaagaucugccugagcggcgacggcuggcccuacaucgccagcagaaccagcaucgugggcagagccugggagaacaccaccguggaccuggagagcgacggcaagccccagaaggugggcaccgccggcagcaacaagagccugcagagcgccggcuuccccaccggccugaccuacagccagcugaugacccugaaggacagcaugaugcagcuggaccccagcgccaagaccuggaucgacaucgagggcagacccgaggaccccguggagaucgcccuguaccagcccaugagcggcugcuacauccacuucuucagagagcccaccgaccugaagcaguucaagcaggacgccaaguacagccacggcaucgacguggccgaccuguuccccgcccagcccggccugaccagcgccgugaucgaggcccugcccagaaacauggugcugaccugccagggcagcgacgacaucaagagacugcuggacagccagggcagaagagacaucaagcugaucgacaucgcccugagcaaggccgacagcagaaaguucgagaacgccgugugggaccagugcaaggaccugugccacaugcacaccggcguggugguggagaagaagaagagaggcggcaaggaggagaucaccccccacugcgcccugauggacugcaucauguacgacgccgccgugagcggcggccugaacauccccgugcugagagccgugcugcccagagacaugguguucagaaccagcagccccaagguggugcugugaggacuaguuauaagacugacuagcccgaugggccucccaacgggcccuccuccccuccuugcaccgagauuaaucaaaggcucuuuucagagccaccaaaaaaaaaaaaaaaaaaaaaaaaaaaaaaaaaaaaaaaaaaaaaaaaaaaaaaaaaaaaaaaaaaaaaaaaaaaaaaaaaaaaaaaaaaaaaaaaaaaaa

SEQ ID NO: 19176 - RNA, 1986 nt, Artificial Sequence
  mRNA product Design i-3 (hSL-A100) comprising derived and/or modified sequence from LASV(LASV237-NIG-2010;Clade II)__AIT17639__SP-HsPLAT_NP(2-569) (opt4)
aggagaaagcuuaccauggacgccaugaagagaggccugugcugcgugcugcugcugugcggcgccguguucgugagccccagcgccagcaaggaggugaagagcuuccuguggacccagagccugagaagagagcugagcggcuacugcagcaacaucaagcugcagguggugaaggacgcccaggcccugcugcacggccuggacuucagcgaggugagcaacgugcagagacugaugagaaagcagaagagagacgacagcgaccugaagagacugagagaccugaaccaggccgugaacaaccugguggagcugaagagcacccagcagaagagcauccugagagugggcacccugaccagcgacgaccugcugacccuggccgccgaccuggagaagcugaagagcaaggugaucagaaccgagagaccccugagcagcggcguguacaugggcaaccugagcacccagcagcuggagcagagaagagcccugcugaacaugaucggcauggugggcggcgcccagggcacccagcccggcagagacggcguggugagagugugggacgugaagaaccccgaccugcugaacaaccaguucggcaccaugcccagccugacccuggccugccugaccaagcagggccagguggaccugaacgacgccgugcuggcccugaccgaccugggccugaucuacaccgccaaguaccccaacagcagcgaccuggacagacugagccagagccaccccauccugaacaugguggacaucaagaagagcagccugaacaucagcggcuacaacuucagccugggcgccgccgugaaggccggcgccugcaugcuggacggcggcaacaugcuggagaccaucaaggugaccccccagaccauggacggcauccugaagagcauccugaaggugaagagaagccugggcauguucgugagcgacacccccggcgagagaaaccccuacgagaacauccuguacaagaucugccugagcggcgacggcuggcccuacaucgccagcagaaccagcaucgugggcagagccugggagaacaccaccguggaccuggagagcgacggcaagccccagaaggugggcagcgccggcagcaacaagagccugcagagcgccggcuuccccaccggccugaccuacagccagcugaugacccugaaggacagcaugaugcagcuggaccccagcgccaagaccuggaucgacaucgagggcagacccgaggaccccguggagaucgcccuguaccagcccaugagcggcugcuacauccacuucuucagagagcccaccgaccugaagcaguucaagcaggacgccaaguacagccacggcaucgacguggccgaccuguuccccgcccagcccggccugaccagcgccgugaucgaggcccugcccagaaacauggugcugaccugccagggcagcgacgacaucaagagacugcuggacagccagggcagaagagacaucaagcugaucgacaucgcccugagcaaggccgacagcagaagauucgagaacgccgugugggaccagugcaaggaccugugccacaugcacaccggcguggugguggagaagaagaagagaggcggcaaggaggagaucaccccccacugcgcccugauggacugcaucauguacgacgccgccgugagcggcggccugaacauccccgugcugagagccgugcugcccagagacaugguguucagaaccagcagccccaagguggugcugugaggacuaguuauaagacugacuagcccgaugggccucccaacgggcccuccuccccuccuugcaccgagauuaaucaaaggcucuuuucagagccaccaaaaaaaaaaaaaaaaaaaaaaaaaaaaaaaaaaaaaaaaaaaaaaaaaaaaaaaaaaaaaaaaaaaaaaaaaaaaaaaaaaaaaaaaaaaaaaaaaaaaa

SEQ ID NO: 19177 - RNA, 1986 nt, Artificial Sequence
  mRNA product Design i-3 (hSL-A100) comprising derived and/or modified sequence from LASV(LASV253-NIG-2011;Clade II)__AIT17671__SP-HsPLAT_NP(2-569) (opt4)
aggagaaagcuuaccauggacgccaugaagagaggccugugcugcgugcugcugcugugcggcgccguguucgugagccccagcgccagcaaggaggugaagagcuuccuguggacccagagccugagaagagagcugagcggcuacugcagcagcaucaagcugcagguggugaaggacgcccaggcccugcugcacggccuggacuucagcgaggugagcaacgugcagagacugaugagaaagcagaagagagacgacagcgaccugaagagacugagagaccugaaccaggccgugaacaaccugguggagcugaagagcacccagcagaagagcgugcugagagugggcacccugaccagcgacgaccugcugacccuggccgccgaccuggagaagcugaagagcaaggugaucagaaccgagagaccccugagcagcggcguguacaugggcaaccugagcacccagcagcuggagcagagaagagcccugcugaacaugaucggcauggugggcggcgcccagggcacccagcccggcagagacggcguggugagagugugggacgugaagaaccccgaccugcugaacaaccaguucggcaccaugcccagccugacccuggccugccugaccaagcagggccagguggaccugaacgacguggugcuggcccugaccgaccugggccugaucuacaccgccaaguaccccaacagcagcgaccuggacagacugagccagagccaccccauccugaacaugguggacaccaagaagagcagccugaacaucagcggcuacaacuucagccugggcgccgccgugaaggccggcgccugcaugcuggacggcggcaacaugcuggagaccaucaaggugaccccccagaccauggacggcauccugaagagcauccugaaggugaagaagagccugggcauguucgugagcgacacccccggcgagagaaaccccuacgagaacauccuguacaagaucugccugagcggcgacggcuggcccuacaucgccagcagaaccagcaucgugggcagagccugggagaacaccaccguggaccuggagagcgacggcaagccccagaaggugggcaccgccggcagcaacaagagccugcagagcgccggcuuccccaccggccugaccuacagccagcugaugacccugaaggacagcaugaugcagcuggaccccagcgccaagaccuggaucgacaucgagggcagacccgaggaccccguggagaucgcccuguaccagcccaugagcggcugcuacauccacuucuucagagagcccaccgaccugaagcaguucaagcaggacgccaaguacagccacggcaucgacgugaccgaccuguuccccgcccagcccggccugaccagcgccgugaucgaggcccugcccagaaacauggugcugaccugccagggcagcgacgacaucaagagacugcuggacagccagggcagaagagacaucaagcugaucgacaucgcccugagcaaggccgacagcagaagauucgagaacgccgugugggaccagugcaaggaccugugccacaugcacaccggcguggugguggagaagaagaagagaggcggcaaggaggagaucaccccccacugcgcccugauggacugcaucauguacgacgccgccgugagcggcggccugaacauccccgugcugagagccgugcugcccagagacaugguguucagaaccagcagccccaagguggugcugugaggacuaguuauaagacugacuagcccgaugggccucccaacgggcccuccuccccuccuugcaccgagauuaaucaaaggcucuuuucagagccaccaaaaaaaaaaaaaaaaaaaaaaaaaaaaaaaaaaaaaaaaaaaaaaaaaaaaaaaaaaaaaaaaaaaaaaaaaaaaaaaaaaaaaaaaaaaaaaaaaaaaa

SEQ ID NO: 19178 - RNA, 1986 nt, Artificial Sequence
  mRNA product Design i-3 (hSL-A100) comprising derived and/or modified sequence from LASV(LASV254-NIG-2011;Clade II)__AIT17675__SP-HsPLAT_NP(2-569) (opt4)
aggagaaagcuuaccauggacgccaugaagagaggccugugcugcgugcugcugcugugcggcgccguguucgugagccccagcgccagcaaggaggugaagagcuuccuguggacccagagccugagaagagagcugagcggcuacugcagcagcaucaagcugcagguggugaaggacgcccaggcccugcugcacggccuggacuucagcgaggugagcaacgugcagagacugaugagaaagcagaagagagacgacagcgaccugaagagacugagagaccugaaccaggccgugaacaaccugguggagcugaagagcacccagcagaagagcgugcugagagugggcacccugaccagcgacgaccugcugacccuggccgccgaccuggagaagcugaagagcaaggugaucagaaccgagagaccccugagcagcggcguguacaugggcaaccugagcacccagcagcuggagcagagaagagcccugcugaacaugaucggcauggugggcggcgcccagggcacccagcccggcagagacggcguggugagagugugggacgugaagaaccccgaccugcugaacaaccaguucggcaccaugcccagccugacccuggccugccugaccaagcagggccagguggaccugaacgacgccgugcuggcccugaccgaccugggccugaucuacaccgccaaguaccccaacagcagcgaccuggacagacugagccagagccaccccauccugaacaugguggacaccaagaagagcagccugaacaucagcggcuacaacuucagccugggcgccgccgugaaggccggcgccugcaugcuggacggcggcaacaugcuggagaccaucaaggugaccccccagaccauggacggcauccugaagagcauccugaaggugaagaagagccugggcauguucgugagcgacacccccggcgagagaaaccccuacgagaacauccuguacaagaucugccugagcggcgacggcuggcccuacaucgccagcagaaccagcaucgugggcagagccugggagaacaccaucguggaccuggagagcgacggcaagccccagaaggugggcaccgccggcagcaacaagagccugcagagcgccggcuuccccaccggccugaccuacagccagcugaugacccugaaggacagcaugaugcagcuggaccccagcgccaagaccuggaucgacaucgagggcagacccgaggaccccguggagaucgcccuguaccagcccaugagcggcugcuacauccacuucuucagagagcccaccgaccugaagcaguucaagcaggacgccaaguacagccacggcaucgacguggccgaccuguuccccgcccagcccggccugaccagcgccgugaucgaggcccugcccagaaacauggugcugaccugccagggcagcgacgacaucaagagacugcuggacagccagggcagaagagacaucaagcugaucgacaucgcccugagcaaggccgacagcagaagauucgagaacgccgugugggaccagugcaaggaccugugccacaugcacaccggcguggugguggagaagaagaagagaggcggcaaggaggagaucaccccccacugcgcccugauggacugcaucauguacgacgccgccgugagcggcggccugaacauccccgugcugagagccgugcugcccagagacaugguguucagaaccagcagccccaagguggugcugugaggacuaguuauaagacugacuagcccgaugggccucccaacgggcccuccuccccuccuugcaccgagauuaaucaaaggcucuuuucagagccaccaaaaaaaaaaaaaaaaaaaaaaaaaaaaaaaaaaaaaaaaaaaaaaaaaaaaaaaaaaaaaaaaaaaaaaaaaaaaaaaaaaaaaaaaaaaaaaaaaaaaa

SEQ ID NO: 19179 - RNA, 1986 nt, Artificial Sequence
  mRNA product Design i-3 (hSL-A100) comprising derived and/or modified sequence from LASV(Nig08-04;Clade II)__ADU56611__SP-HsPLAT_NP(2-569) (opt4)
aggagaaagcuuaccauggacgccaugaagagaggccugugcugcgugcugcugcugugcggcgccguguucgugagccccagcgccagcaaggaggugaagagcuuccuguggacccagagccugagaagagagcugagcggcuacugcagcaacaucaagcugcagguggugaaggacgcccaggcccugcugcacggccuggacuucagcgaggugagcaacgugcagagacugaugagaaagcagaagagagacgacggcgaccugaagagacugagagaccugaaccaggccgugaacaaccugguggagcugaagagcacccagcagaagagcgugcugagagugggcacccugaccagcgacgaccugcugacccuggccgccgaccuggagaagcugaagagcaaggugaucagaaccgagagaccccugagcagcggcguguacaugggcaaccugagcacccagcagcuggagcagagaaaggcccugcugagcaugaucggcauggugggcggcgcccagggcacccagcccggcagagacggcguggugagagugugggacgugaagaaccccgaccugcugaacaaccaguucggcaccaugcccagccugacccuggccugccugaccaagcagggccagguggaccugaacgacgccgugcuggcccugaccgaccugggccugaucuacaccgccaaguaccccaacagcagcgaccuggacagacugagccagagccaccccauccugaacaugguggacaccaagaagagcagccugaacaucagcggcuacaacuucagccugggcgccgccgugaaggccggcgccugcaugcuggacggcggcaacaugcuggagaccaucaaggugaccccccagaccauggacggcauccugaagagcauccugaaggugaagagaagccugggcauguucgugagcgacacccccggcgagagaaaccccuacgagaacauccuguacaagaucugccugagcggcgacggcuggcccuacaucgccagcagaaccagcaucgugggcagagccugggagaacaccaccguggaccuggagagcgacggcaagccccagaaggugggcaccgccggcagcaacaagagccugcagagcgccggcuuccccaccggccugaccuacagccagcugaugacccugaaggacagcaugaugcagcuggaccccagcgccaagaccuggaucgacaucgagggcagacccgaggaccccguggagaucgcccuguaccagcccaugagcggcugcuacauccacuucuucagagagcccaccgaccugaagcaguucaagcaggacgccaaguacagccacggcaucgacgugaccgaccuguucagcgcccagcccggccugaccagcgccgugaucgaggcccugcccagaaacauggugcugaccugccagggcagcgacgacaucaagaagcugcuggacagccagggcagaagagacaucaagcugaucgacaucagccugaacaaggccgacagcagaagauucgagaacgccgugugggaccagugcaaggaccugugccacaugcacaccggcguggugguggagaagaagaagagaggcggcaaggaggagaucaccccccacugcgcccugauggacugcaucauguucgacgccgccgugagcggcggccugaacauccccauccugagagccgugcugcccagagacaugguguucagaaccagcagccccaagguggugcugugaggacuaguuauaagacugacuagcccgaugggccucccaacgggcccuccuccccuccuugcaccgagauuaaucaaaggcucuuuucagagccaccaaaaaaaaaaaaaaaaaaaaaaaaaaaaaaaaaaaaaaaaaaaaaaaaaaaaaaaaaaaaaaaaaaaaaaaaaaaaaaaaaaaaaaaaaaaaaaaaaaaaa

SEQ ID NO: 19180 - RNA, 1989 nt, Artificial Sequence
  mRNA product Design i-3 (hSL-A100) comprising derived and/or modified sequence from LASV(GA391;Clade III)__AAA46284__SP-HsPLAT_NP(2-570) (opt4)
aggagaaagcuuaccauggacgccaugaagagaggccugugcugcgugcugcugcugugcggcgccguguucgugagccccagcgccagcaaggaggugagaagcugccuguggacccagagccugagaagagagcugagcggcuacugcagcaacaucaagcugcagguggugaaggacgcccaggcccugcugcacggccuggacuucagcgaggugagcaacgugcagagacugaugagaaagcagaagagagacgacggcgaccugaagagacugagagaccugaaccaggccgugaacaaccugguggagcugaagagcacccagcagaagagcgugcugagagugggcacccugagcagcgacgaccugcugauccuggccgccgaccuggagaagcugaagagcaaggugaccagaaccgagagaccccugagcagcggcguguacaugggcaaccugagcagccagcagcuggaccagagaagagcccugcugaacaugaucggcaugaccggcgugagcggcggcggcaagggcgccagcaacggcaucgugagagugugggacgugaagaacgccgagcugcugaacaaccaguucggcaccaugcccagccugacccuggccugccugaccaagcagggccagguggaccugaacgacgccgugcaggcccugaccgaccugggccugaucuacaccgccaaguaccccaacagcagcgaccuggacagacugagccagagccaccccauccugaacaugaucgacaccaagaagagcagccugaacaucagcggcuacaacuucagccugggcgccgccgugaaggccggcgccugcaugcuggacggcggcaacaugcuggagaccaucaaggugagcccccagaccauggacggcauccugaagagcauccugaaggugaagaagagccugggcauguucgugagcgacacccccggcgagagaaaccccuacgagaacauccuguacaagaucugccugagcggcgacggcuggagcuacaucgccagcagaaccagcaucgugggcagagccugggagaacaccgugguggaccuggagcaggacaacaagccccagaagaucggcaacggcggcagcaacaagagccugcagagcgccggcuucgccgccggccugaucuacagccagcugaugacccugaaggacuucaagugcuucaaccugauccccaacgccaagaccuggauggacaucgagggcagacccgaggaccccguggagaucgcccuguaccagcccagcagcggcugcuacgugcacuucuucagagagcccaccgaccugaagcaguucaagcaggacgccaaguacagccacggcagagacgugaccgaccuguucgccgcccagcccggccugaccagcgccgugaucgaggcccugcccagaaacauggugaucaccugccagggcagcgaggacaucagaaagcugcuggagagccagggcagaagagacaucaagcugaucgacaucacccugagcaaggccgacagcagaaaguucgagaacgccgugugggaccaguucaaggaccugugccacaugcacaccggcguggugguggagaagaagaagagaggcggcaaggaggagaucaccccccacugcgcccugauggacugcaucauguucgacgccgccgugagcggcggccuggacgccaaggugcugagaguggugcugcccagagacaugguguucagaaccagcacccccaagguggugcugugaggacuaguuauaagacugacuagcccgaugggccucccaacgggcccuccuccccuccuugcaccgagauuaaucaaaggcucuuuucagagccaccaaaaaaaaaaaaaaaaaaaaaaaaaaaaaaaaaaaaaaaaaaaaaaaaaaaaaaaaaaaaaaaaaaaaaaaaaaaaaaaaaaaaaaaaaaaaaaaaaaaaa

SEQ ID NO: 19181 - RNA, 1986 nt, Artificial Sequence
  mRNA product Design i-3 (hSL-A100) comprising derived and/or modified sequence from LASV(Nig08-A19;Clade III)__ADU56619__SP-HsPLAT_NP(2-569) (opt4)
aggagaaagcuuaccauggacgccaugaagagaggccugugcugcgugcugcugcugugcggcgccguguucgugagccccagcgccagcaaggaggugaagagcuuccuguggacccagagccugagaagagagcugagcggcuacugcagcaacaucaagcugcagguggugaaggacgcccaggcccugcugcacggccuggacuucagcgaggugagcaacgugcagagacugaugagaaagcagaagagagacgacggcgaccugaagagacugagagaccugaaccaggccgugaacaaccugguggagcugaagagcacccagcagaagagcgugcugagagugggcacccugagcagcgacgaccugcuggugcuggccgccgaccuggagaagcugaagagcaagguggugagaaccgagagaccccugagcagcggcaucuacaugggcaaccugagcagccagcagcuggaccagagaaaggcccugcugaacaugaucggcaugaccggcggcaacggcggcagaaacaccaccagcgacggcaucgugagagugugggacgugaagaacgccgagcugcugaacaaccaguucggcaccaugcccagccugacccuggccugccugaccaagcagggccagguggaccugaacgacgccgugcaggcccugaccgaccugggccugaucuacaccgccaaguaccccaacagcagcgaccuggacagacuggcccagagccaccccauccugaacaugaucgacaccaagaagagcagccugaacaucagcggcuacaacuucagccugggcgccgccgugaaggccggcgccugcaugcuggacggcggcaacaugcuggagaccaucaaggugagcccccagaccauggacggcauccugaagagcauccugaaggugaagagaagccugggcauguucaucagcgacacccccggcgagagaaaccccuacgagaacauccuguacaagaucugccugagcggcgacggcuggcccuacaucgccagcagaaccagcaucgugggcagagccugggagaacaccgugguggaccuggagagcgacaacaagccccagaagaccggcaacggcggcagcaacaagagccugcagagcgccggcuucgccgccggccugaccuacagccagcugaugacccugaaggacagcaugcugcagcuggaccccaacgccaagaccuggauggacaucgagggcagacccgaggaccccguggagaucgcccuguaccagcccagcagcggcugcuacauccacuucuucagagagcccaccgaccugaagcaguucaagcaggacgccaaguacagccacggcaucgacgugaccgaccuguucgccgcccagcccggccugaccagcgccgugaucgaggcccugcccagaaacauggugaucaccugccagggcagcgaggacaucagaaagcugcuggagagccagggcagaagagacaucaagcugaucgacaucagccugagcaagguggacagcagaaaguucgagaacgccgugugggaccaguucaaggaccugugccacaugcacaccggcaucgugguggagaagaagaagagaggcggcaaggaggagaucaccccccacugcgcccugauggacugcaucauguucgacgccgccgugagcggcggcguggacgccaaggugcugagagccgugcugcccagagacaugguguucagaaccagcacccccaagguggugcugugaggacuaguuauaagacugacuagcccgaugggccucccaacgggcccuccuccccuccuugcaccgagauuaaucaaaggcucuuuucagagccaccaaaaaaaaaaaaaaaaaaaaaaaaaaaaaaaaaaaaaaaaaaaaaaaaaaaaaaaaaaaaaaaaaaaaaaaaaaaaaaaaaaaaaaaaaaaaaaaaaaaaa

SEQ ID NO: 19182 - RNA, 1986 nt, Artificial Sequence
  mRNA product Design i-3 (hSL-A100) comprising derived and/or modified sequence from LASV(G1180-SLE-2010;Clade IV)__AIT17169__SP-HsPLAT_NP(2-569) (opt4)
aggagaaagcuuaccauggacgccaugaagagaggccugugcugcgugcugcugcugugcggcgccguguucgugagccccagcgccagcaaggagaucaagagcuuccuguggacccagagccugagaagagagcugagcggcuacugcagcaacaucaagcugcagguggugaaggacgcccaggcccugcugcacggccuggacuucagcgaggugagcaacgugcagagacugaugagaaaggagagaagagacgacaacgaccugaagagacugagagaccugaaccaggccgugaacaaccugguggagcugaagagcacccagcagaagagcauccugagagugggcacccugaccagcgacgaccugcugauccuggccgccgaccuggagaagcugaagagcaaggugaucagaaccgagagaccccugagcgccggcguguacaugggcaaccugagcagccagcagcuggaccagagaagagcccugcugagcaugaucggcaugagcagcggcaaccagagagcccaggccggcagagacggcguggugagagugugggacgugaagaacguggagcugcugaacaaccaguucggcaccaugcccagccugacccuggccugccugaccaagcagggccagguggaccugaacgacgccgugcaggcccugaccgaccugggccugaucuacaccgccaaguaccccaacaccagcgaccuggacagacugacccagagccaccccauccugaacaugaucgacaccaagaagagcagccugaacaucagcggcuacaacuucagccugggcgccgccgugaaggccggcgccugcaugcuggacggcggcaacaugcuggagaccaucaaggugagcccccagaccauggacggcauccugaagagcauccugaaggugaagaaggcccugggcauguucaucagcgacacccccggcgagagaaaccccuacgagaacauccuguacaagaucugccugagcggcgacggcuggcccuacaucgccagcagaaccagcaucaccggcagagccugggagaacaccgugguggaccuggagagcgacggcaagccccagaaggccggcagcaacaacagcaacaagagccugcagagcgugggcuucaccgccggccugaccuacagccagcugaugacccugaaggacgccaugcugcagcuggaccccaacgccaagaccuggauggacaucgagggcagacccgaggaccccguggagaucgcccuguaccagcccagcagcggcugcuacauccacuucuucagagagcccaccgaccugaagcaguucaagcaggacgccaaguacagccacggcaucgacgugaccgaccuguucgccgcccagcccggccugaccagcgccgugaucgacgcccugcccagaaacauggugaucaccugccagggcagcgacgacaucagaaagcugcuggagagccagggcagaaaggacaucaagcugaucgacaucgcccugagcaagaccgacagcagaaaguacgagaacgccgugugggaccaguacaaggaccugugccacaugcacaccggcguggugguggagaagaagaagagaggcggcaaggaggagaucaccccccacugcgcccugauggacugcaucauguucgacgccgccgugagcggcggccugaacaccagcgugcugagagccgugcugcccagagacaugguguucagaaccagcacccccagaguggugcugugaggacuaguuauaagacugacuagcccgaugggccucccaacgggcccuccuccccuccuugcaccgagauuaaucaaaggcucuuuucagagccaccaaaaaaaaaaaaaaaaaaaaaaaaaaaaaaaaaaaaaaaaaaaaaaaaaaaaaaaaaaaaaaaaaaaaaaaaaaaaaaaaaaaaaaaaaaaaaaaaaaaaa

SEQ ID NO: 19183 - RNA, 1986 nt, Artificial Sequence
  mRNA product Design i-3 (hSL-A100) comprising derived and/or modified sequence from LASV(G1442-SLE-2011;Clade IV)__AIT17181__SP-HsPLAT_NP(2-569) (opt4)
aggagaaagcuuaccauggacgccaugaagagaggccugugcugcgugcugcugcugugcggcgccguguucgugagccccagcgccagcaaggaggugaagagcuuccuguggacccagagccugagaagagagcugagcggcuacugcagcaacaucaagcugcagguggugaaggacgcccaggcccugcugcacggccuggacuucagcgaggugagcaacgugcagagacugaugagaaagcagagaagagacgacaacgaccugaagagacugagagaccugaaccaggccgugaacaaccugguggagcugaagagcacccagcagaagagcgugcugagagugggcacccugaccagcgacgaccugcuggugcuggccgccgaccuggagaagcugaagagcaaggugaucagaaccgagagaccccugagcgccggcguguacaugggcaaccugagcagccagcagcuggaccagagaagagcccugcugaacaugaucggcaugagcggcggcauccagggcaccagaaccggcagagacggcguggugagagugugggacgugaagaacgccgaccugcugaacaaccaguucggcaccaugcccagccugacccuggccugccugaccaagcagggccagguggaccugaacgacguggugcaggcccugaccgaccugggccugaucuacaccgccaaguaccccaacgccagcgaccuggacagacugacccagagccaccccauccugaacaugaucgacaccaagaagagcagccugaacaucagcggcuacaacuucagccugggcgccgccgugaaggccggcgccugcaugcuggacggcggcaacaugcuggagaccaucaaggugagcccccagaccauggacggcauccugaagagcauccugaaggugaagaagacccugggcauguucaucagcgacacccccggcgagagaaaccccuacgagaacauccuguacaagaucugccugagcggcgacggcuggcccuacaucgccagcagaaccagcaucaccggcagagccugggagaacaccgugguggaccuggagagcgacggcaagccccagaaggccggcagcaacaacagcaacaagagccugcagagcgccggcuucgccgccggccugaccuacagccagcugaugacccugaaggacgccaugcugcagcuggaccccaacgccaagaccuggauggacaucgagggcagacccgaggaccccguggagaucgcccuguaccagcccagcagcggcugcuacauccacuucuucagagagcccaccgaccugaagcaguucaagcaggacgccaaguacagccacggcaucgacgugaccgaccuguucgccgcccagcccggccugaccagcgccgugaucgaggcccugcccagaaacauggugaucaccugccagggcagcgacgacaucaagaagcugcuggagagccagggcagaaaggacaucaagcugaucgacaucgcccugagcaagaccgacagcagaaaguacgagaacgccgugugggaccaguacaaggaccugugccacaugcacaccggcguggugguggagaagaagaagagaggcggcaaggaggagaucaccccccacugcgcccugauggacugcaucauguucgacgccgccgugagcggcggccugaacacccuggugcugagagccgugcugcccagagacaugguguucagaaccagcacccccagaguggugcugugaggacuaguuauaagacugacuagcccgaugggccucccaacgggcccuccuccccuccuugcaccgagauuaaucaaaggcucuuuucagagccaccaaaaaaaaaaaaaaaaaaaaaaaaaaaaaaaaaaaaaaaaaaaaaaaaaaaaaaaaaaaaaaaaaaaaaaaaaaaaaaaaaaaaaaaaaaaaaaaaaaaaa

SEQ ID NO: 19184 - RNA, 1986 nt, Artificial Sequence
  mRNA product Design i-3 (hSL-A100) comprising derived and/or modified sequence from LASV(G3010-SLE-2013;Clade IV)__AIT17345__SP-HsPLAT_NP(2-569) (opt4)
aggagaaagcuuaccauggacgccaugaagagaggccugugcugcgugcugcugcugugcggcgccguguucgugagccccagcgccagcaaggagaucaagagcuuccuguggacccagagccugagaagagagcugagcggcuacugcagcaacaucaagcugcagguggugaaggacgcccaggcccugcugcacggccuggacuucagcgaggugagcaacgugcagagacugaugagaaaggagagaagagacgacaacgaccugaagagacugagagaccugaaccaggccgugaacaaccugguggagcugaagagcacccagcagaagagcauccugagagugggcacccugaccagcgacgaccugcugauccuggccgccgaccuggagaagcugaagagcaaggugaccagaaccgagagaccccugagcgccggcguguacaugggcaaccugagcagccagcagcuggaccagagaagagcccugcugagcaugaucggcaugagcagcggcgugcagggcgccagagccggcagagacggcguggugagagugugggacgugaagaacgccgagcugcugaacaaccaguucggcaccaugcccagccugacccuggccugccugaccaagcagggccagguggaccugaacgacguggugcaggcccugaccgaccugggccugaucuacaccgccaaguaccccaacaccagcgaccuggacagacugacccagagccaccccauccugaacaugaucgacaccaagaagagcagccugaacaucagcggcuacaacuucagccugggcgccgccgugaaggccggcgccugcaugcuggacggcggcaacaugcuggagaccaucaaggugagcccccagaccauggacggcauccugaagagcauccugaaggugaagaaggcccugggcauguucaucagcgagacccccggcgagagaaaccccuacgagaacauccuguacaagaucugccugagcggcgacggcuggcccuacaucgccagcagaaccagcaucaccggcagagccugggagaacaccgugguggaccuggagagcgacggcaagccccagaaggccggcagcaacaacagcaacaagagccugcagagcgccggcuucaccgccggccugaccuacagccagcugaugacccugaaggacgccaugcugcagcuggaccccaacgccaagaccuggauggacaucgagggcagacccgaggaccccguggagguggcccuguaccagcccagcagcggcugcuacauccacuucuucagagagcccaccgaccugaagcaguucaagcaggacgccaaguacagccacggcaucgacgugaccgaccuguucgccgcccagcccggccugaccagcgccgugaucgacgcccugcccagaaacauggugaucaccugccagggcagcgacgacaucaagaagcugcuggagagccagggcagaaaggacaucaagcugaucgacaucgcccugagcaagaccgacagcagaaaguacgagaacgccgugugggaccaguacaaggaccugugccacaugcacaccggcguggugguggagaagaagaagagaggcggcaaggaggagaucaccccccacugcgcccugauggacugcaucauguucgacgccgccgugagcggcggccugaacaccagcgugcugagagccgugcugcccagagacaugguguucagaaccagcacccccagaguggugcugugaggacuaguuauaagacugacuagcccgaugggccucccaacgggcccuccuccccuccuugcaccgagauuaaucaaaggcucuuuucagagccaccaaaaaaaaaaaaaaaaaaaaaaaaaaaaaaaaaaaaaaaaaaaaaaaaaaaaaaaaaaaaaaaaaaaaaaaaaaaaaaaaaaaaaaaaaaaaaaaaaaaaa

SEQ ID NO: 19185 - RNA, 1986 nt, Artificial Sequence
  mRNA product Design i-3 (hSL-A100) comprising derived and/or modified sequence from LASV(G502-SLE-2009;Clade IV)__AIT17127__SP-HsPLAT_NP(2-569) (opt4)
aggagaaagcuuaccauggacgccaugaagagaggccugugcugcgugcugcugcugugcggcgccguguucgugagccccagcgccagcaaggagaucaagagcuuccuguggacccagagccugagaagagagcugagcggcuacugcagcaacaucaagcugcagguggugaaggacgcccaggcccugcugcacggccuggacuucagcgaggugagcaacgugcagagacugaugagaaaggagagaagagacgacaacgaccugaagagacugagagaccugaaccaggccgugaacaaccugguggagcugaagagcacccagcagaagagcauccugagagugggcacccugaccagcgacgaccugcugauccuggccgccgaccuggagaagcugaagagcaaggugaucagaaccgagagaccccugagcgccggcguguacaugggcaaccugagcagccagcagcuggaccagagaagagcccugcugagcaugaucggcaugagcggcggcaaccagggcgugagagccggcaaggacggcguggugagagugugggacgugaagaacgccgagcugcugaacaaccaguucggcaccaugcccagccugacccuggccugccugaccaagcagggccagguggaccugaacgacgccgugcaggcccugaccgaccugggccugaucuacaccgccaaguaccccaacaccagcgaccuggacagacugacccagagccaccccauccugaacaugaucgacaccaagaagagcagccugaacaucagcggcuacaacuucagccugggcgccgccgugaaggccggcgccugcaugcuggacggcggcaacaugcuggagaccaucaaggugagcccccagaccauggacggcauccugaagagcauccugaaggugaagaaggcccugggcauguucaucagcgacacccccggcgagagaaaccccuacgagaacauccuguacaagaucugccugagcggcgacggcuggcccuacaucgccagcagaaccagcaucaccggcagagccugggagaacaccgugguggaccuggagagcgacggcaagccccagaaggccggcagcaacaacagcaacaagagccugcagagcgccggcuucaccgccggccugaccuacagccagcugaugacccugaaggacgccaugcugcagcuggaccccaacaccaagaccuggauggacaucgagggcagacccgaggaccccguggagaucgcccuguaccagcccagcagcggcugcuacauccacuucuucagagagcccaccgaccugaagcaguucaagcaggacgccaaguacagccacggcaucgacgugaccgaccuguucgccgcccagcccggccugaccagcgccgugaucgacgcccugcccagaaacauggugaucaccugccagggcagcgacgacaucagaaagcugcuggagagccagggcagaaaggacaucaagcugaucgacaucgcccugaacaagaccgacagcagaaaguacgagaacgccgugugggaccaguacaaggaccugugccacaugcacaccggcguggugguggagaagaagaagagaggcggcaaggaggagaucaccccccacugcgcccugauggacugcaucauguucgacgccgccgugagcggcggccugaacaccagcgugcugagagccgugcugcccagagacaugguguucagaaccagcacccccagaguggugcugugaggacuaguuauaagacugacuagcccgaugggccucccaacgggcccuccuccccuccuugcaccgagauuaaucaaaggcucuuuucagagccaccaaaaaaaaaaaaaaaaaaaaaaaaaaaaaaaaaaaaaaaaaaaaaaaaaaaaaaaaaaaaaaaaaaaaaaaaaaaaaaaaaaaaaaaaaaaaaaaaaaaaa

SEQ ID NO: 19186 - RNA, 1986 nt, Artificial Sequence
  mRNA product Design i-3 (hSL-A100) comprising derived and/or modified sequence from LASV(G733-SLE-2010;Clade IV)__AIT17155__SP-HsPLAT_NP(2-569) (opt4)
aggagaaagcuuaccauggacgccaugaagagaggccugugcugcgugcugcugcugugcggcgccguguucgugagccccagcgccagcaaggagaucaagagcuuccuguggacccagagccugagaagagagcugagcggcuacugcagcaacaucaagcugcagguggugaaggacgcccaggcccugcugcacggccuggacuucagcgaggugagcaacgugcagagacugaugagaaaggagagaagagacgacaacgaccugaagagacugagagaccugaaccaggccgugaacaaccugguggagcugaagagcacccagcagaagagcgugcugagagugggcacccugaccagcgacgagcugcuggugcuggccgccgaccuggagaagcugaagagcaaggugaucagaaccgagagaccccugagcgccggcguguacaugggcaaccugagcagccagcagcuggaccagagaagagcccugcugagcaugaucggcaugagcggcggcaaccagggcgccagaaccggcagagacggcguggugagagugugggacgugaagaacgccgagcugcugaacaaccaguucggcaccaugcccagccugacccuggccugccugaccaagcagggccagguggaccugaacgacgccgugcaggcccugaccgaccugggccugaucuacaccgccaaguaccccaacaccagcgaccuggacagacugacccagagccaccccauccugaacaugaucgacaccaagaagagcagccugaacaucagcggcuacaacuucagccugggcgccgccgugaaggccggcgccugcaugcuggacggcggcaacaugcuggagaccaucaaggugagcccccagaccauggacggcauccugaagagcauccugaaggugaagaaggcccugggcauguucaucagcgacacccccggcgagagaaaccccuacgagaacauccuguacaagaucugccugagcggcgacggcuggcccuacaucgccagcagaaccagcaucaccggcagagccugggagaacaccgugguggaccuggagagcgacggcaagccccagaaggccggcagcaacaacagcaacaagagccugcagagcgccggcuucaccgccggccugaccuacagccagcugaugacccugaaggacgccaugcugcagcuggaccccaacgccaagaccuggauggacaucgagggcagacccgaggaccccguggagaucgcccuguaccagcccagcagcggcugcuacauccacuucuucagagagcccaccgaccugaagcaguucaagcaggacgccaaguacagccacggcaucgacgugaccgaccuguucgccgcccagcccggccugaccagcgccgugaucgacgcccugcccagaaacauggugaucaccugccagggcagcgacgacaucagaaagcugcuggagagccagggcagaaaggacaucaagcugaucgacaucgcccugagcaagaucgacagcagaaaguacgagaacgccgugugggaccaguacaaggaccugugccacaugcacaccggcguggugguggagaagaagaagagaggcggcaaggaggagaucaccccccacugcgcccugauggacugcaucauguucgacgccgccgugagcggcggccugaacagccuggugcugagagccgugcugcccagagacaugguguucagaaccagcacccccagaguggugcugugaggacuaguuauaagacugacuagcccgaugggccucccaacgggcccuccuccccuccuugcaccgagauuaaucaaaggcucuuuucagagccaccaaaaaaaaaaaaaaaaaaaaaaaaaaaaaaaaaaaaaaaaaaaaaaaaaaaaaaaaaaaaaaaaaaaaaaaaaaaaaaaaaaaaaaaaaaaaaaaaaaaaa

SEQ ID NO: 19187 - RNA, 1986 nt, Artificial Sequence
  mRNA product Design i-3 (hSL-A100) comprising derived and/or modified sequence from MOPV/LASV reassortant(IGS-1;Clade IV)__AFY05578__SP-HsPLAT_NP(2-569) (opt4)
aggagaaagcuuaccauggacgccaugaagagaggccugugcugcgugcugcugcugugcggcgccguguucgugagccccagcgccagcaaggagaucaagagcuuccuguggacccagagccugagaagagagcugagcggcuacugcagcaacaucaagcugcagguggugaaggacgcccaggcccugcugcacggccuggacuucagcgaggugagcaacgugcagagacugaugagaaaggagagaagagacgacaacgaccugaagagacugagagaccugaaccaggccgugaacaaccugguggagcugaagagcacccagcagaagagcauccugagagugggcacccugaccagcgacgaccugcugauccuggccgccgaccuggagaagcugagaagcaaggugaucagaaccgagagaccccugagcgccggcguguacaugggcaaccugagcagccagcagcuggaccagagaagagcccugcugaacaugaucggcaugagcggcggcaaccagggcgccagagccggcagagacggcguggugagagugugggacgugaagaacgccgagcugcugagcaaccaguucggcaccaugcccagccugacccuggccugccugaccaagcagggccagguggaccugaacgacgccgugcaggcccugaccgaccugggccugaucuacaccgccaaguaccccaacaccagcgaccuggacagacugacccagagccaccccauccugaacaugaucgacaccaagaagagcagccugaacaucagcggcuacaacuucagccugggcgccgccgugaaggccggcgccugcaugcuggacggcggcaacaugcuggagaccaucaaggugagcccccagaccauggacggcauccugaagagcauccugaaggugaagaaggcccugggcauguucaucagcgacacccccggcgagagaaaccccuacgagaacauccuguacaagaucugccugagcggcgacggcuggcccuacaucgccagcagaaccagcaucaccggcagagccugggagaacaccgugguggaccuggagagcgacggcaagccccagaaggccgacagcaacaacagcagcaagagccugcagagcgccggcuucaccgccggccugaccuacagccagcugaugacccugaaggacgccaugcugcagcuggaccccaacgccaagaccuggauggacaucgagggcagacccgaggaccccguggagaucgcccuguaccagcccagcagcggcugcuacauccacuucuucagagagcccaccgaccugaagcaguucaagcaggacgccaaguacagccacggcaucgacgugaccgaccuguucgccacccagcccggccugaccagcgccgugaucgacgcccugcccagaaacauggugaucaccugccagggcagcgacgacaucagaaagcugcuggagagccagggcagaaaggacaucaagcugaucgacaucgaccugagcaagaccgacagcagaaaguacgagaacgccgugugggaccaguacaaggaccugugccacaugcacaccggcguggugguggagaagaagaagagaggcggcaaggaggagaucaccccccacugcgcccugauggacugcaucauguucgacgccgccgugagcggcggccugaacaccagcgugcugagagccgugcugcccagagacaugguguucagaaccagcacccccagaguggugcugugaggacuaguuauaagacugacuagcccgaugggccucccaacgggcccuccuccccuccuugcaccgagauuaaucaaaggcucuuuucagagccaccaaaaaaaaaaaaaaaaaaaaaaaaaaaaaaaaaaaaaaaaaaaaaaaaaaaaaaaaaaaaaaaaaaaaaaaaaaaaaaaaaaaaaaaaaaaaaaaaaaaaa

SEQ ID NO: 19188 - RNA, 1986 nt, Artificial Sequence
  mRNA product Design i-3 (hSL-A100) comprising derived and/or modified sequence from LASV(LM765-SLE-2012;Clade IV)__AIT17815__SP-HsPLAT_NP(2-569) (opt4)
aggagaaagcuuaccauggacgccaugaagagaggccugugcugcgugcugcugcugugcggcgccguguucgugagccccagcgccagcaaggagaucaagagcuuccuguggacccagagccugagaagagagcugagcggcuacugcagcaacaucaagcugcagguggugaaggacgcccaggcccugcugcacggccuggacuucagcgaggugagcaacgugcagagacugaugagaaaggagagaagagacgacaacgaccugaagagacugagagaccugaaccaggccgugaacaaccugguggagcugaagagcacccagcagaagagcauccugagagugggcacccugaccagcgacgaccugcugauccuggccgccgaccuggagaagcugaagagcaaggugaccagaaccgagagaccccugagcgccggcguguacaugggcaaccugagcagccagcagcuggaccagagaagagcccugcuggacaugaucggcaugagcggcagcaaccagggcgccagagccggcagagacggcguggugagagugugggacgugaagaacgccgagcugcugaacaaccaguucggcaccaugcccagccugacccuggccugccugaccaagcagggccagguggaccugaacgacgccgugcaggcccugaccgaccugggccugaucuacaccgccaaguaccccaacaccagcgaccuggacagacugacccagagccaccccauccugaacaugaucgacaccaagaagagcagccugaacaucagcggcuacaacuucagccugggcgccgccgugaaggccggcgccugcaugcuggacggcggcaacaugcuggagaccaucaaggugagcccccagaccauggacggcauccugaagagcauccugaaggugaagaaggcccugggcauguucaucagcgacgcccccggcgagagaaaccccuacgagaacauccuguacaagaucugccugagcggcgacggcuggcccuacaucgccagcagaaccagcaucaccggcagagccugggagaacaccgugguggaccuggagagcgacggcaagccccagaaggccggcagcaacggcagcaacaagagccugcagagcgccggcuucaccgccggccugaccuacagccagcugaugacccugaaggacgccaugcugcagcuggaccccaacgccaagaccuggauggacaucgagggcagacccgaggaccccguggagaucgcccuguaccagcccagcagcggcugcuacauccacuucuucagagagcccaccgaccugaagcaguucaagcaggacgccaaguacagccacggcaucgacgugaccgaccuguucgccgcccagcccggccugaccagcgccgugaucgacgcccugcccagaaacauggugaucaccugccagggcagcgacgacaucagaaagcuguucgagagccagggcagaaaggacaucaagcugaucgacaucgcccugagcaagaccgacagcagaaaguacgagaacgccgugugggaccaguacaaggaccugugccacaugcacaccggcaucgugguggagaagaagaagagaggcggcaaggaggagaucaccccccacugcgcccugauggacugcaucauguucgacgccgccgugagcggcggccugaacaccagcgugcugagagccgugcugcccagagacaugguguucagaaccagcacccccagaguggugcugugaggacuaguuauaagacugacuagcccgaugggccucccaacgggcccuccuccccuccuugcaccgagauuaaucaaaggcucuuuucagagccaccaaaaaaaaaaaaaaaaaaaaaaaaaaaaaaaaaaaaaaaaaaaaaaaaaaaaaaaaaaaaaaaaaaaaaaaaaaaaaaaaaaaaaaaaaaaaaaaaaaaaa

SEQ ID NO: 19189 - RNA, 1986 nt, Artificial Sequence
  mRNA product Design i-3 (hSL-A100) comprising derived and/or modified sequence from LASV(LM776-SLE-2012;Clade IV)__AIT17825__SP-HsPLAT_NP(2-569) (opt4)
aggagaaagcuuaccauggacgccaugaagagaggccugugcugcgugcugcugcugugcggcgccguguucgugagccccagcgccagcaaggagaucaagagcuuccuguggacccagagccugagaagagagcugagcagcuacugcagcaacaucaagcugcagguggugaaggacgcccaggcccugcugcacggccuggacuucagcgaggugagcaacgugcagagacugaugagaaaggagagaagagacgacaacgaccugaagagacugagagaccugaaccaggccgugaacaaccugguggagcugaagagcacccagcagaagagcauccugagagugggcacccugaccagcgacgaccugcugauccuggccgccgaccuggagaagcugaagagcaaggugaccagaaccgagagaccccugagcgccggcguguacaugggcaaccugagcagccagcagcuggaccagagaagagcccugcugagcaugaucggcaugagcggcagcaaccagggcgccagagccggcagagacggcguggugagagugugggacgugaagaacgccgagcugcugaacaaccaguucggcaccaugcccagccugacccuggccugccugaccaagcagggccagguggaccugaacgacgccgugcaggcccugaccgaccugggccugaucuacaccgccaaguaccccaacaccagcgaccuggacagacugacccagagccaccccauccugaacaugaucgacaccaagaagagcagccugaacaucagcggcuacaacuucagccugggcgccgccgugaaggccggcgccugcaugcuggacggcggcaacaugcuggagaccaucaaggugagcccccagaccauggacggcauccugaagagcauccugaaggugaagaaggcccugggcauguucaucagcgacacccccggcgagagaaaccccuacgagaacauccuguacaagaucugccugagcggcgacggcuggcccuacaucgccagcagaaccagcaucaccggcagagccugggagaacaccgugguggaccuggagagcgacggcaagccccagaaggccggcagcaacaacagcaacaagagccugcagagcgccggcuucaccgccggccugaccuacagccagcugaugacccugaaggacgccaugcugcagcuggaccccaacgccaagaccuggauggacaucgagggcagacccgaggaccccguggagguggcccuguaccagcccagcagcggcugcuacauccacuucuucagagagcccaccgaccugaagcaguucaagcaggacgccaaguacagccacggcaucgacgugaccgaccuguucgccgcccagcccggccugaccagcgccgugaucgacgcccugcccagaaacauggugaucaccugccagggcagcgacgacaucagaaagcugcuggagagccagggcagaaaggacaucaagcugaucgacaucgcccugagcaagaccgacagcagaaaguacgagaacgccgugugggaccaguacaaggaccugugccacaugcacaccggcguggugguggagaagaagaagagaggcggcaaggaggagaucaccccccacugcgcccugauggacugcaucauguucgacgccgccgugagcggcggccugaacaccagcgugcugagagccgugcugcccagagacaugguguucagaaccagcacccccagaguggugcugugaggacuaguuauaagacugacuagcccgaugggccucccaacgggcccuccuccccuccuugcaccgagauuaaucaaaggcucuuuucagagccaccaaaaaaaaaaaaaaaaaaaaaaaaaaaaaaaaaaaaaaaaaaaaaaaaaaaaaaaaaaaaaaaaaaaaaaaaaaaaaaaaaaaaaaaaaaaaaaaaaaaaa

SEQ ID NO: 19190 - RNA, 1986 nt, Artificial Sequence
  mRNA product Design i-3 (hSL-A100) comprising derived and/or modified sequence from LASV(Mad39;Clade IV)__ANH09723__SP-HsPLAT_NP(2-569) (opt4)
aggagaaagcuuaccauggacgccaugaagagaggccugugcugcgugcugcugcugugcggcgccguguucgugagccccagcgccagcaaggagaucaagagcuuccuguggacccagagccugagaagagagcugagcggcuacugcagcaacaucaagcugcagguggugaaggacgcccaggcccugcugcacggccuggacuucagcgaggugagcaacgugcagagacugaugagaaagcagagaagagacgacaacgaccugaagagacugagagaccugaaccaggccgugaacaaccugguggagcugaagagcacccagcagaagagcgugcugagagugggcacccugaccagcgacgaccugcugacccuggccgccgaccuggagaagcugaagagcaaggugaccagaaccgagagaccccugaccgccggcguguacaugggcaaccugagcagccagcagcuggaccagagaagagcccugcugaacaugaucggcaugagcggcggcaaccagggcgccagaaccggcagagacggcguggugagagugugggacgugaagaacgccgagcugcugaacaaccaguucggcaccaugcccagccugacccuggccugccugaccaagcagggccagguggaccugaacgacguggugcaggcccugaccgaccugggccugaucuacaccgccaaguaccccaacaccagcgaccuggacagacugacccagagccaccccauccugaacaugaucgacaccaacaagagcagccugaacaucagcggcuacaacuucagccugggcgccgccgugaaggccggcgccugcaugcuggacggcggcaacaugcuggagaccaucaaggugagcccccagaccauggacggcauccugaagagcauccugaaggugaagaagagccugggcauguucaucagcgacacccccggcgagagaaaccccuacgagaacauccuguacaagaucugccugagcggcgacggcuggcccuacaucgccagcagaaccagcaucaccggcagagccugggagaacaccgugguggaccuggagagcggcggcaagccccagaaggccggcagcaacaacagcaacaagagccugcagagcgccggcuucgccgccggccugaccuacagccagcugaugacccugaaggacgccaugcugcagcuggaccccaacgccaagaccuggauggacaucgagggcagacccgaggaccccguggagaucgcccuguaccagcccaucagcggcugcuacauccacuucuucagagagcccaccgaccugaagcaguucaagcaggacgccaaguacagccacggcaucgacgugaccgaccuguucgccgcccagcccggccugaccagcgccgugaucgaggcccugcccagaaacauggugaucaccugccagggcagcgacgacaucagaaagcuguucgagagccagggcagaaaggacaucaagcugaucgacaucgcccugagcaagaccgacagcagaaaguacgagaacgccgugugggaccaguacaaggaccugugccacaugcacaccggcguggugguggagaagaagaagaagggcggcaaggaggagaucaccccccacugcgcccugauggacugcaucauguucgacgccgccgugagcggcggccugaacacccuggugcugagagccgugcugcccagagacaugguguucagaaccagcacccccaagguggugcugugaggacuaguuauaagacugacuagcccgaugggccucccaacgggcccuccuccccuccuugcaccgagauuaaucaaaggcucuuuucagagccaccaaaaaaaaaaaaaaaaaaaaaaaaaaaaaaaaaaaaaaaaaaaaaaaaaaaaaaaaaaaaaaaaaaaaaaaaaaaaaaaaaaaaaaaaaaaaaaaaaaaaa

SEQ ID NO: 19191 - RNA, 1986 nt, Artificial Sequence
  mRNA product Design i-3 (hSL-A100) comprising derived and/or modified sequence from LASV(Z0947-SLE-2011;Clade IV)__AIT17841__SP-HsPLAT_NP(2-569) (opt4)
aggagaaagcuuaccauggacgccaugaagagaggccugugcugcgugcugcugcugugcggcgccguguucgugagccccagcgccagcaaggagaucaagagcuuccuguggacccagagccugagaagagagcugagcggcuacugcagcaacaucaagcugcagguggugaaggacgcccaggcccugcugcacggccuggacuucagcgaggugagcaacgugcagagacugaugagaaaggagagaagagacgacaacgaccugaagagacugagagaccugaaccaggccgugaacaaccugguggagcugaagagcacccagcagaagagcauccugagagugggcacccugaccagcgacgaccugcugauccuggccgccgaccuggagaagcugaagagcaaggugaccagaaccgagagaccccugagcgccggcguguacaugggcaaccugagcagccagcagcuggaccagagaagagcccugcugaacaugaucggcaugagcggcagcaaccagggcgccagaaccggcagagacggcguggugagagugugggacgugaagaacgccgagcugcugaacaaccaguucggcaccaugcccagccugacccuggccugccugaccaagcagggccagguggaccugaacgacgccgugcaggcccugaccgaccugggccugaucuacaccgccaaguaccccaacaccagcgaccuggacagacugacccagagccaccccauccugaacaugaucgacaccaagaagagcagccugaacaucagcggcuacaacuucagccugggcgccgccgugaaggccggcgccugcaugcuggacggcggcaacaugcuggagaccaucaaggugagcccccagaccauggacggcauccugaagagcauccugaaggugaagaaggcccugggcauguucaucagcgacgcccccggcgagagaaaccccuacgagaacauccuguacaagaucugccugagcggcgacggcuggcccuacaucgccagcagaaccagcaucaccggcagagccugggagaacaccgugguggaccuggagagcgacggcaagccccagaaggccggcagcaacggcagcaacaagagccugcagagcgccggcuucaccgccggccugaccuacagccagcugaugacccugaaggacgccaugcugcagcuggaccccaacgccaagaccuggauggacaucgagggcagacccgaggaccccguggagaucgcccuguaccagcccagcagcggcugcuacauccacuucuucagagagcccaccgaccugaagcaguucaagcaggacgccaaguacagccacggcaucgacgugaccgaccuguucgccgcccagcccggccugaccagcgccgugaucgacgcccugcccagaaacauggugaucaccugccagggcagcgacgacaucagaaagcuguucgagagccagggcagaaaggacaucaagcugaucgacaucgcccugagcaagaccgacagcagaaaguacgagaacgccgugugggaccaguacaaggaccugugccacaugcacaccggcaucgugguggagaagaagaagagaggcggcaaggaggagaucaccccccacugcgcccugauggacugcaucauguucgacgccgccgugagcggcggccugaacaccagcgugcugagagccgugcugcccagagacaugguguucagaaccagcacccccagaguggugcugugaggacuaguuauaagacugacuagcccgaugggccucccaacgggcccuccuccccuccuugcaccgagauuaaucaaaggcucuuuucagagccaccaaaaaaaaaaaaaaaaaaaaaaaaaaaaaaaaaaaaaaaaaaaaaaaaaaaaaaaaaaaaaaaaaaaaaaaaaaaaaaaaaaaaaaaaaaaaaaaaaaaaa

SEQ ID NO: 19192 - RNA, 1986 nt, Artificial Sequence
  mRNA product Design i-3 (hSL-A100) comprising derived and/or modified sequence from LASV(Josiah;Clade IV)__NP_694869__SP-HsPLAT_NP(2-569) (opt5)
aggagaaagcuuaccauggacgccaugaagagaggccugugcugugugcuccugcuuugcggggcugucuucguuagccccagcgccuccaaggagaucaaaucuuuccuguggacccagagccucagacgggaacuguccggcuacugcucuaacauuaagcugcaaguggucaaagacgcucaggcccugcuccacgggcuggauuuuagcgagguuuccaaugugcagcgccuuaugagaaaggaacggcgcgacgauaacgaccugaaaagacuccgggaucugaaucaggcggugaacaaucuggucgagcucaagucuacacaacaaaagagcauccugcgcgugggaacgcuuaccuccgacgaucugcucauucuggcugccgaccuugaaaaacuuaagagcaaaguuaucagaacagagcggccccucucugccggcguguauauggggaaccuguccagccagcagcuggaucagcgcagagcucuccugaauaugauuggaaugucuggcgggaaccagggagcccgggcuggccgcgacggcgucgugagaguuugggaugugaagaaugccgagcuucugaacaaucaguucgggaccaugccuucccucacacuggcgugucuuaccaaacagggacaagucgaccugaacgaugccgugcaggcucucacagaccugggccugaucuacaccgccaaguauccgaauacgagcgaccucgaucggcugacccagucucaucccauccuuaacaugauugacacaaagaaauccagccugaauaucuccggguacaacuuuucucucggagcugccgugaaggcgggcgccugcaugcuggaugggggaaacaugcuugaaaccauuaaagucagcccucaaacaauggacggcauccugaaguccauucucaaaguuaagaaagcucugggcauguucaucagcgauacccccggggagcgcaauccuuaugaaaacauucuguacaagaucugucucucuggagacggcuggcccuauaucgccuccagaacgagcauuacagggcgggcuugggagaauaccgugguggaucuggagucugacggaaagccucagaaagccgauagcaacaauuccucuaagagccuucaguccgccggcuuuacagcugggcugaccuacagccagcucaugacccugaaagacgcgaugcugcaacuugauccgaacgccaagacauggauggacaucgaaggaagacccgaggacccugucgaaauugcucucuaccagcccucuuccggcugcuauauccacuucuuucgcgagccuacggaucugaaacaguucaagcaggacgccaaguacagccauggcauugaugugaccgaccuguuugccacacaacccgggcucaccucugcuguuaucgaugcccugccgcggaauauggugaucacaugucagggauccgacgauauuagaaaacuucuggaaagccagggccgcaaggacaucaaacucauugauaucgcgcuguccaagaccgacucucggaaauaugagaacgcugucugggaucaguacaaggaccugugccacaugcauacgggggugguuguggagaagaaaaagagaggaggcaaagaagagauuacaccucacugugcccuuauggauugcaucauguucgacgccgcugucagcgggggccucaauaccuccgugcugcgcgccguccugccccgggacaugguguuuagaaccucuacaccucgcguugugcucugaggacuaguuauaagacugacuagcccgaugggccucccaacgggcccuccuccccuccuugcaccgagauuaaucaaaggcucuuuucagagccaccaaaaaaaaaaaaaaaaaaaaaaaaaaaaaaaaaaaaaaaaaaaaaaaaaaaaaaaaaaaaaaaaaaaaaaaaaaaaaaaaaaaaaaaaaaaaaaaaaaaaa

SEQ ID NO: 19193 - RNA, 1986 nt, Artificial Sequence
  mRNA product Design i-3 (hSL-A100) comprising derived and/or modified sequence from LASV(LP;Clade I)__AAF86702__SP-HsPLAT_NP(2-569) (opt5)
aggagaaagcuuaccauggacgccaugaagagaggccugugcugugugcuccugcuuugcggggcugucuucguuagccccagcaacuccaaggagaucaaaucuuuccuguggacccagagccucagacgggaacuguccggcuacugcucuaauauuaagcuccaaguggucaaagacgcccaggcucugcuccacgggcuggauuuuagcgagguuuccaacgugcagcgccuuaugagaaagcagaaacgggacgaugccgaccugaagcgccucagagaucugaaucaagcggugaacaaucuggucgaacucaagucuacacagcagaaaaacgugcugcggguuggaacgcuuagcuccgacgaucugaucacccucgcugccgaccuggagaaacuuaaaagcaaggugauucgcacagaaagaccccugucuuccggcgucuauauggggaaucucagcucucagcaacuggaucagcggcgcgcccugcucuccaugaucggaaugagcggcgggccucagggaaacagaaccggcggcgacggggugguucgggugugggaugucaaaaaugcugagcugcuuaacaaucaguucggaacaaugccgucucugacccucgccugucugacaaagcaaggccagguggaccuuaacgaugcugugcaggcccugaccgaccucgggcugauuuacacggcgaaguaucccaauuccagcgaccuggauaugcucacccaaucccauccuauccugggaauggucgacacaaagaagucuagccuuaacaucuccggcuacaauuuuagccugggggccgcuguuaaagccggagcuugcaugcucgauggcggcaacaugcuggagaccauuaaggugucuccccagacaauggacgggauccuuaaauccauucugaaggugaaacgcagccucggaauguucaucucugauaccccuggcgaaagaaaccccuaugagaauauucuguacaagaucugucugagcggggaaggauggccuuauauugccucccggacgucuaucacaggccgcgcgugggagaacacccucgucgaccuggagagcgauaauaagccgcccaaacuuaacuccgccgggagcaauaagucucugcaggcugccggacucaacgcuggccugacauacucccagcugaugacccuuaaagacugcaugcuccaacuggauccuagcucuaagaccuggaucgacauugaaggcagacccgaggauccuguggaaaucgcccuguuucagcccuccagcggguguuacauucacuucuuucgggagccgacagaccucaaacaguucaagcaggacgccaaguauucccauggaaucgauguuacggaccuguuuucuacccaaccuggccuuacaagcgcugugauugaagcgcugcccagaaauaugguccuuaccugccagggguccgaugacaucaaaaagcugcuggagucucagggacgccgggauaucaaacuuauugacaucagccucuccaaggccgauagcagaaaauucgagaacgcugugugggaccaguacaaggaucugugucacaugcauacaggcguuguggucgaaaagaaaaagcgcgggggcaaagaggaaauuaccccucacugcgcccugcucgacuguaucauguuugaugccgcuacgacaggaucucugaauauuaccacccuucgggccgugcugcccagagacauggucuuccgcacauccacccccaaggugguucucugaggacuaguuauaagacugacuagcccgaugggccucccaacgggcccuccuccccuccuugcaccgagauuaaucaaaggcucuuuucagagccaccaaaaaaaaaaaaaaaaaaaaaaaaaaaaaaaaaaaaaaaaaaaaaaaaaaaaaaaaaaaaaaaaaaaaaaaaaaaaaaaaaaaaaaaaaaaaaaaaaaaaa

SEQ ID NO: 19194 - RNA, 1986 nt, Artificial Sequence
  mRNA product Design i-3 (hSL-A100) comprising derived and/or modified sequence from LASV(803213;Clade II)__AAF86704__SP-HsPLAT_NP(2-569) (opt5)
aggagaaagcuuaccauggacgccaugaagagaggccugugcugugugcuccugcuuugcggggcugucuucguuagccccagcgccuccaaggaggugaaaucuuuccuguggacccagagccucagacgggaacuguccggcuacugcucuaacaucaaacuucaagucguuaaggacgcucaggcccugcuccacgggcuggauuuuagcgaggugaauaacgugcagcgccuuaugagaaagcagaaacgggacgauggagaccugaagcgccucagagaucugaaucaagcggucaacaaucugguggaacucaaguccacacagcagaaaucuauucugcggguuggcacgcuuaccagcgacgaucugcucacacuggcugccgaccuugagaagcugaaauccaaggugauccgcaccgaaagaccccucagcucuggggucuauaugggaaaccuguccacacagcaacuggagcagcggcgcgcccuccugaauaugauuggcauggugggaggagcucagggcacccagccuggcagagaugggguugugcgggucugggacgugaaaaacccggaucuucugaauaaccaauucggaacaaugcccagccucacccuggccugucuuacgaagcagggccagguggaccugaaugaugcuguccucgcccugaccgaccuggggcucaucuacacagcgaaguauccuaacucuuccgaccuggaucgccuuagccaaucucaucccauucugaauaugguugacaccaaaaaguccagccucaacaucuccggauacaauuuuucucugggcgccgcugugaaagccggggcuugcaugcuugauggaggcaacaugcuggagacaaucaaggugaccccucagacgauggacggcauucucaaaagcauccugaaggucaaaagaucccuggggauguucgugagcgauacacccggagaacggaacccuuaugagaauauucucuacaagaucugucugucuggcgacggguggccguauauugccucccgcaccagcaucguugggagagcgugggaaaacacaaccguggaucuugagucugacggcaagccccagaaagucgggaccgccggaagcaauaagucccugcagucugcuggcuuuccuacaggccucacguacagccaacugaugacccugaaagauuccaugaugcagcuugaccccagcgccaagacauggauugauaucgaggggcggccugaagaccccguggagaucgcucucuaccagccgaugucuggaugcuauauucacuucuuuagagaaccuaccgaccugaaacaguucaagcaagaugccaaguacucccauggcaucgacguugccgaucuguuucccgcucagccugggcucacaagcgcggugauugaggcccugccccgcaacaugguccuuaccugucagggaucugacgauaucaaaaagcugcucgacucccagggccggagagauauuaaacugaucgacaucagccuguccaagguggauucucgcaaauucgaaaaugcugucugggaccaaugcaaggaucuuugucacaugcauacgggggugguuguggagaagaaaaagcggggcggaaaagaggaaauuacaccccacugcgcccucauggacuguaucauguuugaugccgcugucagcggcgggcugaacauuccugugcugagagccguucucccgcgcgacaugguguuccggaccuccucucccaaggucgugcugugaggacuaguuauaagacugacuagcccgaugggccucccaacgggcccuccuccccuccuugcaccgagauuaaucaaaggcucuuuucagagccaccaaaaaaaaaaaaaaaaaaaaaaaaaaaaaaaaaaaaaaaaaaaaaaaaaaaaaaaaaaaaaaaaaaaaaaaaaaaaaaaaaaaaaaaaaaaaaaaaaaaaa

SEQ ID NO: 19195 - RNA, 1989 nt, Artificial Sequence
  mRNA product Design i-3 (hSL-A100) comprising derived and/or modified sequence from LASV(GA391;Clade III)__CAA36646__SP-HsPLAT_NP(2-570) (opt5)
aggagaaagcuuaccauggacgccaugaagagaggccugugcugugugcuccugcuuugcggggcugucuucguuagccccagcgccuccaaggaggugagaucuuuccuguggacccagagccuccggcgcgaacuguccggcuacugcucuaacaucaaacuucaagucguuaaggacgcucaggcccugcuccacgggcuggauuuuagcgagguguccaaugugcagagacuuaugcggaaacagaagcgcgacgauggagaccugaaaagacuccgggaucugaaccaagcggucaauaaccugguggaacucaagucuacacagcagaaaagcguucugcgcgugggcacgcuuuccagcgacgaucugcucauucuggcugccgaccuugagaaacugaagucuaaagucaccagaacagaacggccccucuccagcgggguguauaugggaaaucugucuucccagcaacuggaucagcgcagagcccuccugaacaugaucggcaugaccgggguuagcggaggcggcaagggggcuucugacggaauugugcgggucugggaugugaaaaaugccgagcuucugaacaaucaguucggcacaaugccuucccucacccuggcuugucuuacaaagcaggggcaaguggaccugaacgaugccguccaggcgcucaccgaccugggacugaucuacacggccaaguauccgaauagcuccgaccucgaucgccugucucagagccaucccauucuuaacaugaucgacaccaaaaaguccagccugaauaucucuggcuacaacuuuucccucggggcugccguuaaagcuggagccugcaugcuggauggcggcaauaugcuugagacaauuaaggugagcccucaaaccauggacgggauccugaaaucuauucucaaggugaaaaagagccugggaauguucgucuccgauacacccggcgaaagaaacccuuaugagaacauccuguacaagauuugucucucuggggacggauggcccuauaucgcgagccggaccuccauugugggccgcgccugggaaaauacgguuguggaucuggagcaggacaacaaaccucagaagaucgggaauggaggcagcaacaaaucucuucaguccgcuggcuuugccgcugggcugacauacagccaacucaugacccugaaggauuucaaaugcuuuaaucugaucccgaacgccaagacauggauggacauugagggaagacccgaagauccugucgagaucgcccuuuaccagcccucuuccggcuguuaugugcacuucuuucgggaaccuaccgaccucaagcaguucaaacaggacgcuaaguacagccaugggauugauguuaccgaccuguuugcggcccaacccggacugacauccgcugugaucgaggcccucccgagaaauauggucauuacgugccagggcucugaagauauccgcaaacugcuugagagccaggggcggagagacaucaagcugauugauaucacccucuccaaagccgacucucgcaaguucgagaacgcugugugggaucaguuuaaggaccugugucacaugcauacaggcgucgugguugaaaagaagaaacggggaggcaaggaggaaauuaccccucacugcgcccugauggauuguaucauguucgacgcggcugugagcgggggacuugaugccaaaguccucagagugguucugccccgcgacaugguguuccggacauccaccccuaaggucgugcugugaggacuaguuauaagacugacuagcccgaugggccucccaacgggcccuccuccccuccuugcaccgagauuaaucaaaggcucuuuucagagccaccaaaaaaaaaaaaaaaaaaaaaaaaaaaaaaaaaaaaaaaaaaaaaaaaaaaaaaaaaaaaaaaaaaaaaaaaaaaaaaaaaaaaaaaaaaaaaaaaaaaaa

SEQ ID NO: 19196 - RNA, 1986 nt, Artificial Sequence
  mRNA product Design i-3 (hSL-A100) comprising derived and/or modified sequence from LASV(AV;Clade V)__CCA30315__SP-HsPLAT_NP(2-569) (opt5)
aggagaaagcuuaccauggacgccaugaagagaggccugugcugugugcuccugcuuugcggggcugucuucguuagccccagcgccuccaaggaggugaaaucuuuccuguggacccagagccucagacgggaacuguccggcuacugcucuaacaucaaacuucaagucguuaaggacgcucaggcccugcuccacgggcuggauuuuagcgagguguccaaugugcagcgccuuaugagaaagcagcggcgcgacgauucugaccugaaaagacuccgggaucugaaccaagcggucaauaaccugguggaacucaagagcacacagcagaaguccguucugcgcgugggaacgcuuagcucugacgaucugcucacccuggcugccgaccuugagaaacugaaguccaaagucacaagaaccgaacggccccucagcucuggcguguauauggggaaucuguccagccagcaacuggaucagcgcagagcccuccugaaccuuauuggaaugacaaauggcucucaggggucccaggcuggacgggacggcguugugcgcgucugggaugugaagaacgccgagcugcucaauaaccaauucggcaccaugccuagccugacacuugcuugucugaccaaacagggacagguggaccucaaugaugucguucaagcccugacggaccuggggcucaucuacaccgcgaaguauccgaacacauccgaccuggauagacuuacccagucucaucccauucugaauaugaucgacacaaagaaaagcucccucaacauuagcggcuacaauuuuucucugggggccgcugugaaggccggagcuugcaugcuugauggcgggaacaugcuggagaccaucaaaguguccccucagagcauggacggaauccucaagucuauucugaaagucaagcgggcccugggcauguucgugagcgauacgcccggcgaacgcaacccuuaugagaauauccucuacaaaauuugucuguccggggacggauggcccuauaucgcgucuagaacaagcauuguuggccgggccugggaaaacaccguggucgaucuugagacagacgggaagccucagaagaucggauccggcaauagcaacaaaucucugcaauccgcuggguuuagcgccggacucaccuacucucagcugaugacccugaaggaugcuaugcuucagcucgacccgaaugccaaaacauggauggauauugagggcagacccgaagacccuguggagguugcccuguaccagcccaucuccggcugcuauauccacuucuuucgcgaaccuacggaccugaagcaauucaaacaggaugcuaaguacagccaugggauugacaucgcggaucucuuugccgcucagcccggacugaccuccgccgugauugaggcccuuccgcggaacauggucaucacaugucagggcucugaagacauuaagaaacugcucgagagccaagggagaaaggauaucaaacugaucgacauugcucuguccaagaucgauucucgcaaauucgagaaugccgugugggaccaguauaaggaucuuugccacaugcauaccggagucgugguugaaaagaaaaagcggggcgggaaagaggaaauuacaccucacugugcgcucauggacugcaucauguuugaugcugccgugagcggcggacugaacacccugguccucagagccgugcugccccgcgacaugguuuuccggacguccacaccuagagugguccuuugaggacuaguuauaagacugacuagcccgaugggccucccaacgggcccuccuccccuccuugcaccgagauuaaucaaaggcucuuuucagagccaccaaaaaaaaaaaaaaaaaaaaaaaaaaaaaaaaaaaaaaaaaaaaaaaaaaaaaaaaaaaaaaaaaaaaaaaaaaaaaaaaaaaaaaaaaaaaaaaaaaaaa

SEQ ID NO: 19197 - RNA, 1986 nt, Artificial Sequence
  mRNA product Design i-3 (hSL-A100) comprising derived and/or modified sequence from LASV(Togo/2016/7082;Clade VI)__AMR44578__SP-HsPLAT_NP(2-569) (opt5)
aggagaaagcuuaccauggacgccaugaagagaggccugugcugugugcuccugcuuugcggggcugucuucguuagccccagcaacuccaaggaggugaaaucuuuccuguggacccagagccucagacgggaacuguccggcuacugcucuaauaucaaacuucaagucguuaaagacgcccaggcucugcuccacgggcuggauuuuagcgagguguccaacgugcagcgccuuaugagaaagcagaaacgggacgauggagaccugaagcgccucagagaucugaaucaagccgucaacaaucugguggaacucaagucuguucagcagaaaagcauucugcgggugggcacacuuacguccgacgaucugcucacccuggcggcugaccuugagaagcugaaaagcaaggucacacgcaccgaaagaccccucucuuccgggguguauaugggaaaccugagcucucagcaacuggaucagcggcgcgcccuccuguccaugaucggcaugagcgggggaaaucagaacucucagccuaaaggcgacggcguugugagagucugggaugugaagaaugccgaccuucugaacaaucaauucgggacaaugccgucccucacccuggcuugucuuacaaagcagggacagguggaucugaacgacgccguccaagcucucaccgaccugggccugauuuacacggccaaauaucccaauagcuccgaucucgaccggcugucucagagccauccuauccuuaacaugauugauaccaagaaauccagccugaauaucucuggguacaacuuuucccucggagcggccaucaagacaggcgcuugcaugcuggacgggggaaacaugcuugagaccauuaaaguuacaccccagaccauggauggcauccucaagagcauucugaaagugaagcgcucucugggcauguucaucagcgacacgccuggggagagaaaucccuaugaaaacauucuguacaagaucugucucuccggagauggcuggccuuauauugccucucggacagcuaucaucgggcgcgccugggagaauaccguggucgaccuggaaagcgauuccaaaccgcagaagauuggaagcaacggcucuaauaaaucccuucaaagcgcgggguuugcccccggacugacauacucucagcucaugacccugaaggacuccaugcugcagcuugauccuaacgcuaaaaccuggaucgacauugagggcagacccgaggacccuguggaaguugcccucuuccagcccaucagcggcugcuacauucacuuuuuccgggagccgacagaucugaagcaauuuaagcaggacgcuaaauauucccaugggaucgaugugacggaccuguucgccgcccagccuggacucaccucugcugucaucgaagcgcugcccagaaauauggugcuuacaugucagggcagcgaugacauuaagaaacugcucgauucccaagggcgccgggacaucaagcugauugauguuucucugaacaaaaucgacagcagaaaguuugagaaugccgugugggaucaguacaaggaccuuugccacaugcauaccggagucguggucgaaaagaagaaaaagggcgggaaagaggagauuacaccucacugugcucuccuggauugcaucauguucgacgccgccguguccggcggacugaacgcuaccguucuccgcgccgugcugccccgggacauggucuuuagaacgagcucucccaaggugguucuuugaggacuaguuauaagacugacuagcccgaugggccucccaacgggcccuccuccccuccuugcaccgagauuaaucaaaggcucuuuucagagccaccaaaaaaaaaaaaaaaaaaaaaaaaaaaaaaaaaaaaaaaaaaaaaaaaaaaaaaaaaaaaaaaaaaaaaaaaaaaaaaaaaaaaaaaaaaaaaaaaaaaaa

SEQ ID NO: 19198 - RNA, 1986 nt, Artificial Sequence
  mRNA product Design i-3 (hSL-A100) comprising derived and/or modified sequence from LASV(KAK-428;Clade n.d. (VII))__ANH09741__SP-HsPLAT_NP(2-569) (opt5)
aggagaaagcuuaccauggacgccaugaagagaggccugugcugugugcuccugcuuugcggggcugucuucguuagccccagcaacuccaaggaggugaaaucuuuccuguggacccagagccucagacgggaacuguccggcuacugcacaaauaucaaacuucaagucguuaaggacgcccaggcucugcuccacgggcuggauuuuucugaggugagcaacgugcagcgccuuaugagaaagcagaaacgggacgauaaugaccugaagcgccucagagaucugaaccaagccgucaauaaccugguggaacucaaguccguucagcagaaaucugugcugaaggucggaacgcuuaauagcgacgaucugcucacccuggcggcugaccuugagaaacugaaguccaaagugguucggacagaacgcccccucagcucuggcguguauauggggaaccuguccagccagcaacuggaucagagacgggcccuccugaauaugauuggaauggccggcgggucucagggaaaccagccuucccgcgacggcgucgugagagugugggaugucaagaaugcugaccuucugaacaaucaauucggcaccaugccgagccucacacuggccugucuuaccaagcaggggcagguugaucugaacgacguggugcucgcucugacagaccugggacucaucuacaccgccaaauaucccaauucuuccgaucuggaccggcuuagccaaaaccauccuguccugaacaugauugaugugaauaaguccucucucaacaucagcggcuacaauuuuucccugggggcggccguuaaagcuggagccugcaugcuugacggcgggaacaugcuggagacgauuaagaucagcccccagaccguggauggaauccucaaaucuauucugaaggucaaacgcgcucugggcauguucguguccgacacaccuggcgagagaaaucccuaugaaaacauccucuacaagguuugucugagcgggaauggauggccuuauauugccucucggaccagcaucgugggccgcgcgugggagaacacagucguggaucuugaauccaauaagaaccagccgaaagucgggaauaacggaucuaauaagaugcugcagagcuccggcuuugccaccgggcucacguacagccaacugaugacacugagagacucuaugcuucagcucgaucccaccgcuaaaacauggauugacaucgagggacggccugaggaucccguggaacuggcccuguuccagccuuccagcggcugcuacauucacuuuuucagagagcccaccgaccucaagcaguuuaaacaagacgcuaaguauucucauggcaucgauguuaacgaccuguucuccgcccagccggggcuuaccagcgccgugcuggaagcucucccucgcaauaugguccugacaugucagggauccgaugacauccggaagcugcuugauucucaggacagaaaagauauuaagcucaucgacauuagccuguccaaagcggaugcccgcaaguuugagaacgacgugugggaucaauucaaagaccugugccacaugcauacgggcaucguuguggaaaagaagaaaaagggagggaaacaggagaugacaccccacugugcucuccuggauugcauuauguuugacgccgccgucucuggcgggcuuaacgugccuacccugcgggcugugcuccccaccgacaugguuuucagaacaaucaccacgaaggucgugcugugaggacuaguuauaagacugacuagcccgaugggccucccaacgggcccuccuccccuccuugcaccgagauuaaucaaaggcucuuuucagagccaccaaaaaaaaaaaaaaaaaaaaaaaaaaaaaaaaaaaaaaaaaaaaaaaaaaaaaaaaaaaaaaaaaaaaaaaaaaaaaaaaaaaaaaaaaaaaaaaaaaaaa

SEQ ID NO: 19199 - RNA, 1986 nt, Artificial Sequence; identical to SEQ ID NO: 19193
  mRNA product Design i-3 (hSL-A100) comprising derived and/or modified sequence from LASV(Pinneo-NIG-1969;Clade I)__AIT17837__SP-HsPLAT_NP(2-569) (opt5)

SEQ ID NO: 19200 - RNA, 1986 nt, Artificial Sequence
  mRNA product Design i-3 (hSL-A100) comprising derived and/or modified sequence from LASV(ISTH0009-NIG-2011;Clade II)__AIT17405__SP-HsPLAT_NP(2-569) (opt5)
aggagaaagcuuaccauggacgccaugaagagaggccugugcugugugcuccugcuuugcggggcugucuucguuagccccagcguguccaaggaggucaaaucuuuccuguggacccagagccucagacgggaacuguccggcuacugcucuaacaucaaacuucaaguugugaaggacgcccaggcucugcuccacgggcuggauuuuagcgagguguccaauguccagcgccuuaugagaaagcagaaacgggacgauucugaccugaagcgccucagagaucugaaccaagccgugaauaaccugguugaacucaagagcacacagcagaaauccauucugcgggugggaacgcuuaccagcgacgaucugcucacacuggcggcugaccuugagaagcugaaaucuaaggucauccgcaccgaaagaccccucuccagcggcguguauauggggaaucugucuacacagcaacuggagcagcggcgcgcccuccugaacaugauuggaaugguuggcggggcccagggaacccagccuggcagagauggcgugguccgggugugggacgugaaaaauccggaucuucugaacaaucaauucgggacaaugcccucccucacccuggcuugucuuacgaagcagggacaggucgaccugaacgaugccguucucgcucugaccgaccugggccucaucuacacagccaaguauccuaauagcucugaccuggaucgccuuucccaaagccaucccauucugaacaugguggacaucaaaaaguccucucucaauaucagcggguacaacuuuucccugggagcggccgugaaagcuggcgccugcaugcuugaugggggaaauaugcuggagaccauuaaggucacaccucagaccauggacggcauccucaaaagcauucugaaggugaaaagaucucugggcauguucguuuccgauacgcccggggaacggaacccuuaugagaacauccucuacaagauuugucugagcggagacggcuggccguauaucgcuucucgcacaagcauuguggggagagccugggaaaauaccacagucgaucuugaguccgacggaaagccccagaaagugggcucugcggggagcaacaagucccugcagagcgccggauuuccuaccggccucaccuacucucaacugaugacacugaaagauuccaugaugcagcuugaccccagcgcuaagacguggaucgauaucgagggccggccugaagaccccguugagauugcccucuaccagccgaugucugggugcuauauccacuucuuuagagaaccuaccgaccugaaacaguucaagcaagaugcuaaguacucccauggaauugacguggccgaucuguuucccgcccagccuggccucacaagcgcugucaucgaggcgcugccccgcaauauggugcuuaccugucagggguccgacgauauuaaacggcugcucgacucucagggaagacgcgauaucaagcugaucgacauugcccugagcaaagcugauucccggagauucgaaaacgccgucugggaccaaugcaaggaucuuugucacaugcauacaggcgugguuguggagaaaaagaagcgcgggggcaaagaggaaaucacgccccacugcgcccucauggacuguauuauguaugaugcugccgucucuggaggccugaauaucccugugcugcgggcgguucucccgagagacaugguguuucgcaccagcucccccaaggucgugcugugaggacuaguuauaagacugacuagcccgaugggccucccaacgggcccuccuccccuccuugcaccgagauuaaucaaaggcucuuuucagagccaccaaaaaaaaaaaaaaaaaaaaaaaaaaaaaaaaaaaaaaaaaaaaaaaaaaaaaaaaaaaaaaaaaaaaaaaaaaaaaaaaaaaaaaaaaaaaaaaaaaaaa

SEQ ID NO: 19201 - RNA, 1986 nt, Artificial Sequence
  mRNA product Design i-3 (hSL-A100) comprising derived and/or modified sequence from LASV(ISTH2010-NIG-2012;Clade II)__AIT17483__SP-HsPLAT_NP(2-569) (opt5)
aggagaaagcuuaccauggacgccaugaagagaggccugugcugugugcuccugcuuugcggggcugucuucguuagccccagcgccuccaaggaggugaaaucuuuccuguggacccagagccucagacgggaacuguccggcuacugcucuaacaucaaacuucaagucguuaaggacgcucaggcccugcuccacgggcuggauuuuagcgagguguccaaugugcagcgccuuaugagaaagcagaaacgggacgauucugaccugaagcgccucagagaucugaaccaagcggucaauaaccugguggaacucaagagcacacagcagaaauccauucugcggguuggaacgcuuaccagcgacgaucugcucacacuggcugccgaccuugagaagcugaaaucuaaggugauccgcaccgaaagaccccucuccagcggcgucuauauggggaaucugucuacacagcaacuggagcagcggcgcgcccuccugaaccuuauuggaauggugggcggggcucagggaacccagccuggcagagauggcguugugcgggucugggacgugaaaaauccggaucugcucaacaaucaauucgggacaaugcccucccugacccuugccugucugacgaagcagggacagguggaccucaacgaugcuguccuggcccugaccgaccucggccugaucuacacagcgaaguauccuaauagcucugaccuugaucgccugucccaaagccaucccauucucaacaugguugacaccaaaaaguccucucugaauaucagcggguuuaacuucucccuuggagccgcugugaaagccggcgcuugcaugcuggaugggggaaauaugcucgagacaaucaaggugaccccucagacgauggacggcauucugaaaagcauccugaaggucaaaaagucucucggcauguuuguguccgauacacccggggaaagaaacccuuacgagaacauucuguauaagaucugucuuagcggagacggcuggccguacauugccucucggaccagcaucguugggcgcgcgugggaaaauacaaccguggaucuggaguccgacggaaaaccccacaaggucggcaccgccgggucuaacaaaagccuccaguccgcuggauucccuacaggccugacguauagccagcugaugacccuuaaggauucuaugaugcaacucgaccccuccgccaaaacauggauugauaucgagggcagaccugaagaccccguggagaucgcucuguaccagccgaugagcgggugcuacauucacuuuuuccgggaaccuaccgaccugaagcaguuuaagcaggaugccaaauauucucauggaaucgacguugccgaucucuuccccgcucaaccuggccugacauccgcggugauugaggcccuucccagaaauaugguccugaccugucaggggagcgacgauaucaagcgccuccuggacucccagggacggagagauauuaaacugaucgacaucgcucuuucuaaggccgauagccgccgguuugaaaacgccgugugggaccagugcaaagaucucugucauaugcacacgggcgucgugguugagaagaagaaaagagggggcaaggaggaaauuacaccccacugcgcucugauggacuguaucauguacgaugccgcgguguccggaggccugaauauuccuguccuccgcgcugugcugccgcgggacaugguuuucagaaccucuagccccaaagugguccuuugaggacuaguuauaagacugacuagcccgaugggccucccaacgggcccuccuccccuccuugcaccgagauuaaucaaaggcucuuuucagagccaccaaaaaaaaaaaaaaaaaaaaaaaaaaaaaaaaaaaaaaaaaaaaaaaaaaaaaaaaaaaaaaaaaaaaaaaaaaaaaaaaaaaaaaaaaaaaaaaaaaaaa

SEQ ID NO: 19202 - RNA, 1986 nt, Artificial Sequence
  mRNA product Design i-3 (hSL-A100) comprising derived and/or modified sequence from LASV(Lassa virus/H.sapiens-wt/NGA/2015/ISTH_0543;Clade II)__AVO03640__SP-HsPLAT_NP(2-569) (opt5)
aggagaaagcuuaccauggacgccaugaagagaggccugugcugugugcuccugcuuugcggggcugucuucguuagccccagcgccuccaaggaggugaaaucuuuccuguggacccagagccucagacgggaacuguccggcuacugcucuaacaucaaacuucaagucguuaaggacgcucaggcccugcuccacgggcuggauuuuagcgagguguccaaugugcagcgccuuaugagaaagcagaaacgggacgauucugaccugaagcgccucagagaucugaaccaagcggucaauaaccugguggaacucaagagcacacagcagaaauccauucugcggguuggaacgcuuaccagcgacgaucugcucacacuggcugccgaccuugagaagcugaaaucuaaggugauccgcaccgaaagaccccucuccagcggcgucuauauggggaaucugucuacacagcaacuggagcagcggcgcgcccuccugaacaugauuggaauggugggcggggcucagggaacccagccuggcagagauggcguugugcgggucugggacgugaaaaauccggaucuucugaacaaucaauucgggacaaugcccucccucacccuggccugucuuacgaagcagggacagguggaccugaacgaugcuguccucgcccugaccgaccugggccucaucuacacagcgaaguauccuaauagcucugaccuggaucgccuuucccaaagccaucccauucugaacaugguugacaccaaaaaguccucucucaauaucagcggguacaacuuuucccugggagccgcugugaaagccggcgcuugcaugcuugaugggggaaauaugcuggagacaaucaaggugaccccucagacgauggacggcauucucaaaagcauccugaaggucaaaaagucucugggcauguucguguccgauacacccggggaaagaaacccuuaugagaacauucucuacaagaucugucugagcggagacggcuggccguauauugccucucggaccagcaucguugggcgcgcgugggaaaauacaaccguggaucuugaguccgacggaaaaccccagaaggucggcucugccgggagcaacaaaucccugcagagcgcuggauuuccuaccggccucacauacucucaacugaugacgcugaaggauuccaugaugcagcuugaccccagcgccaaaaccuggauugauaucgagggcagaccugaagaccccguggagaucgcucucuaccagccgaugucugggugcuauauucacuucuuucgggaaccuacagaccugaagcaguucaagcaagaugccaaauacucccauggaaucgacguugccgaucuguuucccgcucagccuggccucaccagcgcggugauugaggcccugcccagaaauaugguccuuacaugucagggguccgacgauaucaagcgccugcucgacucucagggacggaaagauauuaagcugaucgacaucgcucugagcaaagccgauuccagacgcuucgaaaacgccgugugggaccaaugcaaggaucuuugucacaugcauaccggcgucgugguugagaagaaaaagagagggggcaaagaggaaauuacgccccacugcgcucucauggacuguaucauguaugaugccgcggugucuggaggccugaauauuccuguccugcgggcugugcucccgcgcgacaugguuuuucggacaagcucccccaaggugguccugugaggacuaguuauaagacugacuagcccgaugggccucccaacgggcccuccuccccuccuugcaccgagauuaaucaaaggcucuuuucagagccaccaaaaaaaaaaaaaaaaaaaaaaaaaaaaaaaaaaaaaaaaaaaaaaaaaaaaaaaaaaaaaaaaaaaaaaaaaaaaaaaaaaaaaaaaaaaaaaaaaaaaa

SEQ ID NO: 19203 - RNA, 1986 nt, Artificial Sequence
  mRNA product Design i-3 (hSL-A100) comprising derived and/or modified sequence from LASV(Lassa virus/H.sapiens-wt/NGA/2016/ISTH_0009;Clade II)__AVO03572__SP-HsPLAT_NP(2-569) (opt5)
aggagaaagcuuaccauggacgccaugaagagaggccugugcugugugcuccugcuuugcggggcugucuucguuagccccagcgccuccaaggaggugaaaucuuuccuguggacccagagccucagacgggaacuguccggcuacugcucuaacaucaaacuucaagucguuaaggacgcucaggcccugcuccacgggcuggauuuuagcgagguguccaaugugcagcgccuuaugagaaagcagaaacgggacgauucugaccugaagcgccucagagaucugaaccaagcggucaauaaccugguggaacucaagagcacacagcagaaauccauucugcggguuggaacgcuuaccagcgacgaucugcucacacuggcugccgaccuugagaagcugaaaucuaaggugauccgcaccgaaagaccccucuccagcggcgucuauauggggaaucugucuacacagcaacuggagcagcggcgcgcccuccugaacaugauuggaauggugggcggggcucagggaacccagccuggcagagauggcguugugcgggucugggacgugaaaaauccggaucuucugaacaaucaauucgggacaaugcccucccucacccuggccugucuuacgaagcagggacagguggaccugaacgaugcuguccucgcccugaccgaccugggccucaucuacacagcgaaguauccuaauagcucugaccuggaucgccuuucccaaagccaucccauucugaacaugguugacaccaaaaaguccucucucaauaucagcggguacaacuuuucccugggagccgcugugaaagccggcgcuugcaugcuugaugggggaaauaugcuggagacaaucaaggugaccccucagacgauggacggcauucucaaaagcauccugaaggucaaaaagucucugggcauguucguguccgauacacccggggaaagaaacccuuaugagaacauucucuacaagaucugucugagcggagacggcuggccguauauugccucucggaccagcaucguugggcgcgcgugggaaaauacaaccguggaucuugaguccgacggaaaaccccagaaggucggcucugccgggagcaacaaaucccugcagagcgcuggauuuccuaccggccucacauacucucaacugaugacgcugaaggauuccaugaugcagcuugaccccagcgccaaaaccuggauugauaucgagggcagaccugaagaccccguggagaucgcucucuaccagccgaugucugggugcuauauucacuucuuucgggaaccuacagaccugaagcaguucaagcaagaugccaaauacucccauggaaucgacguugccgaucuguuucccgcucagccuggccucaccagcgcggugauugaggcccugcccagaaauaugguccuuacaugucagggguccgacgauaucaagcgccugcucgacucucagggacggagagauauuaaacugaucgacaucgcucugagcaaggccgauucccgccgguucgaaaacgccgugugggaccaaugcaaagaucuuugucacaugcauaccggcgucgugguugagaagaagaaaagagggggcaaggaggaaauuacgccccacugcgcucucauggacuguaucauguaugaugccgcggugucuggaggccugaauauuccuguccugcgcgcugugcucccgcgggacaugguuuuuagaacaagcucccccaaagugguccugugaggacuaguuauaagacugacuagcccgaugggccucccaacgggcccuccuccccuccuugcaccgagauuaaucaaaggcucuuuucagagccaccaaaaaaaaaaaaaaaaaaaaaaaaaaaaaaaaaaaaaaaaaaaaaaaaaaaaaaaaaaaaaaaaaaaaaaaaaaaaaaaaaaaaaaaaaaaaaaaaaaaaa

SEQ ID NO: 19204 - RNA, 1986 nt, Artificial Sequence
  mRNA product Design i-3 (hSL-A100) comprising derived and/or modified sequence from LASV(Lassa virus/H.sapiens-wt/NGA/2016/ISTH_0017;Clade II)__AVO03568__SP-HsPLAT_NP(2-569) (opt5)
aggagaaagcuuaccauggacgccaugaagagaggccugugcugugugcuccugcuuugcggggcugucuucguuagccccagcgccuccaaggaggugaaaucuuuccuguggacccagagccucagacgggaacuguccggcuacugcucuagcaucaaacuucaagucguuaaggacgcucaggcccugcuccacgggcuggauuuuuccgaggugucuaacgugcagcgccuuaugagaaagcagaaacgggacgauagcgaccugaagcgccucagagaucugaaucaagcggucaacaaucugguggaacucaaguccacacagcagaaaagcauucugcggguuggaacgcuuaccucugacgaucugcucacacuggcugccgaccuugagaagcugaaauccaaggugauccgcaccgaaagaccccucagcucuggcgucuauauggggaaccuguccacacagcaacuggagcagcggcgcgcccuccugaauaugauuggaauggcuggcggggcccagggaacccagccuggcagagauggcgugguucgggugugggacgucaaaaacccggaucuucugaauaaccaauucgggacaaugcccagccucacccuggcuugucuuacgaagcagggacagguggaccugaaugaugccgugcucgcgcugaccgaccugggccucaucuacacagccaaguauccuaacucuuccgaccuggaucgccuuagccaaucccaucccauucugaauauggucgacaccaaaaagucuagccucaacaucuccggguacaauuuuagccugggagcugccguuaaagcuggcgccugcaugcuugaugggggaaacaugcuggagacaaucaaggugaccccucagacgauggacggcauucucaaaucuauccugaaggugaaaagaucccugggcauguucgucagcgaugcgcccggggaacggaauccuuaugagaacauucucuacaagaucugucugucuggagacggcuggccguauauugccagccgcacauccaucguggggagagcuugggaaaacaccacaguugaucuugagucugacggaaagccccagaaagugggcgccaccgggagcaauaagucccugcagagcgcuggauuuccuaccggccucacauacucucaacugaugacgcugaaagauuccaugaugcagcuugaccccagcgccaagaccuggauugauaucgagggccggccugaagaccccgucgagguggcccucuaccagccgguuucugggugcuauauccacuucuuuagagaaccuacagaccugaaacaguucaagcaagaugcuaaguacucccauggaauugacguggcggaucuguuucccgcccagccuggccucaccagcgcugucaucgaggcccugccccgcaacauggugcuuacaugucagggguccgacgauauuaaaaagcugcucgacucucagggacggaaagauaucaagcugauugacaucgcccugagcaaagcugauuccagacgcuucgaaaaugccgucugggaccaaugcaaggaucuuugucacaugcauaccggcgugguuguggagaagaaaaagagagggggcaaagaggaaaucacgccccacugcgcgcucauggacuguauuauguaugaugcugccgucucuggaggccugaacaucccugugcugcgggccguucucccgcgcgacaugguguuucggacaagcucccccaaggucgugcugugaggacuaguuauaagacugacuagcccgaugggccucccaacgggcccuccuccccuccuugcaccgagauuaaucaaaggcucuuuucagagccaccaaaaaaaaaaaaaaaaaaaaaaaaaaaaaaaaaaaaaaaaaaaaaaaaaaaaaaaaaaaaaaaaaaaaaaaaaaaaaaaaaaaaaaaaaaaaaaaaaaaaa

SEQ ID NO: 19205 - RNA, 1986 nt, Artificial Sequence
  mRNA product Design i-3 (hSL-A100) comprising derived and/or modified sequence from LASV(Lassa virus/H.sapiens-wt/NGA/2018/ISTH_0959;Clade II)__AVV65100__SP-HsPLAT_NP(2-569) (opt5)
aggagaaagcuuaccauggacgccaugaagagaggccugugcugugugcuccugcuuugcggggcugucuucguuagccccagcgccuccaaggaggugaaaucuuuccuguggacccagagccucagacgggaacuguccggcuacugcucuaacaucaaacuucaagucguuaaggacgcucaggcccugcuccacgggcuggauuuuagcgagguguccaaugugcagcgccuuaugagaaagcagaaacgggacgauucugaccugaagcgccucagagaucugaaccaagcggucaauaaccugguggaacucaagagcacccagcagaaauccauucugcggguuggaacgcuuaccagcgacgaucugcucacacuggcugccgaccuugagaagcugaaaucuaaggugauccgcaccgaaagaccccucuccagcggcgucuauauggggaaucugucuacacagcaacuggagcagcggcgcgcccuccugaaccuuauuggaauggugggcggggcucagggaacccagccuggcagagauggcguugugcgggucugggacgugaaaaauccggaucugcucaacaaucaauucgggacaaugcccucccugacccuugccugucugacgaagcagggacagguggaccucaacgaugucguucuggcucugaccgaccucggccugaucuacacagccaaguauccuaauagcucugaccuugaucgccugucccaaagccaucccauucucaacaugguggacaccaaaaaguccucucugaauaucagcggguuuaacuucucccuuggagcggccgugaaagcuggcgccugcaugcuggaugggggaaauaugcucgagacaaucaaggucaccccucagacgauggacggcauucugaaaagcauccugaaggugaaaaagucucucggcauguuuguuuccgauacacccggggaaagaaacccuuacgagaacauucuguauaagaucugucuuagcggagacggcuggccguacauugcuucucggaccagcaucguggggcgcgccugggaaaauacaaccgucgaucuggaguccgacggaaaaccccacaaggugggcaccgcggggucuaacaaaagccuccaguccgccggauucccuacaggccugacguauagccagcugaugacccuuaaggauucuaugaugcaacucgaccccuccgcuaaaacauggauugauaucgagggcagaccugaagaccccguugagaucgcccuguaccagccgaugagcgggugcuacauucacuuuuuccgggaaccuaccgaccugaagcaguuuaagcaggaugcuaaauauucucauggaaucgacguggccgaucucuuccccgcccaaccuggccugacauccgcugucauugaggcgcuucccagaaauauggugcugaccugucaggggagcgacgauaucaagcgccuccuggacucccagggacggaaagauauuaagcugaucgacaucgcccuuucuaaaacggauagcagacgcuuugaaaacgcugucugggaccagugcaaggaucucugucauaugcacacaggcgugguuguggagaagaaaaagagagggggcaaagaggaaauuacaccccacugcgcccugauggacuguaucauguacgaugccgcugucuccggaggccugaauauuccugugcuccgggccguucugccgcgcgacaugguguuccggaccucuagccccaaggucgugcuuugaggacuaguuauaagacugacuagcccgaugggccucccaacgggcccuccuccccuccuugcaccgagauuaaucaaaggcucuuuucagagccaccaaaaaaaaaaaaaaaaaaaaaaaaaaaaaaaaaaaaaaaaaaaaaaaaaaaaaaaaaaaaaaaaaaaaaaaaaaaaaaaaaaaaaaaaaaaaaaaaaaaaa

SEQ ID NO: 19206 - RNA, 1986 nt, Artificial Sequence
  mRNA product Design i-3 (hSL-A100) comprising derived and/or modified sequence from LASV(LASV003-NIG-2008;Clade II)__AIT17581__SP-HsPLAT_NP(2-569) (opt5)
aggagaaagcuuaccauggacgccaugaagagaggccugugcugugugcuccugcuuugcggggcugucuucguuagccccagcgccuccaaggaggugaaaucuuuccuguggacccagagccucagacgggaacuguccggcuacugcucuagcaucaaacuucaagucguuaaggacgcucaggcccugcuccacgggcuggauuuuuccgaggugucuaacgugcagcgccuuaugagaaagcagaaacgggacgauagcgaccugaagcgccucagagaucugaaucaagcggucaacaaucugguggaacucaaguccacccagcagaaaagcguucugcgggugggaacgcuuaccucugacgaucugcucacacuggcugccgaccuugagaagcugaaauccaaggucauucgcaccgaaagaccccucagcucuggcguguauauggggaaccuguccgcccagcaacuggagcagcggcgcacacuccugaauaugaucggaaugguuggcggggcucagggaacccagccuggcagagauggcgugguccgggugugggacgugaaaaacccggaucuucugaauaaccaauucgggacaaugcccagccucacccuggccugucuuacgaagcagggacaggucgaccugaaugauguugugcucgcucugaccgaccugggccucauuuacacagccaaguauccuaacucuuccgaccuggaucgccuuagccaaucccaucccauccugucuaugguggacaccaaaaagagcucccucaauauuagcggguacaacuuuucucugggagcggccgucaaagcuggcgccugcaugcuugaugggggaaauaugcuggagacaaucaaggugaccccucagacgauggacggcauccucaaauccauucugaagguuaaaaagagccugggcauguucgugucugauacacccggggaaagaaacccuuaugagaauauccucuacaagauuugucugagcggagacggcuggccguauaucgcuucccggaccucuauugucgggcgcgccugggaaaacacaaccguggaucuugagagcgacggaaaaccccagaagguuggcaccgcgggguccaacaaaagccugcagucugccggauuuccuacaggccucacguacucccaacugaugacccugaaggauagcaugaugcagcuugaccccucugcuaaaacauggaucgauauugagggcagaccugaagaccccguggagaucgcccucuaccagccgauguccgggugcuauauccacuucuuucgggaaccuaccgaccugaagcaguucaagcaagaugcuaaauacagccauggaauugacgucacagaucuguuucccgcccagccuggccucaccuccgccgugaucgaggcucugcccagaaauaugguccuuacgugucaggggucugacgauauuaagcgccugcucgacagccagggacggagagauaucaaacugauugacaucgcgcuguccaaggccgauucucgccgguucgaaaacgcugugugggaccaaugcaaagaucuuugucacaugcauacaggcguuguggucgagaagaagaaaagagggggcaaggaggaaaucacaccccacugcgcccucauggacuguauuauguaugaugccgcugugagcggaggccugaauaucccuguucugcgcgccgugcucccgcgggacauggucuuuagaaccuccagccccaaaguggugcugugaggacuaguuauaagacugacuagcccgaugggccucccaacgggcccuccuccccuccuugcaccgagauuaaucaaaggcucuuuucagagccaccaaaaaaaaaaaaaaaaaaaaaaaaaaaaaaaaaaaaaaaaaaaaaaaaaaaaaaaaaaaaaaaaaaaaaaaaaaaaaaaaaaaaaaaaaaaaaaaaaaaaa

SEQ ID NO: 19207 - RNA, 1986 nt, Artificial Sequence
  mRNA product Design i-3 (hSL-A100) comprising derived and/or modified sequence from LASV(LASV035-NIG-2009;Clade II)__AIT17589__SP-HsPLAT_NP(2-569) (opt5)
aggagaaagcuuaccauggacgccaugaagagaggccugugcugugugcuccugcuuugcggggcugucuucguuagccccagcgccuccaaggaggugaaaucuuuccuguggacccagagccucagacgggaacuguccggcuacugcucuagcaucaaacuucaagucguuaaagacgcucaggcccugcuccacgggcuggauuuuuccgaggugucuaacgugcagcgccuuaugagaaagcagaaacgggacgauagcgaccugaagcgccucagagaucugaaucaagcggucaacaaucugguggaacucaaguccacacagcagaaaagcauucugcggguuggaacgcuuaccucugacgaucugcucacacuggcugccgaccuugagaagcugaaauccaaggugauccgcaccgaaagaccccucagcucuggcgucuauauggggaaccuguccgcccagcaacuggagcagcggcgcgcucuccugaauaugauuggaauggugggcggggcccagggaacacagccuggcagagauggcguugugcgggucugggacgugaaaaacccggaucuucugaauaaccaauucgggaccaugcccagccucacacuggcuugucuuaccaagcagggacagguggaccugaaugaugccguccucgcgcugacggaccugggccucaucuacaccgccaaguauccuaacucuuccgaccuggaucgccuuagccaaucccaucccauucugaauaugguugacacaaagaagucuagccucaacaucuccggguacaauuuuagccugggagcugccgugaaagcuggcgccugcaugcuugaugggggaaacaugcuggagaccaucaaggugacaccucagaccauggacggcauucucaaaucuauccugaaggucaaaagaucccugggcauguucgugagcgauacgcccggggaacggaauccuuaugagaacauucucuacaagaucugucugucuggagacggcuggccguauauugcgagccgcacauccaucguugggagagccugggaaaacaccacaguggaucuugagucugacggaaagccccagaaagucggcaccaccgggagcaauaagucccugcagagcgcuggauuuccuacaggccucacguacucucaacugaugacccugaaagauuccaugaugcagcuugaccccagcgccaagacauggauugauaucgagggccggccugaagaccccguggagaucgcucucuaccagccgaugucugggugcuauauucacuucuuuagagaaccuaccgaccugaaacaguucaagcaagaugccaaguacucccauggaaucgacguugccgaucuguuucccgcucagccuggccucacaagcgcggugauugaggcccugccccgcaacaugguccuuaccugucagggguccgacgauaucaaaaagcugcucgacucucagggacggagagauauuaaacugaucgacaucgcucugagcaaggccgauucccgcaaauucgaaaaugccgugugggaccaaugcaaggaucuuugucacaugcauacgggcgucgugguugagaagaaaaagagagggggcaaagaggaaauuacaccccacugcgcucucauggacuguaucauguaugaugccgcggugucuggaggccugaacauuccuguccugcgggcugugcucccgcgcgacaugguuuuucggaccagcucccccaaggugguccugugaggacuaguuauaagacugacuagcccgaugggccucccaacgggcccuccuccccuccuugcaccgagauuaaucaaaggcucuuuucagagccaccaaaaaaaaaaaaaaaaaaaaaaaaaaaaaaaaaaaaaaaaaaaaaaaaaaaaaaaaaaaaaaaaaaaaaaaaaaaaaaaaaaaaaaaaaaaaaaaaaaaaa

SEQ ID NO: 19208 - RNA, 1986 nt, Artificial Sequence
  mRNA product Design i-3 (hSL-A100) comprising derived and/or modified sequence from LASV(LASV1000-NIG-2009;Clade II)__AIT17783__SP-HsPLAT_NP(2-569) (opt5)
aggagaaagcuuaccauggacgccaugaagagaggccugugcugugugcuccugcuuugcggggcugucuucguuagccccagcgccuccaaggaggugaaaucuuuccuguggacccagagccucagacgggaacuguccggcuacugcucuaacaucaaacuucaagucguuaaggacgcucaggcccugcuccacgggcuggauuuuagcgagguguccaaugugcagcgccuuaugagaaagcagaaacgggacgauucugaccugaagcgccucagagaucugaaccaagcggucaauaaccugguggaacucaagagcacacagcagaaauccauucugcggguuggaacgcuuaccagcgacgaucugcucacacuggcugccgaccuugagaagcugaaaucuaaggugauccgcaccgaaagaccccucuccagcggcgucuauauggggaaucugucuacacagcaacuggagcagcggcgcgcccuccugaacaugauuggaauggugggcggggcucagggaacccagccuggcagagauggcguugugcgggucugggacgugaaaaauccggaucuucugaacaaucaauucgggacaaugcccucccucacccuggccugucuuacgaagcagggacagguggaccugaacgaugucguucucgcucugaccgaccugggccucaucuacacagccaaguauccuaauagcucugaccuggaucgccuuucccaaagccaucccauucugaacaugguggacaccaaaaaguccucucucaauaucagcggguacaacuuuucccugggagcggccgugaaagcuggcgccugcaugcuugaugggggaaauaugcuggagacaaucaaggucaccccucagacgauggacggcauucucaaaagcauccugaaggugaaaaagucucugggcauguucguuuccgauacacccggggaaagaaacccuuaugagaacauucucuacaagaucugucugagcggagacggcuggccguauauugcuucucggaccagcaucguggggcgcgccugggaaaauacaaccgucgaucuugaguccgacggaaaaccccagaaggugggcaccgcggggucuaacaaaagccugcaguccgccggauuuccuacaggccucacguacagccaacugaugacccugaaggauucuaugaugcagcuugaccccuccgcuaaaacauggauugauaucgagggcagaccugaagaccccguugagaucgcccucuaccagccggugagcgggugcuauauucacuucuuucgggaaccuaccgaccugaagcaguucaagcaagaugcuaaauacucucauggaaucgacgucgccgaucuguuucccgcccagccuggccucacauccgcugugauugaggcgcugcccagaaauaugguccuuaccugucaggggagcgacgauaucaagcgccugcucgacucccagggacggagagauauuaaacugaucgacaucgcccugucuaaggcugauagccgccgguucgaaaacgccgugugggaccaaugcaaagaucuuugucacaugcauacgggcguuguggucgagaagaagaaaagagggggcaaggaggaaauuacaccccacugcgcccucauggacuguaucauguaugaugcugccguguccggaggccugaauauuccuguucugcgcgcggugcucccgcgggacauggucuuuagaaccucuagccccaaaguggugcugugaggacuaguuauaagacugacuagcccgaugggccucccaacgggcccuccuccccuccuugcaccgagauuaaucaaaggcucuuuucagagccaccaaaaaaaaaaaaaaaaaaaaaaaaaaaaaaaaaaaaaaaaaaaaaaaaaaaaaaaaaaaaaaaaaaaaaaaaaaaaaaaaaaaaaaaaaaaaaaaaaaaaa

SEQ ID NO: 19209 - RNA, 1986 nt, Artificial Sequence
  mRNA product Design i-3 (hSL-A100) comprising derived and/or modified sequence from LASV(LASV221-NIG-2010;Clade II)__AIT17625__SP-HsPLAT_NP(2-569) (opt5)
aggagaaagcuuaccauggacgccaugaagagaggccugugcugugugcuccugcuuugcggggcugucuucguuagccccagcgccuccaaggaggugaaaucuuuccuguggacccagagccucagacgggaacuguccggcuacugcucuagcaucaaacuucaagucguuaaggacgcucaggcccugcuccacgggcuggauuuuuccgaggugucuaacgugcagcgccuuaugagaaagcagcggcgcgacgauagcgaccugaaaagacuccgggaucugaaucaagcggucaacaaucugguggaacucaaguccacacagcaaaagagcauucugcgcguuggaacgcuuaccucugacgaucugcucacacuggcugccgaccuugagaaacugaaguccaaagugaucagaaccgaacggccccucagcucuggcgucuauauggggaaccuguccacacagcagcuggagcagcgcagagcccuccugaauaugauuggaauggugggcggggcucagggaacccagccuggccgggauggcguugugcgcgucugggacgugaagaacccggaucuucugaauaaccaauucgggacaaugcccagccucacccuggccugucuuacgaaacagggacagguggaccugaaugaugcuguccucgcccugaccgaccugggccucaucuacacagcgaaguauccuaacucuuccgaccuggauagacuuagccaaucccaucccauucugaauaugguugacaccaagaaaucuagccucaacaucuccggguacaauuuuagccugggagccgcugugaaggccggcgcuugcaugcuugaugggggaaacaugcuggagacaaucaaagugaccccucagacggucgacggcauucucaagucuauccugaaagugaagcggucccugggcauguucguuagcgauacacccggggaacgcaauccuuaugagaacauucucuacaaaaucugucugucuggagacggcuggccguauauugccagcagaaccuccaucguggggcgggcgugggaaaacacaaccgucgaucuugagucugacggaaagccccagaaggugggcaccgccgggagcaauaaaucccugcagagcgcuggauuuccuacaggccucacguacucucaacugaugacccugaaggauuccaugaugcagcuugaccccagcgccaaaacauggauugauaucgagggcagaccugaagaccccguugagaucgcucucuaccagccgaugucugggugcuauauucacuucuuucgcgaaccuaccgaccugaagcaguucaaacaagaugccaaguacucccauggaaucgacguggccgaucuguuucccgcucagccuggccucacaagcgcggucauugaggcccugccccggaacauggugcuuaccugucagggguccgacgauaucaagagacugcucgacucucagggacgccgggauauuaaacugaucgacaucgcucugagcaaggccgauuccagaaaauucgaaaaugccgucugggaccaaugcaaggaucuuugucacaugcauacgggcgugguuguggagaaaaagaagcgcgggggcaaagaggaaauuacaccccacugcgcucucauggacuguaucauguaugaugccgcggucucuggaggccugaacauuccugugcugcgggcuguucucccgagagacaugguguuucgcaccagcucccccaaggucgugcugugaggacuaguuauaagacugacuagcccgaugggccucccaacgggcccuccuccccuccuugcaccgagauuaaucaaaggcucuuuucagagccaccaaaaaaaaaaaaaaaaaaaaaaaaaaaaaaaaaaaaaaaaaaaaaaaaaaaaaaaaaaaaaaaaaaaaaaaaaaaaaaaaaaaaaaaaaaaaaaaaaaaaa

SEQ ID NO: 19210 - RNA, 1986 nt, Artificial Sequence
  mRNA product Design i-3 (hSL-A100) comprising derived and/or modified sequence from LASV(LASV237-NIG-2010;Clade II)__AIT17639__SP-HsPLAT_NP(2-569) (opt5)
aggagaaagcuuaccauggacgccaugaagagaggccugugcugugugcuccugcuuugcggggcugucuucguuagccccagcgccuccaaggaggugaaaucuuuccuguggacccagagccucagacgggaacuguccggcuacugcucuaacaucaaacuucaagucguuaaggacgcucaggcccugcuccacgggcuggauuuuagcgagguguccaaugugcagcgccuuaugagaaagcagaaacgggacgauucugaccugaagcgccucagagaucugaaccaagcggucaauaaccugguggaacucaagagcacacagcagaaauccauucugcggguuggaacgcuuaccagcgacgaucugcucacacuggcugccgaccuugagaagcugaaaucuaaggugauccgcaccgaaagaccccucuccagcggcgucuauauggggaaucugucuacacagcaacuggagcagcggcgcgcccuccugaacaugauuggaauggugggcggggcucagggaacccagccuggcagagauggcguugugcgggucugggacgugaaaaauccggaucuucugaacaaucaauucgggacaaugcccucccucacccuggccugucuuacgaagcagggacagguggaccugaacgaugcuguccucgcccugaccgaccugggccucaucuacacagcgaaguauccuaauagcucugaccuggaucgccuuucccaaagccaucccauucugaacaugguugacaucaaaaaguccucucucaauaucagcggguacaacuuuucccugggagccgcugugaaagccggcgcuugcaugcuugaugggggaaauaugcuggagaccauuaaggugacaccucagaccauggacggcauccucaaaagcauucugaaggucaaaagaucucugggcauguucguguccgauacgcccggggaacggaacccuuaugagaacauccucuacaagauuugucugagcggagacggcuggccguauaucgccucucgcacaagcauuguugggagagcgugggaaaauaccacaguggaucuugaguccgacggaaagccccagaaagucggcucugccgggagcaacaagucccugcagagcgcuggauuuccuaccggccucaccuacucucaacugaugacacugaaagauuccaugaugcagcuugaccccagcgccaagacguggaucgauaucgagggccggccugaagaccccguggagauugcucucuaccagccgaugucugggugcuauauccacuucuuuagagaaccuaccgaccugaaacaguucaagcaagaugccaaguacucccauggaauugacguugccgaucuguuucccgcucagccuggccucacaagcgcggugaucgaggcccugccccgcaauaugguccuuaccugucagggguccgacgauauuaaacggcugcucgacucucagggaagacgcgauaucaagcugaucgacauugcucugagcaaagccgauucccggagauucgaaaacgccgugugggaccaaugcaaggaucuuugucacaugcauacaggcgucgugguugagaaaaagaagcgcgggggcaaagaggaaaucacgccccacugcgcucucauggacuguauuauguaugaugccgcggugucuggaggccugaauaucccuguccugcgggcugugcucccgagagacaugguuuuucgcaccagcucccccaaggugguccugugaggacuaguuauaagacugacuagcccgaugggccucccaacgggcccuccuccccuccuugcaccgagauuaaucaaaggcucuuuucagagccaccaaaaaaaaaaaaaaaaaaaaaaaaaaaaaaaaaaaaaaaaaaaaaaaaaaaaaaaaaaaaaaaaaaaaaaaaaaaaaaaaaaaaaaaaaaaaaaaaaaaaa

SEQ ID NO: 19211 - RNA, 1986 nt, Artificial Sequence
  mRNA product Design i-3 (hSL-A100) comprising derived and/or modified sequence from LASV(LASV253-NIG-2011;Clade II)__AIT17671__SP-HsPLAT_NP(2-569) (opt5)
aggagaaagcuuaccauggacgccaugaagagaggccugugcugugugcuccugcuuugcggggcugucuucguuagccccagcgccuccaaggaggugaaaucuuuccuguggacccagagccucagacgggaacuguccggcuacugcucuagcaucaaacuucaagucguuaaggacgcucaggcccugcuccacgggcuggauuuuuccgaggugucuaacgugcagcgccuuaugagaaagcagaaacgggacgauagcgaccugaagcgccucagagaucugaaucaagcggucaacaaucugguggaacucaaguccacccagcagaaaagcguucugcgggugggaacgcuuaccucugacgaucugcucacacuggcugccgaccuugagaagcugaaauccaaggucauucgcaccgaaagaccccucagcucuggcguguauauggggaaccuguccacacagcaacuggagcagcggcgcgcccuccugaauaugaucggaaugguuggcggggcucagggaacccagccuggcagagauggcgugguccgggugugggacgugaaaaacccggaucuucugaauaaccaauucgggacaaugcccagccucacccuggccugucuuacgaagcagggacaggucgaccugaaugauguugugcucgcucugaccgaccugggccucauuuacacagccaaguauccuaacucuuccgaccuggaucgccuuagccaaucccaucccauccugaauaugguggacaccaaaaagucuagccucaacauuuccggguacaauuuuagccugggagcggccgucaaagcuggcgccugcaugcuugaugggggaaacaugcuggagacaaucaaggugaccccucagacgauggacggcauccucaaaucuauucugaagguuaaaaagucccugggcauguucgugagcgauacacccggggaaagaaauccuuaugagaacauccucuacaagauuugucugucuggagacggcuggccguauaucgcuagccggaccuccauugucgggcgcgccugggaaaacacaaccguggaucuugagucugacggaaaaccccagaagguuggcaccgcggggagcaauaaaucccugcagagcgccggauuuccuacaggccucacguacucucaacugaugacccugaaggauuccaugaugcagcuugaccccagcgcuaaaacauggaucgauauugagggcagaccugaagaccccguggagaucgcccucuaccagccgaugucugggugcuauauccacuucuuucgggaaccuaccgaccugaagcaguucaagcaagaugcuaaauacucccauggaauugacgucacagaucuguuucccgcccagccuggccucaccagcgccgugaucgaggcucugcccagaaacaugguccuuacgugucagggguccgacgauauuaagcgccugcucgacucucagggacggagagauaucaaacugauugacaucgcgcugagcaaggccgauucccgccgguucgaaaaugcugugugggaccaaugcaaagaucuuugucacaugcauacaggcguuguggucgagaagaagaaaagagggggcaaggaggaaaucacaccccacugcgcccucauggacuguauuauguaugaugccgcugugucuggaggccugaacaucccuguucugcgcgccgugcucccgcgggacauggucuuuagaaccagcucccccaaaguggugcugugaggacuaguuauaagacugacuagcccgaugggccucccaacgggcccuccuccccuccuugcaccgagauuaaucaaaggcucuuuucagagccaccaaaaaaaaaaaaaaaaaaaaaaaaaaaaaaaaaaaaaaaaaaaaaaaaaaaaaaaaaaaaaaaaaaaaaaaaaaaaaaaaaaaaaaaaaaaaaaaaaaaaa

SEQ ID NO: 19212 - RNA, 1986 nt, Artificial Sequence
  mRNA product Design i-3 (hSL-A100) comprising derived and/or modified sequence from LASV(LASV254-NIG-2011;Clade II)__AIT17675__SP-HsPLAT_NP(2-569) (opt5)
aggagaaagcuuaccauggacgccaugaagagaggccugugcugugugcuccugcuuugcggggcugucuucguuagccccagcgccuccaaggaggugaaaucuuuccuguggacccagagccucagacgggaacuguccggcuacugcucuagcaucaaacuucaagucguuaaggacgcucaggcccugcuccacgggcuggauuuuuccgaggugucuaacgugcagcgccuuaugagaaagcagaaacgggacgauagcgaccugaagcgccucagagaucugaaucaagcggucaacaaucugguggaacucaaguccacacagcagaaaagcguucugcgggugggaacgcuuaccucugacgaucugcucacacuggcugccgaccuugagaagcugaaauccaaggucauucgcaccgaaagaccccucagcucuggcguguauauggggaaccuguccacacagcaacuggagcagcggcgcgcccuccugaauaugaucggaaugguuggcggggcucagggaacccagccuggcagagauggcgugguccgggugugggacgugaaaaacccggaucuucugaauaaccaauucgggacaaugcccagccucacccuggccugucuuacgaagcagggacaggucgaccugaaugaugcuguucucgcccugaccgaccugggccucauuuacacagcgaaguauccuaacucuuccgaccuggaucgccuuagccaaucccaucccauccugaauaugguggacaccaaaaagucuagccucaacauuuccggguacaauuuuagccugggagccgcugugaaagccggcgcuugcaugcuugaugggggaaacaugcuggagacaaucaaggucaccccucagacgauggacggcauccucaaaucuauucugaaggugaaaaagucccugggcauguucguuagcgauacacccggggaaagaaauccuuaugagaacauccucuacaagauuugucugucuggagacggcuggccguauaucgccagccggaccuccauuguggggcgcgcgugggaaaacacaaucgucgaucuugagucugacggaaaaccccagaaggugggcaccgccgggagcaauaaaucccugcagagcgcuggauuuccuaccggccucacauacucucaacugaugacgcugaaggauuccaugaugcagcuugaccccagcgccaaaaccuggauugauaucgagggcagaccugaagaccccguugagaucgcucucuaccagccgaugucugggugcuauauucacuucuuucgggaaccuacagaccugaagcaguucaagcaagaugccaaauacucccauggaaucgacguggccgaucuguuucccgcucagccuggccucaccagcgcggucauugaggcccugcccagaaacauggugcuuacaugucagggguccgacgauaucaagcgccugcucgacucucagggacggagagauauuaaacugaucgacaucgcucugagcaaggccgauucccgccgguucgaaaaugccgucugggaccaaugcaaagaucuuugucacaugcauaccggcgugguuguggagaagaagaaaagagggggcaaggaggaaauuacgccccacugcgcucucauggacuguaucauguaugaugccgcggucucuggaggccugaacauuccugugcugcgcgcuguucucccgcgggacaugguguuuagaacaagcucccccaaagucgugcugugaggacuaguuauaagacugacuagcccgaugggccucccaacgggcccuccuccccuccuugcaccgagauuaaucaaaggcucuuuucagagccaccaaaaaaaaaaaaaaaaaaaaaaaaaaaaaaaaaaaaaaaaaaaaaaaaaaaaaaaaaaaaaaaaaaaaaaaaaaaaaaaaaaaaaaaaaaaaaaaaaaaaa

SEQ ID NO: 19213 - RNA, 1986 nt, Artificial Sequence
  mRNA product Design i-3 (hSL-A100) comprising derived and/or modified sequence from LASV(Nig08-04;Clade II)__ADU56611__SP-HsPLAT_NP(2-569) (opt5)
aggagaaagcuuaccauggacgccaugaagagaggccugugcugugugcuccugcuuugcggggcugucuucguuagccccagcgccuccaaggaggugaaaucuuuccuguggacccagagccucagacgggaacuguccggcuacugcucuaacaucaaacuucaagucguuaaggacgcucaggcccugcuccacgggcuggauuuuagcgagguguccaaugugcagcgccuuaugagaaagcagaaacgggacgauggagaccugaagcgccucagagaucugaaccaagcggucaauaaccugguggaacucaagucuacccagcagaaaagcguucugcgggugggcacgcuuaccuccgacgaucugcucacacuggcugccgaccuugagaagcugaaaagcaaggucauucgcaccgaaagaccccucucuuccgggguguauaugggaaaucugagcacacagcaacuggagcagcggaaagcccuccugucuaugaucggcaugguugggggagcucagggcacccagccuggccgcgaugggguggucagagugugggacgugaagaacccggaucuucugaauaaccaauucggaacaaugcccucccucacccuggccugucuuacgaagcagggccaggucgaccugaaugaugcuguucucgcccugaccgaccuggggcucauuuacacagcgaaauauccuaacagcucugaccuggaucggcuuucccaaagccaucccauccugaauaugguggacaccaagaaauccucucucaacauuagcggauacaauuuuucccugggcgccgcugugaaggccggggcuugcaugcuugauggaggcaacaugcuggagacaaucaaagucaccccucagacgauggacggcauccucaagagcauucugaaagugaagcgcucucuggggauguucguuuccgauacacccggagaaagaaauccuuaugagaacauccucuacaagauuugucugagcggcgacggguggccguauaucgccucucggaccagcauugugggacgcgcgugggaaaacacaaccgucgaucuugaguccgacggcaaaccccagaagguggggaccgccggaucuaauaaaagccugcaguccgcuggcuuuccuacaggccucacguacagccaacugaugacccugaaggauucuaugaugcagcuugaccccuccgccaaaacauggaucgauauugaggggagaccugaagaccccguugagaucgcucucuaccagccgaugagcggaugcuauauccacuucuuucgggaaccuaccgaccugaagcaguucaagcaagaugccaaauacucucauggcauugacgugacagaucuguuuuccgcccagcccgggcucaccagcgcugucaucgaggcgcugccuagaaacauggugcuuacgugucagggauccgacgauauuaagaaacugcucgacucucagggccgccgggauaucaagcugauugacaucagccugaauaaagccgauuccagacgcuucgaaaacgcugucugggaccaaugcaaggaucuuugucacaugcauacaggggugguuguggagaagaaaaagcggggcggaaaagaggaaaucacaccccacugcgcccucauggacuguauuauguuugaugccgcugucucuggcgggcugaauauccccauucugagagccgugcucccucgcgacaugguuuuccggaccagcuccccgaaggugguccugugaggacuaguuauaagacugacuagcccgaugggccucccaacgggcccuccuccccuccuugcaccgagauuaaucaaaggcucuuuucagagccaccaaaaaaaaaaaaaaaaaaaaaaaaaaaaaaaaaaaaaaaaaaaaaaaaaaaaaaaaaaaaaaaaaaaaaaaaaaaaaaaaaaaaaaaaaaaaaaaaaaaaa

SEQ ID NO: 19214 - RNA, 1989 nt, Artificial Sequence
  mRNA product Design i-3 (hSL-A100) comprising derived and/or modified sequence from LASV(GA391;Clade III)__AAA46284__SP-HsPLAT_NP(2-570) (opt5)
aggagaaagcuuaccauggacgccaugaagagaggccugugcugugugcuccugcuuugcggggcugucuucguuagccccagcgccuccaaggaggugagaucuugccuguggacccagagccuccggcgcgaacuguccggcuacuguucuaacaucaaacuucaagucguuaaggacgcucaggcccugcuccacgggcuggauuucagcgagguguccaaugugcagagacuuaugcggaaacagaagcgcgacgauggagaccugaaaagacuccgggaucugaaccaagcggucaauaaccugguggaacucaagucuacacagcagaaaagcguucugcgcgugggcacgcuuuccagcgacgaucugcucauucuggcugccgaccuugagaaacugaagucuaaagucaccagaacagaacggccccucuccagcgggguguauaugggaaaucugucuucccagcaacuggaucagcgcagagcccuccugaacaugaucggcaugaccgggguuagcggaggcggcaagggggcuucuaauggaauugugcgggucugggacgugaaaaacgccgagcuucugaauaaccaguuuggcacaaugccuucccucacccuggcuugccuuacaaagcaggggcaaguggaucugaaugacgccguccaggcgcucaccgaucugggacugaucuacacggccaaguauccgaacagcuccgaccucgaccgccugucucagagccaucccauucuuaauaugaucgauaccaaaaaguccagccugaacaucucuggcuacaauuucucccucggggcugccguuaaagcuggagccuguaugcuggacggcggcaacaugcuugagacaauuaaggugagcccucaaaccauggaugggauccugaaaucuauucucaaggugaaaaagagccugggaauguuugucuccgacacacccggcgaaagaaacccuuaugagaauauccuguacaagauuugccucucuggggauggauggagcuauaucgcgucccggaccagcauugugggccgcgccugggaaaacacgguuguggaccuggagcaggauaauaaaccccagaagaucgggaacggaggcucuaauaaaucccuucagagcgcuggcuucgccgcugggcugaucuacucucaacucaugacacugaaggacuuuaaauguuucaaccugauuccuaaugccaagaccuggauggauaucgagggaagaccggaagaccccgucgagauugcccuuuaccagccuuccagcggcugcuaugugcacuuuuuccgggaacccacagaucucaagcaguuuaaacaggacgcuaaguacucccaugggagagacguuaccgaucuguucgcggcccaaccuggacugaccucugcugugaucgaggcccucccccgcaacauggucauuacaugucagggcagcgaagacauccggaaacugcuugagucccaggggagacgcgauaucaagcugauugacaucacgcucucuaaagccgauagccggaaguuugagaaugcugugugggaccaguucaaggaucugugccacaugcauaccggcgucgugguugaaaagaagaaaagaggaggcaaggaggaaauuacaccgcacugugcccugauggacugcaucauguuugaugcggcuguguccgggggacuugacgccaaaguccuccgcgugguucugccucgggauaugguguucagaaccagcacacccaaggucgugcugugaggacuaguuauaagacugacuagcccgaugggccucccaacgggcccuccuccccuccuugcaccgagauuaaucaaaggcucuuuucagagccaccaaaaaaaaaaaaaaaaaaaaaaaaaaaaaaaaaaaaaaaaaaaaaaaaaaaaaaaaaaaaaaaaaaaaaaaaaaaaaaaaaaaaaaaaaaaaaaaaaaaaa

SEQ ID NO: 19215 - RNA, 1986 nt, Artificial Sequence
  mRNA product Design i-3 (hSL-A100) comprising derived and/or modified sequence from LASV(Nig08-A19;Clade III)__ADU56619__SP-HsPLAT_NP(2-569) (opt5)
aggagaaagcuuaccauggacgccaugaagagaggccugugcugugugcuccugcuuugcggggcugucuucguuagccccagcgccuccaaggaggugaaaucuuuccuguggacccagagccucagacgggaacuguccggcuacugcucuaacaucaaacuucaagucguuaaggacgcucaggcccugcuccacgggcuggauuuuagcgagguguccaaugugcagcgccuuaugagaaagcagaaacgggacgauggagaccugaagcgccucagagaucugaaccaagcggucaauaaccugguggaacucaagucuacacagcagaaaagcguucugcgggugggcacgcuuuccagcgacgaucugcucguccuggcugccgaccuugagaagcugaaaucuaaggugguucgcaccgaaagaccccucuccagcgggauuuauaugggaaaucugucuucccagcaacuggaucagcggaaagcccuccugaacaugaucggcaugacagggggaaauggcggccgcaacaccacaagcgacgggauugugagagucugggaugugaagaaugcugagcuucugaacaaucaguucggaaccaugccuucucucacacuggccugucuuaccaagcagggccaaguggaccugaacgaugcuguccaggcccucacggaccuggggcugaucuacaccgcgaaauaucccaauuccagcgaccucgaucggcuggcccagucccauccgauucuuaacaugaucgacacaaagaaaucuagccugaauaucuccggauacaacuuuagccucggcgcugccguuaaggcuggggccugcaugcuggauggaggcaacaugcuugagaccauuaaagugucuccucaaacaauggacggcauccugaaguccauucucaaagugaagcgcagccuggggauguucaucucugauacccccggagaaagaaauccuuaugagaacauucuguacaagaucugucucagcggcgacggguggcccuauauugcgucccggacgucuaucgucggacgcgccugggaaaauacagugguugaucuggagagcgacaacaaaccucagaagaccggcaaugggggauccaacaaaagccuucagucugcuggcuuugccgcuggccugacauacucccagcucaugacccugaaggauagcaugcugcaacuugacccgaaugccaaaaccuggauggauaucgaggggagacccgaagacccuguggagauugcccucuaccagcccucuuccggaugcuauauccacuucuuucgggaaccuacagaccugaagcaguucaagcaggaugcuaaauacagccauggcauugacgucacggaucuguuugcggcccaacccgggcucaccuccgcugugaucgaggcccugccgagaaacaugguuauuacaugucagggaucugaagacauccgcaaacuucuggagagccagggccggagagauaucaagcucauugacaucucccugucuaagguggauagccgcaaauucgagaaugccgucugggaccaguuuaaggaucugugccacaugcauaccgggauuguggucgaaaagaaaaagcggggcggaaaagaggaaaucacaccucacugugcucuuauggacugcauuauguucgaugccgcgguguccggcgggguugacgcuaaggugcucagagccguccugccccgcgauaugguguuucggaccagcacgccuaaaguugugcugugaggacuaguuauaagacugacuagcccgaugggccucccaacgggcccuccuccccuccuugcaccgagauuaaucaaaggcucuuuucagagccaccaaaaaaaaaaaaaaaaaaaaaaaaaaaaaaaaaaaaaaaaaaaaaaaaaaaaaaaaaaaaaaaaaaaaaaaaaaaaaaaaaaaaaaaaaaaaaaaaaaaaa

SEQ ID NO: 19216 - RNA, 1986 nt, Artificial Sequence
  mRNA product Design i-3 (hSL-A100) comprising derived and/or modified sequence from LASV(G1180-SLE-2010;Clade IV)__AIT17169__SP-HsPLAT_NP(2-569) (opt5)
aggagaaagcuuaccauggacgccaugaagagaggccugugcugugugcuccugcuuugcggggcugucuucguuagccccagcgccuccaaggagaucaaaucuuuccuguggacccagagccucagacgggaacuguccggcuacugcucuaacauuaagcugcaaguggucaaagacgcucaggcccugcuccacgggcuggauuuuagcgagguuuccaaugugcagcgccuuaugagaaaggaacggcgcgacgauaacgaccugaaaagacuccgggaucugaaucaggcggugaacaaucuggucgagcucaagucuacacaacaaaagagcauccugcgcgugggaacgcuuaccuccgacgaucugcucauucuggcugccgaccuugaaaaacuuaagagcaaaguuaucagaacagagcggccccucucugccggcguguauauggggaaccuguccagccagcagcuggaucagcgcagagcucuccugucuaugauuggaauguccagcggcaaucagcgggcccaggcugggcgcgacggagucgugagaguuugggaugugaagaacgucgagcuucugaauaaccaguucggcaccaugccuucucucacacuggccugucuuaccaaacaaggccagguggaccugaaugaugcggugcaggcccucacagaccuggggcugaucuacaccgcuaaguauccgaacacguccgaccucgaucggcugacccaaagccaucccauccuuaauaugauugacacaaagaaauccucucugaacaucagcggauacaauuuuucccucggcgccgcugucaaggccggggcgugcaugcuggauggaggcaacaugcuugaaaccauuaaaguuagcccucagacaauggacgggauccugaagucuauucucaaagugaagaaagcccugggaauguucaucuccgauacccccggcgagcgcaacccuuaugaaaauauucuguacaagaucugucucagcggcgacggguggcccuauaucgcuucuagaacgagcauuacaggacgggccugggagaacaccguggucgaucuggaguccgacggcaagccucagaaagcugggucuaauaacagcaauaagucccuucagagcgugggauuuacagccggccugaccuacucucaacucaugacccugaaagaugccaugcugcagcuugacccgaacgcuaagacauggauggauaucgaagggagacccgaggacccuguugaaauugcgcucuaccagcccuccagcggaugcuauauccacuucuuucgcgagccuacggaccugaaacaguucaagcaagaugccaaguacucucauggcauugacgugaccgaucuguuugcugcccagcccggccucacauccgccgucaucgacgcucugccgcggaauauggugaucaccugucaggggagcgaugacauuagaaaacuucuggaaucccagggacgcaaggauaucaaacucauugacaucgcccugucuaagacagauagccggaaauaugagaacgcgguuugggaccaauacaaggaucugugccacaugcauaccggcguggucguggagaagaaaaagagagggggaaaagaagagauuacgccucacugugcucuuauggacugcaucauguucgaugccgccgucuccggcgggcucaauacaucugugcugcgcgcuguucugccccgggacaugguguuuagaaccagcaccccucgcgucgugcucugaggacuaguuauaagacugacuagcccgaugggccucccaacgggcccuccuccccuccuugcaccgagauuaaucaaaggcucuuuucagagccaccaaaaaaaaaaaaaaaaaaaaaaaaaaaaaaaaaaaaaaaaaaaaaaaaaaaaaaaaaaaaaaaaaaaaaaaaaaaaaaaaaaaaaaaaaaaaaaaaaaaaa

SEQ ID NO: 19217 - RNA, 1986 nt, Artificial Sequence
  mRNA product Design i-3 (hSL-A100) comprising derived and/or modified sequence from LASV(G1442-SLE-2011;Clade IV)__AIT17181__SP-HsPLAT_NP(2-569) (opt5)
aggagaaagcuuaccauggacgccaugaagagaggccugugcugugugcuccugcuuugcggggcugucuucguuagccccagcgccuccaaggaggugaaaucuuuccuguggacccagagccucagacgggaacuguccggcuacugcucuaacaucaaacuucaagucguuaaggacgcucaggcccugcuccacgggcuggauuuuagcgagguguccaaugugcagcgccuuaugagaaagcagcggcgcgacgauaacgaccugaaaagacuccgggaucugaaucaagcggucaacaaucugguggaacucaagucuacacagcaaaagagcguucugcgcgugggaacgcuuaccuccgacgaucugcucguccuggcugccgaccuugagaaacuuaagagcaaagugauuagaacagaacggccccucucugccggcguuuauauggggaaccuguccagccagcagcuggaucagcgcagagcucuccugaauaugaucggaaugucuggcgggauucagggaacccggacaggccgcgacggcguggucagagugugggaugugaagaacgccgaccuucugaauaaccaguucgggaccaugccuucccucacacuggcuugucuuaccaaacaaggacaggucgaucugaaugacguugugcaggcccucacggaccugggccugaucuacaccgcgaaguauccgaacgccagcgaucucgaccggcugacacaaucucaucccauucuuaauaugaucgauaccaagaaauccagccugaacaucuccggguacaauuuuucucucggagcugccgugaaggcuggcgccugcaugcuggacgggggaaacaugcuugagacaauuaaagucagcccucagaccauggauggcauccugaaguccauucucaaagugaagaaaacgcugggcauguucaucagcgacacacccggggagcgcaacccuuaugaaaauauucuguacaagaucugucucucuggagauggcuggcccuauauugcguccagaaccagcaucacagggcgggccugggagaacaccguuguggaccuggaaucugauggaaagccucagaaagcuggcagcaauaacuccaauaagucucuucagagcgccggguuugcugccggacugaccuacucccaacucaugacacugaaagacgccaugcugcagcuugauccgaacgcuaagacguggauggacaucgagggcagacccgaggacccugucgaaauugcgcucuaccagcccagcucuggcugcuauauccacuucuuucgcgagccuaccgaucugaaacaguucaagcaagacgccaaguacucccaugggauugaugugacagaccuguuugcugcccagcccggacucaccagcgccguuaucgaagcucugccgcggaauauggugauuacaugucagggcucugaugacaucaaaaagcugcuggagucccaggggagaaaagauaucaagcucauugacaucgcccugagcaaaaccgauucccgcaaguaugaaaacgcggucugggaccaauacaaggaucugugccacaugcauacgggaguggucguggagaaaaagaaacggggcgggaaggaggaaauuacaccucacugugcucuuauggacugcaucauguucgaugccgccguuucuggcggacucaauacccuggugcugagagcuguccucccccgcgacaugguguuucggaccagcacaccuagaguugugcugugaggacuaguuauaagacugacuagcccgaugggccucccaacgggcccuccuccccuccuugcaccgagauuaaucaaaggcucuuuucagagccaccaaaaaaaaaaaaaaaaaaaaaaaaaaaaaaaaaaaaaaaaaaaaaaaaaaaaaaaaaaaaaaaaaaaaaaaaaaaaaaaaaaaaaaaaaaaaaaaaaaaaa

SEQ ID NO: 19218 - RNA, 1986 nt, Artificial Sequence
  mRNA product Design i-3 (hSL-A100) comprising derived and/or modified sequence from LASV(G3010-SLE-2013;Clade IV)__AIT17345__SP-HsPLAT_NP(2-569) (opt5)
aggagaaagcuuaccauggacgccaugaagagaggccugugcugugugcuccugcuuugcggggcugucuucguuagccccagcgccuccaaggagaucaaaucuuuccuguggacccagagccucagacgggaacuguccggcuacugcucuaacauuaaacuucaaguggucaaagacgcucaggcccugcuccacgggcuggauuuuagcgagguuuccaaugugcagcgccuuaugagaaaggaacggcgcgacgauaacgaccugaaaagacuccgggaucugaaucaggcggugaacaaucuggucgagcucaagucuacacaacaaaagagcauccugcgcgugggaacgcuuaccuccgacgaucugcucauucuggcugccgaccuugaaaaacuuaagagcaaaguuacaagaaccgagcggccccucucugccggcguguauauggggaaccuguccagccagcagcuggaucagcgcagagcucuccugucuaugaucggaauguccagcggcguccagggggcccgggcuggacgcgacggcgugguuagagugugggaugucaagaaugccgagcuucugaacaaucaguucggcacaaugccuucucucacccuggcgugucuuacaaaacaggggcaaguggaccugaacgaugugguccaggcccucaccgaccugggacugauuuacacggcuaaguauccgaauaccuccgaccucgaucggcugacacagagccaucccauccuuaacaugaucgacaccaagaaauccucucugaauauuagcggcuacaacuuuucccucggggccgcuguuaaggccggagcgugcaugcuggauggcgggaauaugcuugaaacaaucaaagugagcccucaaaccauggacggcauucugaagucuauccucaaagugaagaaagcccugggaauguucauuuccgagacgcccggcgaacgcaacccuuaugagaacauccuguacaagauuugucucagcggggauggauggcccuauaucgcuucuagaacaagcaucaccggccgggccugggagaauacagucguggaccuggaauccgaugggaagccucagaaagcuggaucuaacaauagcaacaagucccuucagagcgccggcuuuaccgccgggcugaccuacucucagcucaugacacugaaagacgcuaugcugcaacuugauccgaaugcgaagacguggauggacauugagggaagacccgaagauccuguugagguggcccucuaccagcccuccagcggcugcuauauccacuucuuucgcgaaccuaccgaccugaaacaguucaagcaggacgcuaaguacucucauggcauugaugucacagaccuguuugccgcccaacccgggcucaccuccgcugugaucgaugcccugccgcggaacaugguuauuacaugucagggaagcgacgauaucaaaaagcugcuggagucccagggcagaaaagacaucaagcucauugauaucgcgcugucuaaaaccgacagccgcaaguaugagaaugcugugugggaucaguacaaggaccugugccacaugcauacgggggucguggucgaaaagaagaaacggggaggcaaggaggaaauuacaccucacugugcccuuauggauugcaucauguucgacgccgcuguguccgggggccucaacaccucuguucugagagccgugcugccccgcgauauggucuuucggaccagcacaccuagagugguucucugaggacuaguuauaagacugacuagcccgaugggccucccaacgggcccuccuccccuccuugcaccgagauuaaucaaaggcucuuuucagagccaccaaaaaaaaaaaaaaaaaaaaaaaaaaaaaaaaaaaaaaaaaaaaaaaaaaaaaaaaaaaaaaaaaaaaaaaaaaaaaaaaaaaaaaaaaaaaaaaaaaaaa

SEQ ID NO: 19219 - RNA, 1986 nt, Artificial Sequence
  mRNA product Design i-3 (hSL-A100) comprising derived and/or modified sequence from LASV(G502-SLE-2009;Clade IV)__AIT17127__SP-HsPLAT_NP(2-569) (opt5)
aggagaaagcuuaccauggacgccaugaagagaggccugugcugugugcuccugcuuugcggggcugucuucguuagccccagcgccuccaaggagaucaaaucuuuccuguggacccagagccucagacgggaacuguccggcuacugcucuaacauuaagcugcaaguggucaaagacgcucaggcccugcuccacgggcuggauuuuagcgagguuuccaaugugcagcgccuuaugagaaaggaacggcgcgacgauaacgaccugaaaagacuccgggaucugaaucaggcggugaacaaucuggucgagcucaagucuacacaacaaaagagcauccugcgcgugggaacgcuuaccuccgacgaucugcucauucuggcugccgaccuugaaaaacuuaagagcaaaguuaucagaacagagcggccccucucugccggcguguauauggggaaccuguccagccagcagcuggaucagcgcagagcucuccugucuaugauuggaauguccggcgggaaucagggaguccgggccggcaaggacggcgugguucgcgugugggaugucaaaaacgcugagcuucugaauaaccaguucgggaccaugccuagccucacacuggccugucuuaccaagcagggacaaguggaccugaaugaugcggugcaggcccucacagaccugggccugaucuacaccgcuaaguauccgaacacgucugaccucgauagacugacccagucccaucccauccuuaauaugauugacaccaaaaagagcucccugaacaucucuggguacaauuuuagccucggagccgcugucaaagccggcgcgugcaugcuggaugggggaaacaugcuugaaacaauuaagguuuccccucaaacaauggacggcauccugaaaagcauucucaaggugaaaaaggcccugggcauguucaucucugauacccccggggagcggaacccuuaugaaaauauucuguacaagaucugucucuccggagacggcuggcccuauaucgcuagccgcacgucuauuacagggagagccugggagaacaccguggucgaucuggagagcgacggaaaaccucagaaggcuggcuccaauaacucuaauaaaagccuucaguccgccggguuuacagccggacugaccuacagccagcucaugacccugaaggaugcuaugcugcaacuugacccgaacacaaaaacguggauggauaucgaaggccggcccgaggacccuguggaaauugcgcucuaccagcccucuuccggcugcuauauccacuucuuuagagagccuaccgaccugaagcaguucaagcaggaugccaaauacagccaugggauugacguuacagaucuguuugcugcccaacccggacucaccucugccgugaucgacgcucugccgcgcaauauggucaucacaugucagggcuccgaugacauucggaaacuucuggaaagccaggggagaaaggauaucaagcucauugacaucgcccugaacaaaaccgauucccgcaaguaugagaaugcggugugggaccaguacaaggaucugugccacaugcauacgggaguuguggucgagaaaaagaaacggggcgggaaggaagagauuacaccucacugugcucuuauggacugcaucauguucgaugccgccgugucuggcggacucaacaccagcguccugagagcugugcugccccgcgacaugguuuuucggaccuccacaccuagagugguccucugaggacuaguuauaagacugacuagcccgaugggccucccaacgggcccuccuccccuccuugcaccgagauuaaucaaaggcucuuuucagagccaccaaaaaaaaaaaaaaaaaaaaaaaaaaaaaaaaaaaaaaaaaaaaaaaaaaaaaaaaaaaaaaaaaaaaaaaaaaaaaaaaaaaaaaaaaaaaaaaaaaaaa

SEQ ID NO: 19220 - RNA, 1986 nt, Artificial Sequence
  mRNA product Design i-3 (hSL-A100) comprising derived and/or modified sequence from LASV(G733-SLE-2010;Clade IV)__AIT17155__SP-HsPLAT_NP(2-569) (opt5)
aggagaaagcuuaccauggacgccaugaagagaggccugugcugugugcuccugcuuugcggggcugucuucguuagccccagcgccuccaaggagaucaaaucuuuccuguggacccagagccucagacgggaacuguccggcuacugcucuaacauuaagcugcaaguggucaaagacgcucaggcccugcuccacgggcuggauuuuagcgagguuuccaaugugcagcgccuuaugagaaaggaacggcgcgacgauaacgaccugaaaagacuccgggaucugaaucaggcggugaacaaucuggucgagcucaagucuacacaacaaaagagcgugcugcgcguuggaacgcuuaccuccgacgaacugcucgugcuggcugccgaucuugagaaacuuaagagcaaagucaucagaacagagcggccccucucugccggcguguauauggggaaccuguccagccagcagcuggaccagcgcagagcucuccugucuaugauuggaauguccggcgggaaucagggagcccggaccggccgcgauggcguugugagagucugggacgugaagaacgcugaacuucugaauaaccaguucgggacaaugccuagccucacccuggccugucuuacaaaacagggacaaguggaucugaaugacgcgguccaggcccucaccgaucugggccugaucuacacggcuaaguauccgaacaccucugaccucgaccggcugacacagucccaucccauucuuaauaugaucgauaccaagaaaagcucccugaacaucucuggguacaauuuuagccucggagccgcuguuaaggccggcgcgugcaugcuggacgggggaaacaugcuugagacaauuaaaguguccccucaaaccauggauggcauccucaagagcauucugaaagugaagaaagcccugggcauguucaucucugacacgcccggggaacgcaacccuuaugagaauauucuguacaagaucugucucuccggagauggcuggcccuauauugcuagcagaacaucuaucaccgggcgggccugggagaacacagucguggaccuggaaagcgauggaaagccucagaaagcuggcuccaauaacucuaauaagagccuucaguccgccggguuuaccgccggacugaccuacagccagcucaugacacugaaagacgcuaugcugcaacuugauccgaacgcgaagacguggauggacaucgagggcagacccgaagauccuguugagauugcccucuaccagcccucuuccggcugcuauauccacuucuuucgcgaaccuaccgaccugaaacaguucaagcaggacgcuaaguacagccaugggauugaugugacagaccuguuugccgcccaacccggacucaccucugcugucaucgaugcccugccgcggaauauggugauuacaugucagggcuccgacgauaucagaaaacuucuggagagccaggggcgcaaggacaucaaacucauugauaucgcgcuguccaagauugacucucggaaauaugagaacgcuguuugggaucaguacaaggaccugugccacaugcauaccggaguggucguggaaaagaaaaagagaggcgggaaagaggaaaucacgccucacugugcccuuauggauugcauuauguucgacgccgcugucagcggcggacucaauucccuggugcugcgcgccguucucccccgggauaugguguuuagaacaucuaccccucgcgucgugcugugaggacuaguuauaagacugacuagcccgaugggccucccaacgggcccuccuccccuccuugcaccgagauuaaucaaaggcucuuuucagagccaccaaaaaaaaaaaaaaaaaaaaaaaaaaaaaaaaaaaaaaaaaaaaaaaaaaaaaaaaaaaaaaaaaaaaaaaaaaaaaaaaaaaaaaaaaaaaaaaaaaaaa

SEQ ID NO: 19221 - RNA, 1986 nt, Artificial Sequence
  mRNA product Design i-3 (hSL-A100) comprising derived and/or modified sequence from MOPV/LASV reassortant(IGS-1;Clade IV)__AFY05578__SP-HsPLAT_NP(2-569) (opt5)
aggagaaagcuuaccauggacgccaugaagagaggccugugcugugugcuccugcuuugcggggcugucuucguuagccccagcgccuccaaggagaucaaaucuuuccuguggacccagagccucagacgggaacuguccggcuacugcucuaacauuaaacuucaaguggucaaggacgcucaggcccugcuccacgggcuggauuuuagcgagguuuccaaugugcagcgccuuaugagaaaggaacggcgcgacgauaacgaccugaaaagacuccgggaucugaaucaggcggugaacaaucuggucgagcucaagucuacacaacaaaagagcauccugcgcgugggaacgcuuaccuccgacgaucugcucauucuggcugccgaccuugaaaaacugagaagcaagguuauccggacagagcgcccccucucugccggcguguauauggggaaccuguccagccagcagcuggaucagagacgggcucuccugaauaugauuggaaugucuggcgggaaccagggagcccgcgcuggcagagacggcgucgugcggguuugggaugugaaaaaugccgagcuucuguccaaccaguucgggaccaugccuagccucacacuggcgugucuuaccaagcagggacaagucgaccugaaugaugccgugcaggcucucacagaccugggccugaucuacaccgccaaauauccgaacacgucugaccucgaucgccugacccagucccaucccauccuuaauaugauugacacaaagaaaagcucccugaacaucucuggguacaauuuuagccucggagcugccgugaaggcgggcgccugcaugcuggaugggggaaacaugcuugaaaccauuaaggucuccccucaaacaauggacggcauccugaaaagcauucucaagguuaaaaaggcucugggcauguucaucucugauacccccggggagagaaacccuuaugaaaauauucuguacaaaaucugucucuccggagacggcuggcccuauaucgccagccggacgucuauuacagggagagcuugggagaacaccgugguggaucuggagagcgacggaaagccucagaaggccgauuccaauaacucuagcaaaucccuucagagcgccggcuuuacagcugggcugaccuacucucagcucaugacccugaaggacgcgaugcugcaacuugauccgaaugccaaaacauggauggacaucgaaggacgccccgaggacccugucgaaauugcucucuaccagcccuccagcggcugcuauauccacuucuuucgggagccuacggaucugaagcaguucaaacaggacgccaaguacucucauggcauugaugugaccgaccuguuugccacacaacccgggcucaccuccgcuguuaucgaugcccugccgagaaacauggugaucacaugucagggaagcgacgauauucgcaaacuucuggaaucccagggccggaaggacaucaagcucauugauaucgaccugucuaaaaccgauagcagaaaguaugagaaugcggucugggaccaguacaaagaucugugccacaugcauacgggggugguuguggagaagaagaaacgcggaggcaaggaagagauuacaccucacugugcucuuauggacugcaucauguucgacgccgccgucuccgggggccucaacaccucugugcugcgggcuguccugcccagagauaugguguuucgcaccagcacaccucggguugugcucugaggacuaguuauaagacugacuagcccgaugggccucccaacgggcccuccuccccuccuugcaccgagauuaaucaaaggcucuuuucagagccaccaaaaaaaaaaaaaaaaaaaaaaaaaaaaaaaaaaaaaaaaaaaaaaaaaaaaaaaaaaaaaaaaaaaaaaaaaaaaaaaaaaaaaaaaaaaaaaaaaaaaa

SEQ ID NO: 19222 - RNA, 1986 nt, Artificial Sequence
  mRNA product Design i-3 (hSL-A100) comprising derived and/or modified sequence from LASV(LM765-SLE-2012;Clade IV)__AIT17815__SP-HsPLAT_NP(2-569) (opt5)
aggagaaagcuuaccauggacgccaugaagagaggccugugcugugugcuccugcuuugcggggcugucuucguuagccccagcgccuccaaggagaucaaaucuuuccuguggacccagagccucagacgggaacuguccggcuacugcucuaacauuaagcugcaaguggucaaagacgcucaggcccugcuccacgggcuggauuuuagcgagguuuccaaugugcagcgccuuaugagaaaggaacggcgcgacgauaacgaccugaaaagacuccgggaucugaaucaggcggugaacaaucuggucgagcucaagucuacacaacaaaagagcauccugcgcgugggaacgcuuaccuccgacgaucugcucauucuggcugccgaccuugaaaaacuuaagagcaaaguuacaagaaccgagcggccccucucugccggcguguauauggggaaccuguccagccagcagcuggaucagcgcagagcucuccuggacaugaucggaaugucuggcuccaaucagggggcccgggcuggacgcgauggcgucgugagaguuugggacgugaagaacgccgagcuucugaauaaccaguucggcacaaugccuagccucacccuggcgugucuuacaaaacaggggcaagucgaucugaaugacgccgugcaggcucucaccgaccugggacugauuuacacggccaaguauccgaacaccucugaucucgaccggcugacacagucccaucccauccuuaauaugaucgauaccaagaaaagcucccugaacauuucuggcuacaauuuuagccucggggcugccgugaaggcgggagccugcaugcuggacggcgggaacaugcuugaaacaaucaaagucuccccucaaaccauggauggcauucucaagagcauccugaaaguuaagaaagcucugggaauguucauuucugacgcccccggcgagcgcaacccuuaugaaaauauccuguacaagauuugucucuccggggauggauggcccuauaucgcuagcagaacgucuaucacaggccgggccugggagaacaccgugguggaccuggagagcgaugggaagccucagaaagccggauccaauggcucuaacaagagccuucaguccgcuggguuuacagcgggacugaccuacagccagcucaugacccugaaagacgccaugcugcaacuugauccgaaugcuaagacauggauggacauugaaggcagacccgaggacccugucgaaaucgcccucuaccagcccucuuccggcugcuauauucacuucuuucgcgagccuacggaucugaaacaguucaagcaggacgccaaguacagccaugggaucgaugugaccgaccuguuugcugcccaacccggacucacaucugcgguuauugaugcucugccgcggaacauggugaucaccugucagggcuccgacgauaucagaaaacuuuucgaaagccaggggcgcaaggacauuaaacugaucgauauugcccucuccaagacagacucucggaaauaugagaaugccgucugggaucaguacaaggaccugugccacaugcauaccggaaucgugguugagaagaaaaagagaggcgggaaagaagagauuacgccucacugugcucugauggauugcaucauguuugacgccgcugugagcggcggacuuaacacauccguccuccgcgccgugcugccccgggacauggucuucagaaccucuaccccucgcgugguucugugaggacuaguuauaagacugacuagcccgaugggccucccaacgggcccuccuccccuccuugcaccgagauuaaucaaaggcucuuuucagagccaccaaaaaaaaaaaaaaaaaaaaaaaaaaaaaaaaaaaaaaaaaaaaaaaaaaaaaaaaaaaaaaaaaaaaaaaaaaaaaaaaaaaaaaaaaaaaaaaaaaaaa

SEQ ID NO: 19223 - RNA, 1986 nt, Artificial Sequence
  mRNA product Design i-3 (hSL-A100) comprising derived and/or modified sequence from LASV(LM776-SLE-2012;Clade IV)__AIT17825__SP-HsPLAT_NP(2-569) (opt5)
aggagaaagcuuaccauggacgccaugaagagaggccugugcugugugcuccugcuuugcggggcugucuucguuagccccagcgccuccaaggagaucaaaucuuuccuguggacccagagccucagacgggaacuguccucuuacugcagcaacauuaaacuucaaguggucaaggacgcucaggcccugcuccacggccuggauuuuuccgagguuucuaaugugcagcgccuuaugagaaaggaacggcgcgacgauaacgaccugaaaagacuccgggaucugaaucaggcggugaacaaucuggucgagcucaagagcacacaacagaaguccauccugcgcguggggacgcuuaccagcgacgaucugcucauucuggcugccgaccuugaaaaacugaagucuaaaguuacaagaaccgagcggccccucuccgccggaguguauaugggcaaccugagcucucagcagcuggaucaacgcagagcucuccuguccaugaucgggaugagcggaucuaaucagggcgcccgggcugggcgcgacggagucgugagaguuugggaugugaagaacgccgagcuucugaauaaccaguucggcacaaugccuucccucacccuggcgugucuuacaaaacagggccaagucgaccugaaugaugccgugcaggcucucaccgaccuggggcugauuuacacggccaaguauccgaacaccagcgaccucgaucggcugacacagucccaucccauccuuaauaugaucgacaccaagaaaucuagccugaacauuuccggauacaauuuuagccucggcgcugccgugaaggcgggggccugcaugcuggauggaggcaacaugcuugaaacaaucaaagucucuccucaaaccauggacgggauucugaaguccauccucaaaguuaagaaagcucugggaauguucauuagcgauacgcccggcgagcgcaacccuuaugaaaauauccuguacaagauuugucucucuggcgacggguggcccuauaucgccagcagaacauccaucaccggacgggcuugggagaacacagugguggaucuggagucugacggcaagccucagaaagccgggagcaauaacuccaauaagagccuucagucugccggauuuaccgcuggccugaccuacucccagcucaugacacugaaagaugcgaugcugcaacuugacccgaacgccaagacguggauggauauugaagggagacccgaggacccugucgaaguggcucucuaccagcccagcucuggaugcuauauccacuucuuucgcgagccuaccgaccugaaacaguucaagcaggaugccaaguacucccauggcauugacguuacagaucuguuugccgcucaacccggccucaccagcgccgugaucgacgcgcugccgcggaauauggucauuacaugucagggguccgaugacaucagaaaacuucuggaaucucagggacgcaaggauaucaaacucauugacaucgcucugagcaagaccgauucccggaaauaugagaacgccgugugggaccaguacaaggaucugugccacaugcauacgggcguuguggucgagaagaaaaagagagggggaaaagaagagauuacaccucacugugcccuuauggacugcaucauguucgaugcugccgugucuggcgggcucaauaccagcguccugcgcgcugugcugccccgggacaugguuuuuagaaccuccacaccucgcgugguccucugaggacuaguuauaagacugacuagcccgaugggccucccaacgggcccuccuccccuccuugcaccgagauuaaucaaaggcucuuuucagagccaccaaaaaaaaaaaaaaaaaaaaaaaaaaaaaaaaaaaaaaaaaaaaaaaaaaaaaaaaaaaaaaaaaaaaaaaaaaaaaaaaaaaaaaaaaaaaaaaaaaaaa

SEQ ID NO: 19224 - RNA, 1986 nt, Artificial Sequence
  mRNA product Design i-3 (hSL-A100) comprising derived and/or modified sequence from LASV(Mad39;Clade IV)__ANH09723__SP-HsPLAT_NP(2-569) (opt5)
aggagaaagcuuaccauggacgccaugaagagaggccugugcugugugcuccugcuuugcggggcugucuucguuagccccagcgccuccaaggagaucaaaucuuuccuguggacccagagccucagacgggaacuguccggcuacugcucuaacauuaagcugcaaguggucaaagacgcucaggcccugcuccacgggcuggauuuuagcgagguuuccaaugugcagcgccuuaugagaaagcagcggcgcgacgauaacgaccugaaaagacuccgggaucugaaucaagcggugaacaaucuggucgaacucaagucuacacagcaaaagagcgugcugcgcguuggaacgcuuaccuccgacgaucugcucacacuggcugccgaccuugagaaacuuaagagcaaagugaccagaacagaacggccccucaccgccggcgucuauauggggaaccugucuucccagcagcuggaucagcgcagagcucuccugaauaugaucggaaugagcggcgggaaccagggagcccggacaggccgcgacggcgugguuagagugugggaugucaagaaugcugagcuucugaacaaucaguucgggaccaugccuucucucacgcuggccugucuuaccaaacaaggacagguggaccugaacgaugugguccaggcgcucacagaccugggccugauuuacaccgccaaguauccgaauacauccgaccucgaucggcugacccaaagccaucccauccuuaacaugauugacacgaauaagucuucccugaacaucagcggguacaacuuuucccucggagcugccguuaaagcuggcgccugcaugcuggaugggggaaauaugcuugagacaaucaaggugucuccucagaccauggacggcauucugaaaagcauccucaaggugaaaaagucccugggcauguucauuagcgauacacccggggaacgcaacccuuaugagaauauccuguacaaaauuugucucucuggagacggcuggcccuauaucgcguccagaaccagcauuaccgggcgggccugggaaaacacagucguggaucuggagucuggaggcaagccucagaaggcugggagcaauaacuccaauaaaucucuucagagcgccggauuugcugccggccugacguacucccaacucaugacccugaaggacgccaugcugcagcuugauccgaacgcuaaaacauggauggacaucgagggcagacccgaagauccuguugagaucgcgcucuaccagcccauuagcgggugcuauauccacuucuuucgcgaaccuaccgaccugaagcaguucaaacaagacgccaaguacucucauggaauugaugugacagaccuguuugcugcccagcccggccucaccuccgccgucaucgaggcucugccgcggaauauggugauuacgugucaggggagcgaugacaucagaaaacuuuucgaaucucagggacgcaaggauaucaagcugauugacaucgcccucuccaaaacagauagccggaaguaugagaacgcgguuugggaccaauacaaagaucugugccacaugcauaccggcguggucguggagaagaagaaaaagggcgggaaagaagagauuaccccucacugugcucugauggacugcaucauguuugaugccgccgucuccggaggccuuaauacacucgugcugagagcuguucugccccgcgacaugguguuccggaccucuacaccuaaggucgugcucugaggacuaguuauaagacugacuagcccgaugggccucccaacgggcccuccuccccuccuugcaccgagauuaaucaaaggcucuuuucagagccaccaaaaaaaaaaaaaaaaaaaaaaaaaaaaaaaaaaaaaaaaaaaaaaaaaaaaaaaaaaaaaaaaaaaaaaaaaaaaaaaaaaaaaaaaaaaaaaaaaaaaa

SEQ ID NO: 19225 - RNA, 1986 nt, Artificial Sequence
  mRNA product Design i-3 (hSL-A100) comprising derived and/or modified sequence from LASV(Z0947-SLE-2011;Clade IV)__AIT17841__SP-HsPLAT_NP(2-569) (opt5)
aggagaaagcuuaccauggacgccaugaagagaggccugugcugugugcuccugcuuugcggggcugucuucguuagccccagcgccuccaaggagaucaaaucuuuccuguggacccagagccucagacgggaacuguccggcuacugcucuaacauuaagcugcaaguggucaaagacgcucaggcccugcuccacgggcuggauuuuagcgagguuuccaaugugcagcgccuuaugagaaaggaacggcgcgacgauaacgaccugaaaagacuccgggaucugaaucaggcggugaacaaucuggucgagcucaagucuacacaacaaaagagcauccugcgcgugggaacgcuuaccuccgacgaucugcucauucuggcugccgaccuugaaaaacuuaagagcaaaguuacaagaaccgagcggccccucucugccggcguguauauggggaaccuguccagccagcagcuggaucagcgcagagcucuccugaauaugaucggaaugucuggcuccaaccagggggcccggacaggacgcgacggcgucgugagaguuugggaugugaagaaugcugagcuucugaacaaucaguucggcaccaugccuagccucacacuggccugucuuaccaaacaggggcaagucgaccugaacgaugcggugcaggcccucacggaccugggacugauuuacaccgcuaaguauccgaauacaucugaccucgaucggcugacccagucccaucccauccuuaacaugaucgacacaaagaaaagcucccugaauauuucuggcuacaacuuuagccucggggccgcugugaaggccggagcgugcaugcuggauggcgggaacaugcuugaaaccaucaaagucuccccucaaacgauggacggcauucucaagagcauccugaaaguuaagaaagcccugggaauguucauuucugaugcucccggcgagcgcaauccuuaugaaaacauccuguacaagauuugucucuccggggacggauggcccuauaucgccagcagaacaucuaucaccggccgggcuugggagaauacagugguggaucuggagagcgacgggaagccucagaaagccggauccaacggcucuaauaagagccuucaguccgccggguuuaccgcuggacugaccuacagccagcucaugacacugaaagaugcgaugcugcaacuugacccgaacgccaagacguggauggauauugaaggcagacccgaggacccugucgaaaucgcucucuaccagcccucuuccggcugcuauauucacuucuuucgcgagccuaccgaccugaaacaguucaagcaggaugccaaguacagccaugggaucgacgugacagaucuguuugccgcucaacccggacucaccucugccguuauugacgcgcugccgcggaauauggugaucacaugucagggcuccgaugacaucagaaaacuuuucgaaagccaggggcgcaaggauauuaaacugaucgacauugcucucuccaagaccgauucucggaaauaugagaacgccgucugggaccaguacaaggaucugugccacaugcauacgggaaucgugguugagaagaaaaagagaggcgggaaagaagagauuacaccucacugugcccugauggacugcaucauguuugaugcugccgugagcggcggacuuaauaccuccguccuccgcgcugugcugccccgggacauggucuucagaaccucuacaccucgcgugguucugugaggacuaguuauaagacugacuagcccgaugggccucccaacgggcccuccuccccuccuugcaccgagauuaaucaaaggcucuuuucagagccaccaaaaaaaaaaaaaaaaaaaaaaaaaaaaaaaaaaaaaaaaaaaaaaaaaaaaaaaaaaaaaaaaaaaaaaaaaaaaaaaaaaaaaaaaaaaaaaaaaaaaa

SEQ ID NO: 19226 - RNA, 1962 nt, Artificial Sequence
  mRNA product Design i-3 (A100) comprising derived and/or modified sequence from LASV(Josiah;Clade IV)__NP_694869__SP-HsPLAT_NP(2-569) (opt1)
aggagaaagcuuaccauggacgccaugaagcgcggccugugcugcgugcuccugcugugcggggccgucuucgugagccccagcgccuccaaggagaucaagagcuuccuguggacccagucccuccgccgggagcugagcggcuacugcuccaacaucaagcuccagguggucaaggacgcccaggcgcugcugcacgggcuggacuucagcgagguguccaacgugcagcgccucaugcggaaggagcgccgggacgacaacgaccugaagcgccugcgggaccucaaccaggccgucaacaaccugguggagcucaagagcacccagcagaaguccauccugcgcgugggcacccugaccagcgacgaccugcucauccuggccgccgaccuggagaagcucaaguccaaggucauccggaccgagcgcccccugagcgccgggguguacaugggcaaccuguccagccagcagcucgaccagcggcgcgcgcugcugaacaugaucgggauguccggcggcaaccagggggcccgggccggccgcgacggggugguccgggugugggacgugaagaacgccgagcuccugaacaaccaguucggcaccaugccgagccugacgcucgcgugccugaccaagcaggggcaggucgaccugaacgacgccgugcaggcccucaccgaccugggccugaucuacaccgccaaguaccccaacacguccgaccucgaccgccugacccagagccaccccauccugaacaugaucgacaccaagaaguccagccucaacaucagcggcuacaacuucucccugggggccgcggugaaggccggcgccugcaugcuggacgggggcaacaugcucgagaccaucaaggucagcccccagacgauggacggcauccugaaguccauccugaaggugaagaaggcccucgggauguucaucagcgacaccccgggcgagcggaaccccuacgagaacauccuguacaagaucugccuguccggggacggcuggcccuacaucgccagccgcaccuccaucaccgggcgggcgugggagaacacgguggucgaccucgagagcgacggcaagccccagaaggccgacuccaacaacagcuccaagagccugcaguccgccggcuucaccgccgggcugaccuacagccagcucaugacccugaaggacgccaugcugcagcuggacccgaacgcgaagacguggauggacaucgagggccgccccgaggaccccguggagaucgcccucuaccagcccuccagcgggugcuacauccacuucuuccgggagccgaccgaccugaagcaguucaagcaggacgccaaguacucccacggcaucgacgugaccgaccuguucgccacccagcccgggcucacgagcgccgucaucgacgcgcugccccgcaacauggugaucacgugccagggcuccgacgacauccgcaagcugcucgagagccagggccggaaggacaucaagcugaucgacaucgcccugagcaagaccgacucccgcaaguacgagaacgccgugugggaccaguacaaggaccucugccacaugcacaccggggucguggucgagaagaagaagcggggcgggaaggaggagaucaccccgcacugcgcccugauggacugcaucauguucgacgcggccgugagcggcgggcugaacaccuccgugcuccgcgccguccugccccgggacaugguguuccgcaccagcacgccccgggugguccugugaggacuaguuauaagacugacuagcccgaugggccucccaacgggcccuccuccccuccuugcaccgagauuaauaaaaaaaaaaaaaaaaaaaaaaaaaaaaaaaaaaaaaaaaaaaaaaaaaaaaaaaaaaaaaaaaaaaaaaaaaaaaaaaaaaaaaaaaaaaaaaaaaaaa

SEQ ID NO: 19227 - RNA, 1962 nt, Artificial Sequence
  mRNA product Design i-3 (A100) comprising derived and/or modified sequence from LASV(LP;Clade I)__AAF86702__SP-HsPLAT_NP(2-569) (opt1)
aggagaaagcuuaccauggacgccaugaagcgcggccugugcugcgugcuccugcugugcggggccgucuucgugagccccagcaacuccaaggagaucaagagcuuccuguggacccagucccuccgccgggagcugagcggcuacugcuccaacaucaagcuccagguggucaaggacgcccaggcccugcugcacgggcuggacuucagcgagguguccaacgugcagcgccucaugcggaagcagaagcgcgacgacgcggaccugaagcggcugcgcgaccucaaccaggccgucaacaaccugguggagcucaagagcacccagcagaagaacgugcugcgggucggcacgcuguccagcgacgaccugaucacccucgccgccgaccuggagaagcugaaguccaaggugauccgcaccgagcggccccucagcuccgggguguacaugggcaaccugagcucccagcagcuggaccagcgccgggcccuccugagcaugaucgggauguccggcggcccgcaggggaaccgcaccggcggggacggcgucgugcgggugugggacgucaagaacgcggagcugcucaacaaccaguucgggacgaugcccagccugacccuggccugccucaccaagcagggccagguggaccugaacgacgccgugcaggcccugaccgaccucggccugaucuacacggcgaaguaccccaacuccagcgaccuggacaugcucacccagagccaccccauccuggggauggucgacaccaagaaguccagccugaacaucuccggcuacaacuucagccucggggccgccgugaaggccggcgccugcaugcuggacggcgggaacaugcuggagaccaucaagguguccccgcagacgauggacggcauccucaagagcauccugaaggucaagcgcucccuggggauguucaucagcgacacccccggcgagcggaaccccuacgagaacauccucuacaagaucugccuguccggggagggcuggcccuacaucgcgagccgcaccuccaucaccggccgggccugggagaacacgcugguggaccucgagagcgacaacaagccgcccaagcugaacuccgccgggagcaacaagucccugcaggccgccggccucaacgcggggcugaccuacagccagcugaugacccugaaggacugcaugcuccagcuggaccccuccagcaagaccuggaucgacaucgagggccgccccgaggacccgguggagaucgcccuguuccagcccuccagcgggugcuacauccacuucuuccgggagcccacggaccucaagcaguucaagcaggacgccaaguacagccacggcaucgacgucaccgaccuguucuccacccagcccggccugaccagcgccgugaucgaggcccucccgcgcaacauggugcugacgugccagggguccgacgacaucaagaagcugcucgagagccagggccggcgcgacaucaagcugaucgacaucucccugagcaaggcggacucccgcaaguucgagaacgccgucugggaccaguacaaggaccucugccacaugcacaccgggguggucguggagaagaagaagcggggcgggaaggaggagaucacgccccacugcgcccugcuggacugcaucauguucgacgccgccaccaccggcagccucaacaucaccacccugcgcgcggugcugccccgggacauggucuuccgcaccuccacgcccaagguggugcucugaggacuaguuauaagacugacuagcccgaugggccucccaacgggcccuccuccccuccuugcaccgagauuaauaaaaaaaaaaaaaaaaaaaaaaaaaaaaaaaaaaaaaaaaaaaaaaaaaaaaaaaaaaaaaaaaaaaaaaaaaaaaaaaaaaaaaaaaaaaaaaaaaaaa

SEQ ID NO: 19228 - RNA, 1962 nt, Artificial Sequence
  mRNA product Design i-3 (A100) comprising derived and/or modified sequence from LASV(803213;Clade II)__AAF86704__SP-HsPLAT_NP(2-569) (opt1)
aggagaaagcuuaccauggacgccaugaagcgcggccugugcugcgugcuccugcugugcggggccgucuucgugagccccagcgccuccaaggaggugaaguccuuccuguggacccagagccuccgccgggagcugagcggcuacugcuccaacaucaagcugcaggucgugaaggacgcccaggcgcuccugcacgggcuggacuucagcgaggugaacaacguccagcgccucaugcggaagcagaagcgcgacgacggcgaccugaagcggcugcgcgaccucaaccaggccgugaacaaccugguggagcugaaguccacccagcagaaguccauccuccgggucgggacgcugaccagcgacgaccugcucacccuggccgccgaccuggagaagcucaagagcaaggugauccgcaccgagcggccccuguccagcggcguguacauggggaaccuguccacgcagcagcucgagcagcgccgggcccugcugaacaugaucggcauggucggcggggcgcagggcacccagccggggcgcgacggcguggugcgggucugggacgugaagaaccccgaccuccugaacaaccaguucgggaccaugcccagccugacccucgccugccugacgaagcagggccagguggaccugaacgacgccguccucgcccugaccgaccugggccucaucuacaccgcgaaguaccccaacuccagcgaccuggaccgccugucccagagccacccgauccucaacaugguggacaccaagaaguccagccugaacaucagcggguacaacuucucccugggcgccgccgugaaggccggggccugcaugcucgacggcggcaacaugcuggagacgaucaaggucacgccccagaccauggacgggauccucaagagcauccugaaggugaagcggucccugggcauguucgugagcgacacccccggggagcgcaaccccuacgagaacauccuguacaagaucugccucuccggcgacggguggccguacaucgcgagccggaccuccaucgucggccgcgccugggagaacaccaccguggaccuggagagcgacggcaagccccagaagguggggaccgccggcuccaacaagagccugcaguccgccggguuccccacgggccucaccuacagccagcugaugacccugaaggacuccaugaugcagcuggaccccagcgccaagaccuggaucgacaucgaggggcggccggaggaccccgucgagaucgcgcucuaccagcccauguccggcugcuacauccacuucuuccgcgagcccacggaccugaagcaguucaagcaggacgccaaguacagccacggcaucgacguggccgaccuguucccggcccagcccgggcucaccuccgccgucaucgaggcgcugccccggaacauggugcugaccugccagggcagcgacgacaucaagaagcuccuggacucccaggggcgccgcgacaucaagcugaucgacaucagccucagcaagguggacucccggaaguucgagaacgccgucugggaccagugcaaggaccugugccacaugcacaccggcgugguggucgagaagaagaagcgcgggggcaaggaggagaucacgccccacugcgcccugauggacugcaucauguucgacgccgccgugagcggcgggcucaacaucccggugcugcgggcgguccugccccgcgacaugguguuccggaccuccagccccaaggugguccucugaggacuaguuauaagacugacuagcccgaugggccucccaacgggcccuccuccccuccuugcaccgagauuaauaaaaaaaaaaaaaaaaaaaaaaaaaaaaaaaaaaaaaaaaaaaaaaaaaaaaaaaaaaaaaaaaaaaaaaaaaaaaaaaaaaaaaaaaaaaaaaaaaaaa

SEQ ID NO: 19229 - RNA, 1965 nt, Artificial Sequence
  mRNA product Design i-3 (A100) comprising derived and/or modified sequence from LASV(GA391;Clade III)__CAA36646__SP-HsPLAT_NP(2-570) (opt1)
aggagaaagcuuaccauggacgccaugaagcgcggccugugcugcgugcuccugcugugcggggccgucuucgugagccccagcgccuccaaggaggugcgcagcuuccuguggacccagucccuccggcgcgagcugagcggcuacugcuccaacaucaagcugcaggucgugaaggacgcccaggcgcuccugcacgggcuggacuucagcgagguguccaacguccagcggcucaugcgcaagcagaagcgggacgacggcgaccugaagcgccugcgggaccucaaccaggccgugaacaaccugguggagcucaagagcacccagcagaaguccguccugcgcguggggacccugagcuccgacgaccugcucauccuggccgccgaccuggagaagcucaagagcaaggugacccggaccgagcgcccccuguccagcggcgucuacauggggaaccuguccagccagcagcucgaccagcggcgcgcccugcugaacaugaucggcaugaccggcguguccgggggcgggaagggcgcgagcgacgggaucgugcgggucugggacgugaagaacgccgagcuccugaacaaccaguucggcacgaugccgucccugacccucgccugccugaccaagcagggccagguggaccugaacgacgccguccaggcgcucaccgaccuggggcugaucuacacggccaaguaccccaacagcagcgaccucgaccgccugucccagagccaccccauccugaacaugaucgacaccaagaaguccagccucaacaucuccggcuacaacuucagccugggggccgccgugaaggccggcgcgugcaugcuggacggcgggaacaugcucgagaccaucaaggugagcccccagaccauggacggcauccucaaguccauccugaaggucaagaagucccuggggauguucgugagcgacacgccgggcgagcggaaccccuacgagaacauccuguacaagaucugccuguccggggacggcuggcccuacaucgccagccgcaccuccaucgugggccgggccugggagaacaccgucguggaccucgagcaggacaacaagccccagaagaucgggaacggcgggagcaacaagucccugcagagcgccggcuucgccgcggggcugaccuacucccagcucaugacgcugaaggacuucaagugcuucaaccugaucccgaacgccaagaccuggauggacaucgagggccgccccgaggaccccguggagaucgcccuguaccagcccagcuccggcugcuacguccacuucuuccgggagccgaccgaccucaagcaguucaagcaggacgccaaguacagccacgggaucgacgugaccgaccuguucgccgcgcagcccggccugacgagcgccgucaucgaggcccucccccgcaacauggugaucacgugccagggguccgaggacauccggaagcugcuggagagccagggccgccgcgacaucaagcucaucgacaucacccuguccaaggccgacagccggaaguucgagaacgccgugugggaccaguucaaggaccugugccacaugcacaccggggucgugguggagaagaagaagcgcggcggcaaggaggagaucacgccccacugcgcgcucauggacugcaucauguucgacgccgccgucuccgggggccuggacgccaaggugcugcgggugguccucccgcgcgacaugguguuccggaccagcacccccaaggugguccugugaggacuaguuauaagacugacuagcccgaugggccucccaacgggcccuccuccccuccuugcaccgagauuaauaaaaaaaaaaaaaaaaaaaaaaaaaaaaaaaaaaaaaaaaaaaaaaaaaaaaaaaaaaaaaaaaaaaaaaaaaaaaaaaaaaaaaaaaaaaaaaaaaaaa

SEQ ID NO: 19230 - RNA, 1962 nt, Artificial Sequence
  mRNA product Design i-3 (A100) comprising derived and/or modified sequence from LASV(AV;Clade V)__CCA30315__SP-HsPLAT_NP(2-569) (opt1)
aggagaaagcuuaccauggacgccaugaagcgcggccugugcugcgugcuccugcugugcggggccgucuucgugagccccagcgccuccaaggaggugaaguccuuccuguggacccagagccuccgccgggagcugagcggcuacugcuccaacaucaagcugcaggucgugaaggacgcccaggcgcuccugcacgggcuggacuucagcgagguguccaacguccagcgccucaugcggaagcagcgccgggacgacagcgaccugaagcgccugcgggaccucaaccaggccgugaacaaccugguggagcugaaguccacccagcagaaguccguccuccgcgugggcacgcugagcagcgacgaccugcucacccuggccgccgaccuggagaagcucaaguccaaggugacccggaccgagcgcccccugagcuccggggucuacaugggcaaccugagcucccagcagcucgaccagcggcgcgcccugcugaaccucaucgggaugacgaacggcagccagggcucccaggcggggcgggacggcguggugcgcgucugggacgugaagaacgccgagcugcugaacaaccaguucgggaccaugccgagccucacccuggccugccugaccaagcagggccagguggaccucaacgacgucgugcaggcccugacggaccuggggcucaucuacaccgcgaaguaccccaacaccagcgaccuggaccggcugacccagucccaccccauccucaacaugaucgacacgaagaaguccagccugaacaucagcggcuacaacuucucccugggcgccgccgugaaggccggggccugcaugcucgacggcgggaacaugcuggagaccaucaaggucagcccccaguccauggacggcauccucaagagcauccugaaggugaagcgcgcgcugggcauguucguguccgacaccccgggggagcggaaccccuacgagaacauccuguacaagaucugccucagcggcgacggguggcccuacaucgccucccgcaccagcaucgucggccgggccugggagaacacggugguggaccuggagaccgacgggaagccccagaagaucggcuccggcaacagcaacaagucccugcagagcgccggguucuccgccggccucaccuacagccagcugaugacccugaaggacgcgaugcugcagcucgacccgaacgccaagacguggauggacaucgaggggcgccccgaggaccccgucgagguggcccuguaccagcccaucuccggcugcuacauccacuucuuccgggagccgaccgaccugaagcaguucaagcaggacgccaaguacagccacgggaucgacaucgccgaccucuucgcggcccagcccggccugaccagcgccgucaucgaggcccugccccgcaacauggugaucacgugccagggcuccgaggacaucaagaagcuccuggagagccaggggcgcaaggacaucaagcugaucgacaucgcccucuccaagaucgacagccggaaguucgagaacgcggugugggaccaguacaaggaccugugccacaugcacaccggcgucgugguggagaagaagaagcgcgggggcaaggaggagaucaccccgcacugcgcccugauggacugcaucauguucgacgccgccgucuccgggggccucaacacccuggugcugcgggcggugcucccccgcgacauggucuuccggaccagcacgccccgcguggugcugugaggacuaguuauaagacugacuagcccgaugggccucccaacgggcccuccuccccuccuugcaccgagauuaauaaaaaaaaaaaaaaaaaaaaaaaaaaaaaaaaaaaaaaaaaaaaaaaaaaaaaaaaaaaaaaaaaaaaaaaaaaaaaaaaaaaaaaaaaaaaaaaaaaaa

SEQ ID NO: 19231 - RNA, 1962 nt, Artificial Sequence
  mRNA product Design i-3 (A100) comprising derived and/or modified sequence from LASV(Togo/2016/7082;Clade VI)__AMR44578__SP-HsPLAT_NP(2-569) (opt1)
aggagaaagcuuaccauggacgccaugaagcgcggccugugcugcgugcuccugcugugcggggccgucuucgugagccccagcaacuccaaggaggugaaguccuuccuguggacccagagccuccgccgggagcugagcggcuacugcuccaacaucaagcugcaggucgugaaggacgcccaggcccuccugcacgggcuggacuucagcgagguguccaacguccagcgccucaugcggaagcagaagcgcgacgacggcgaccugaagcggcugcgcgaccucaaccaggcggugaacaaccugguggagcucaagagcguccagcagaaguccauccugcggguggggacccugaccagcgacgaccugcucacccuggccgccgaccuggagaagcucaaguccaaggugacccgcaccgagcggccccugagcuccggcgucuacauggggaaccugagcucccagcagcucgaccagcgccgggcccugcugagcaugaucggcauguccggcgggaaccagaacagccagccgaagggcgacgggguggugcgcgucugggacgugaagaacgccgaccuccugaacaaccaguucggcacgaugcccucccugacccucgcgugccugaccaagcagggccagguggaccugaacgacgccguccaggcccucaccgaccuggggcugaucuacacggccaaguaccccaacagcagcgaccucgaccggcugucccagagccaccccauccugaacaugaucgacaccaagaaguccagccucaacaucuccggcuacaacuucagccugggggcggccaucaagaccggcgccugcaugcuggacgggggcaacaugcucgagaccaucaaggugacgccgcagaccauggacggcauccugaaguccauccugaaggugaagcgcagccucgggauguucaucuccgacacccccggcgagcggaaccccuacgagaacauccuguacaagaucugccugagcggggacggcuggcccuacaucgccucccgcaccgccaucaucgggcgggcgugggagaacacggucguggaccucgagagcgacuccaagccgcagaagaucggcagcaacggcuccaacaagagccugcaguccgccggguucgcccccggccugaccuacagccagcucaugacccugaaggacuccaugcugcagcuggaccccaacgccaagaccuggaucgacaucgaggggcgccccgaggacccgguggaggucgcccucuuccagcccaucagcggcugcuacauccacuucuuccgggagcccacggaccugaagcaguucaagcaggacgcgaaguacagccacgggaucgacgugaccgaccuguucgccgcccagcccggccucaccuccgccgugaucgaggcccugccgcgcaacaugguccugaccugccagggcagcgacgacaucaagaagcuccuggacucccaggggcggcgcgacaucaagcugaucgacgugagccucaacaagaucgacucccgcaaguucgagaacgcggucugggaccaguacaaggaccugugccacaugcacacgggcgugguggucgagaagaagaagaagggcgggaaggaggagaucacgccccacugcgcccugcucgacugcaucauguucgacgccgccgugagcgggggccugaacgccaccgugcugcgggcgguccucccccgcgacaugguguuccggaccuccagccccaaggugguccugugaggacuaguuauaagacugacuagcccgaugggccucccaacgggcccuccuccccuccuugcaccgagauuaauaaaaaaaaaaaaaaaaaaaaaaaaaaaaaaaaaaaaaaaaaaaaaaaaaaaaaaaaaaaaaaaaaaaaaaaaaaaaaaaaaaaaaaaaaaaaaaaaaaaa

SEQ ID NO: 19232 - RNA, 1962 nt, Artificial Sequence
  mRNA product Design i-3 (A100) comprising derived and/or modified sequence from LASV(KAK-428;Clade n.d. (VII))__ANH09741__SP-HsPLAT_NP(2-569) (opt1)
aggagaaagcuuaccauggacgccaugaagcgcggccugugcugcgugcuccugcugugcggggccgucuucgugagccccagcaacuccaaggaggugaaguccuuccuguggacccagagccuccgccgggagcugagcggcuacugcaccaacaucaagcugcaggucgugaaggacgcccaggcccuccugcacgggcuggacuucuccgaggugagcaacguccagcgccucaugcggaagcagaagcgcgacgacaacgaccugaagcggcugcgcgaccucaaccaggcggugaacaaccugguggagcugaaguccguccagcagaaguccgugcucaaggugggcacgcugaacagcgacgaccugcucacccuggccgccgaccuggagaagcucaagagcaaggucgugcggaccgagcgcccccuguccagcgggguguacaugggcaaccuguccagccagcagcucgaccagcggcgcgcccugcugaacaugaucgggauggccggcggcucccaggggaaccagccgagccgggacggcgucgugcgcgugugggacgucaagaacgcggaccuccugaacaaccaguucgggaccaugcccucccugacgcucgccugccugaccaagcagggccagguggaccugaacgacgugguccucgcccugaccgaccuggggcucaucuacaccgccaaguaccccaacagcuccgaccuggaccggcugagccagaaccaccccgugcucaacaugaucgacgugaacaagagcucccugaacaucagcggcuacaacuucucccugggcgcggccgucaaggccggggccugcaugcucgacggcgggaacaugcuggagacgaucaagaucagcccgcagaccguggacggcauccugaaguccauccucaaggugaagcgcgcccugggcauguucgucagcgacacccccggggagcggaaccccuacgagaacauccuguacaaggugugccucuccggcaacggguggcccuacaucgcgagccgcaccuccaucgucggccgggccugggagaacacggugguggaccuggagagcaacaagaaccagccgaaggucgggaacaacggcuccaacaagaugcugcagagcuccggcuucgccaccgggcucaccuacagccagcugaugacccugcgcgacuccaugcugcagcucgaccccacggccaagaccuggaucgacaucgagggccggcccgaggaccccguggagcuggcccuguuccagccgagcuccgggugcuacauccacuucuuccgcgagcccaccgaccucaagcaguucaagcaggacgcgaaguacagccacggcaucgacgugaacgaccuguucuccgcccagcccgggcugaccagcgccguccucgaggcccugccccggaacauggugcugacgugccagggcagcgacgacauccgcaagcuccuggacucccaggaccgcaaggacaucaagcugaucgacaucagccucuccaaggccgacgcgcggaaguucgagaacgacgugugggaccaguucaaggaccugugccacaugcacaccggcaucgucguggagaagaagaagaagggcgggaagcaggagaugaccccgcacugcgcccugcucgacugcaucauguucgacgccgccgugagcgggggccugaacguccccacccugcgcgccgugcuccccacggacaugguguuccggaccaucaccaccaaggucgugcugugaggacuaguuauaagacugacuagcccgaugggccucccaacgggcccuccuccccuccuugcaccgagauuaauaaaaaaaaaaaaaaaaaaaaaaaaaaaaaaaaaaaaaaaaaaaaaaaaaaaaaaaaaaaaaaaaaaaaaaaaaaaaaaaaaaaaaaaaaaaaaaaaaaaa

SEQ ID NO: 19233 - RNA, 1962 nt, Artificial Sequence; identical to SEQ ID NO: 19227
  mRNA product Design i-3 (A100) comprising derived and/or modified sequence from LASV(Pinneo-NIG-1969;Clade I)__AIT17837__SP-HsPLAT_NP(2-569) (opt1)

SEQ ID NO: 19234 - RNA, 1962 nt, Artificial Sequence
  mRNA product Design i-3 (A100) comprising derived and/or modified sequence from LASV(ISTH0009-NIG-2011;Clade II)__AIT17405__SP-HsPLAT_NP(2-569) (opt1)
aggagaaagcuuaccauggacgccaugaagcgcggccugugcugcgugcuccugcugugcggggccgucuucgugagccccagcguguccaaggaggucaagagcuuccuguggacccagucccuccgccgggagcugagcggcuacugcuccaacaucaagcuccagguggugaaggacgcccaggcccugcugcacgggcuggacuucagcgaggucuccaacgugcagcgccucaugcggaagcagaagcgcgacgacagcgaccugaagcggcugcgcgaccucaaccaggcggugaacaaccuggucgagcugaaguccacccagcagaaguccauccuccgggugggcacccugaccagcgacgaccugcucacccuggccgccgaccuggagaagcucaagagcaaggugauccgcaccgagcggccccuguccagcggggucuacaugggcaaccuguccacgcagcagcucgagcagcgccgggcccugcugaacaugaucgggauggugggcggcgcccaggggacccagccgggccgcgacggggugguccgggugugggacgugaagaaccccgaccuccugaacaaccaguucggcaccaugcccagccugacccucgcgugccugacgaagcaggggcaggucgaccugaacgacgccgugcucgcccugaccgaccugggccucaucuacaccgccaaguaccccaacuccagcgaccuggaccgccugucccagagccacccgauccucaacaugguggacaucaagaaguccagccugaacaucagcggcuacaacuucucccugggggcggccgucaaggccggcgccugcaugcucgacgggggcaacaugcuggagaccaucaaggugacgccccagaccauggacggcauccucaagagcauccugaaggugaagcggucccuggggauguucgucagcgacacccccggcgagcgcaaccccuacgagaacauccuguacaagaucugccucuccggggacggcuggccguacaucgccagccggaccuccaucguggggcgcgcgugggagaacacgaccguggaccuggagagcgacggcaagccccagaaggucggcuccgccgggagcaacaagucccugcagagcgccggcuuccccaccgggcucaccuacucccagcugaugacgcugaaggacagcaugaugcagcuggaccccuccgccaagaccuggaucgacaucgagggccggccggaggaccccguggagaucgcccucuaccagcccaugagcgggugcuacauccacuucuuccgcgagcccaccgaccugaagcaguucaagcaggacgcgaaguacucccacggcaucgacgucgccgaccuguucccggcccagcccggccucaccagcgccgugaucgaggcccugccccggaacauggugcugacgugccaggggagcgacgacaucaagcgccuccuggacucccagggccgccgggacaucaagcugaucgacaucgcgcucagcaaggccgacucccgccgguucgagaacgccgucugggaccagugcaaggaccugugccacaugcacaccggggugguggucgagaagaagaagcgcggcgggaaggaggagaucacgccccacugcgcccugauggacugcaucauguacgacgccgcggugagcggcggccucaacaucccggugcugcgggccguccugccccgcgacaugguguuccggaccuccagccccaaggugguccucugaggacuaguuauaagacugacuagcccgaugggccucccaacgggcccuccuccccuccuugcaccgagauuaauaaaaaaaaaaaaaaaaaaaaaaaaaaaaaaaaaaaaaaaaaaaaaaaaaaaaaaaaaaaaaaaaaaaaaaaaaaaaaaaaaaaaaaaaaaaaaaaaaaaa

SEQ ID NO: 19235 - RNA, 1962 nt, Artificial Sequence
  mRNA product Design i-3 (A100) comprising derived and/or modified sequence from LASV(ISTH2010-NIG-2012;Clade II)__AIT17483__SP-HsPLAT_NP(2-569) (opt1)
aggagaaagcuuaccauggacgccaugaagcgcggccugugcugcgugcuccugcugugcggggccgucuucgugagccccagcgccuccaaggaggugaaguccuuccuguggacccagagccuccgccgggagcugagcggcuacugcuccaacaucaagcugcaggucgugaaggacgcccaggcgcuccugcacgggcuggacuucagcgagguguccaacguccagcgccucaugcggaagcagaagcgcgacgacagcgaccugaagcggcugcgcgaccucaaccaggccgugaacaaccugguggagcugaaguccacccagcagaaguccauccuccgggucggcacgcugaccagcgacgaccugcucacccuggccgccgaccuggagaagcucaagagcaaggugauccgcaccgagcggccccuguccagcgggguguacaugggcaaccuguccacgcagcagcucgagcagcgccgggcccugcugaaccucaucgggauggucggcggcgcgcaggggacccagccgggccgcgacgggguggugcgggucugggacgugaagaaccccgaccugcugaacaaccaguucggcaccaugcccagccucacccuggccugccugacgaagcagggccagguggaccucaacgacgccguccuggcccugaccgaccucgggcugaucuacaccgcgaaguaccccaacuccagcgaccuggaccgccucucccagagccacccgauccugaacaugguggacaccaagaaguccagccugaacaucagcggcuucaacuucucccucggggccgccgugaaggccggcgccugcaugcuggacgggggcaacaugcuggagacgaucaaggucacgccccagaccauggacggcauccucaagagcauccugaaggugaagaagucccuggggauguucgugagcgacacccccggcgagcggaaccccuacgagaacauccucuacaagaucugccuguccggggacggcuggccguacaucgcgagccgcaccuccaucgucgggcgggccugggagaacaccaccguggaccuggagagcgacggcaagccccacaaggugggcaccgccggguccaacaagagccuccaguccgccggcuuccccacggggcugaccuacagccagcugaugacccugaaggacuccaugaugcagcucgaccccagcgccaagaccuggaucgacaucgagggccgcccggaggaccccgucgagaucgcgcuguaccagcccauguccgggugcuacauccacuucuuccgggagcccacggaccugaagcaguucaagcaggacgccaaguacagccacggcaucgacguggccgaccucuucccggcccagcccggccugaccuccgccgucaucgaggcgcugccccgcaacauggugcugaccugccaggggagcgacgacaucaagcggcuccuggacagccagggccgccgcgacaucaagcucaucgacaucgcccuguccaaggccgacagccggcgcuucgagaacgccgugugggaccagugcaaggaccugugccacaugcacaccggggucgugguggagaagaagaagcggggcgggaaggaggagaucacgccccacugcgcccucauggacugcaucauguacgacgcggccgucuccggcggccugaacaucccggugcugcgcgccgugcucccccgggacauggucuuccgcaccagcucccccaagguggugcugugaggacuaguuauaagacugacuagcccgaugggccucccaacgggcccuccuccccuccuugcaccgagauuaauaaaaaaaaaaaaaaaaaaaaaaaaaaaaaaaaaaaaaaaaaaaaaaaaaaaaaaaaaaaaaaaaaaaaaaaaaaaaaaaaaaaaaaaaaaaaaaaaaaaa

SEQ ID NO: 19236 - RNA, 1962 nt, Artificial Sequence
  mRNA product Design i-3 (A100) comprising derived and/or modified sequence from LASV(Lassa virus/H.sapiens-wt/NGA/2015/ISTH_0543;Clade II)__AVO03640__SP-HsPLAT_NP(2-569) (opt1)
aggagaaagcuuaccauggacgccaugaagcgcggccugugcugcgugcuccugcugugcggggccgucuucgugagccccagcgccuccaaggaggugaaguccuuccuguggacccagagccuccgccgggagcugagcggcuacugcuccaacaucaagcugcaggucgugaaggacgcccaggcgcuccugcacgggcuggacuucagcgagguguccaacguccagcgccucaugcggaagcagaagcgcgacgacagcgaccugaagcggcugcgcgaccucaaccaggccgugaacaaccugguggagcugaaguccacccagcagaaguccauccuccgggucggcacgcugaccagcgacgaccugcucacccuggccgccgaccuggagaagcucaagagcaaggugauccgcaccgagcggccccuguccagcgggguguacaugggcaaccuguccacgcagcagcucgagcagcgccgggcccugcugaacaugaucgggauggucggcggcgcgcaggggacccagccgggccgcgacgggguggugcgggucugggacgugaagaaccccgaccuccugaacaaccaguucggcaccaugcccagccugacccucgccugccugacgaagcagggccagguggaccugaacgacgccguccucgcccugaccgaccuggggcucaucuacaccgcgaaguaccccaacuccagcgaccuggaccgccugucccagagccacccgauccucaacaugguggacaccaagaaguccagccugaacaucagcggcuacaacuucucccugggggccgccgugaaggccggcgccugcaugcucgacgggggcaacaugcuggagacgaucaaggucacgccccagaccauggacggcauccucaagagcauccugaaggugaagaagucccuggggauguucgugagcgacacccccggcgagcggaaccccuacgagaacauccuguacaagaucugccucuccggggacggcuggccguacaucgcgagccgcaccuccaucgucgggcgggccugggagaacaccaccguggaccuggagagcgacggcaagccccagaaggugggcuccgccgggagcaacaagucccugcagagcgccggcuuccccaccgggcucacguacucccagcugaugacccugaaggacagcaugaugcagcuggaccccuccgccaagaccuggaucgacaucgagggccgcccggaggaccccgucgagaucgcgcucuaccagcccaugagcgggugcuacauccacuucuuccgggagcccaccgaccugaagcaguucaagcaggacgccaaguacucccacggcaucgacguggccgaccuguucccggcccagcccggccucacgagcgccgucaucgaggcgcugccccgcaacauggugcugaccugccaggggagcgacgacaucaagcggcuccuggacucccagggccgcaaggacaucaagcugaucgacaucgcccucagcaaggccgacucccgccgguucgagaacgccgugugggaccagugcaaggaccugugccacaugcacaccggggucgugguggagaagaagaagcgcggcgggaaggaggagaucacgccccacugcgcccugauggacugcaucauguacgacgcggccgucagcggcggccucaacaucccggugcugcgggccgugcugccccgcgacauggucuuccggaccuccagccccaagguggugcucugaggacuaguuauaagacugacuagcccgaugggccucccaacgggcccuccuccccuccuugcaccgagauuaauaaaaaaaaaaaaaaaaaaaaaaaaaaaaaaaaaaaaaaaaaaaaaaaaaaaaaaaaaaaaaaaaaaaaaaaaaaaaaaaaaaaaaaaaaaaaaaaaaaaa

SEQ ID NO: 19237 - RNA, 1962 nt, Artificial Sequence
  mRNA product Design i-3 (A100) comprising derived and/or modified sequence from LASV(Lassa virus/H.sapiens-wt/NGA/2016/ISTH_0009;Clade II)__AVO03572__SP-HsPLAT_NP(2-569) (opt1)
aggagaaagcuuaccauggacgccaugaagcgcggccugugcugcgugcuccugcugugcggggccgucuucgugagccccagcgccuccaaggaggugaaguccuuccuguggacccagagccuccgccgggagcugagcggcuacugcuccaacaucaagcugcaggucgugaaggacgcccaggcgcuccugcacgggcuggacuucagcgagguguccaacguccagcgccucaugcggaagcagaagcgcgacgacagcgaccugaagcggcugcgcgaccucaaccaggccgugaacaaccugguggagcugaaguccacccagcagaaguccauccuccgggucggcacgcugaccagcgacgaccugcucacccuggccgccgaccuggagaagcucaagagcaaggugauccgcaccgagcggccccuguccagcgggguguacaugggcaaccuguccacgcagcagcucgagcagcgccgggcccugcugaacaugaucgggauggucggcggcgcgcaggggacccagccgggccgcgacgggguggugcgggucugggacgugaagaaccccgaccuccugaacaaccaguucggcaccaugcccagccugacccucgccugccugacgaagcagggccagguggaccugaacgacgccguccucgcccugaccgaccuggggcucaucuacaccgcgaaguaccccaacuccagcgaccuggaccgccugucccagagccacccgauccucaacaugguggacaccaagaaguccagccugaacaucagcggcuacaacuucucccugggggccgccgugaaggccggcgccugcaugcucgacgggggcaacaugcuggagacgaucaaggucacgccccagaccauggacggcauccucaagagcauccugaaggugaagaagucccuggggauguucgugagcgacacccccggcgagcggaaccccuacgagaacauccuguacaagaucugccucuccggggacggcuggccguacaucgcgagccgcaccuccaucgucgggcgggccugggagaacaccaccguggaccuggagagcgacggcaagccccagaaggugggcuccgccgggagcaacaagucccugcagagcgccggcuuccccaccgggcucacguacucccagcugaugacccugaaggacagcaugaugcagcuggaccccuccgccaagaccuggaucgacaucgagggccgcccggaggaccccgucgagaucgcgcucuaccagcccaugagcgggugcuacauccacuucuuccgggagcccaccgaccugaagcaguucaagcaggacgccaaguacucccacggcaucgacguggccgaccuguucccggcccagcccggccucacgagcgccgucaucgaggcgcugccccgcaacauggugcugaccugccaggggagcgacgacaucaagcggcuccuggacucccagggccgccgcgacaucaagcugaucgacaucgcccucagcaaggccgacucccggcgcuucgagaacgccgugugggaccagugcaaggaccugugccacaugcacaccggggucgugguggagaagaagaagcggggcgggaaggaggagaucacgccccacugcgcccugauggacugcaucauguacgacgcggccgucagcggcggccucaacaucccggugcugcgcgccgugcugccccgggacauggucuuccgcaccuccagccccaagguggugcucugaggacuaguuauaagacugacuagcccgaugggccucccaacgggcccuccuccccuccuugcaccgagauuaauaaaaaaaaaaaaaaaaaaaaaaaaaaaaaaaaaaaaaaaaaaaaaaaaaaaaaaaaaaaaaaaaaaaaaaaaaaaaaaaaaaaaaaaaaaaaaaaaaaaa

SEQ ID NO: 19238 - RNA, 1962 nt, Artificial Sequence
  mRNA product Design i-3 (A100) comprising derived and/or modified sequence from LASV(Lassa virus/H.sapiens-wt/NGA/2016/ISTH_0017;Clade II)__AVO03568__SP-HsPLAT_NP(2-569) (opt1)
aggagaaagcuuaccauggacgccaugaagcgcggccugugcugcgugcuccugcugugcggggccgucuucgugagccccagcgccuccaaggaggugaaguccuuccuguggacccagagccuccgccgggagcugagcggcuacugcuccagcaucaagcugcaggucgugaaggacgcccaggcgcuccugcacgggcuggacuucuccgaggugagcaacguccagcgccucaugcggaagcagaagcgcgacgacuccgaccugaagcggcugcgcgaccucaaccaggccgugaacaaccugguggagcucaagagcacccagcagaaguccauccugcgggucggcacgcugaccagcgacgaccugcucacccuggccgccgaccuggagaagcucaaguccaaggugauccgcaccgagcggccccugagcuccgggguguacaugggcaaccugagcacgcagcagcucgagcagcgccgggcccugcugaacaugaucgggauggcgggcggcgcccaggggacccagccgggccgcgacggggucgugcgggugugggacgucaagaaccccgaccuccugaacaaccaguucggcaccaugcccucccugacccucgccugccugacgaagcagggccagguggaccugaacgacgccgugcucgcgcugaccgaccuggggcucaucuacaccgccaaguaccccaacagcuccgaccuggaccgccugagccagagccacccgauccucaacauggucgacaccaagaaguccagccugaacaucuccggcuacaacuucagccugggggccgccgugaaggccggcgcgugcaugcucgacgggggcaacaugcuggagacgaucaaggugacgccccagaccauggacggcauccugaaguccauccucaaggucaagcggagccuggggauguucguguccgacgcccccggcgagcgcaaccccuacgagaacauccuguacaagaucugccucagcggggacggcuggccguacaucgccucccggaccagcaucguggggcgcgccugggagaacaccaccgucgaccuggaguccgacggcaagccccagaaggugggcgccaccgggagcaacaagucccugcagagcgcgggcuuccccaccgggcucacguacucccagcugaugacccugaaggacagcaugaugcagcuggaccccuccgccaagaccuggaucgacaucgagggccggccggaggaccccguggaggucgcccucuaccagcccgugagcgggugcuacauccacuucuuccgcgagcccaccgaccugaagcaguucaagcaggacgccaaguacucccacggcaucgacgucgccgaccuguucccggcgcagcccggccucacgagcgccgugaucgaggcccugccccggaacauggugcugaccugccaggggagcgacgacaucaagaagcuccuggacucccagggccgcaaggacaucaagcugaucgacaucgcccucagcaaggccgacucccgccgguucgagaacgcggucugggaccagugcaaggaccugugccacaugcacaccggggugguggucgagaagaagaagcgcggcgggaaggaggagaucacgccccacugcgcccugauggacugcaucauguacgacgccgccgugagcggcggccucaacaucccggugcugcgggcgguccugccccgcgacaugguguuccggaccuccagccccaaggugguccucugaggacuaguuauaagacugacuagcccgaugggccucccaacgggcccuccuccccuccuugcaccgagauuaauaaaaaaaaaaaaaaaaaaaaaaaaaaaaaaaaaaaaaaaaaaaaaaaaaaaaaaaaaaaaaaaaaaaaaaaaaaaaaaaaaaaaaaaaaaaaaaaaaaaa

SEQ ID NO: 19239 - RNA, 1962 nt, Artificial Sequence
  mRNA product Design i-3 (A100) comprising derived and/or modified sequence from LASV(Lassa virus/H.sapiens-wt/NGA/2018/ISTH_0959;Clade II)__AVV65100__SP-HsPLAT_NP(2-569) (opt1)
aggagaaagcuuaccauggacgccaugaagcgcggccugugcugcgugcuccugcugugcggggccgucuucgugagccccagcgccuccaaggaggugaaguccuuccuguggacccagagccuccgccgggagcugagcggcuacugcuccaacaucaagcugcaggucgugaaggacgcccaggcgcuccugcacgggcuggacuucagcgagguguccaacguccagcgccucaugcggaagcagaagcgcgacgacagcgaccugaagcggcugcgcgaccucaaccaggccgugaacaaccugguggagcugaaguccacccagcagaaguccauccuccgggucggcacccugaccagcgacgaccugcucacccuggccgccgaccuggagaagcucaagagcaaggugauccgcaccgagcggccccuguccagcgggguguacaugggcaaccuguccacgcagcagcucgagcagcgccgggcccugcugaaccucaucgggauggucggcggcgcgcaggggacccagccgggccgcgacgggguggugcgggucugggacgugaagaaccccgaccugcugaacaaccaguucggcaccaugcccagccucacccuggccugccugacgaagcagggccagguggaccucaacgacgucgugcuggcccugaccgaccucgggcugaucuacaccgccaaguaccccaacuccagcgaccuggaccgccucucccagagccacccgauccugaacaugguggacaccaagaaguccagccugaacaucagcggcuucaacuucucccucggggcggccgucaaggccggcgccugcaugcuggacgggggcaacaugcuggagacgaucaaggugacgccccagaccauggacggcauccucaagagcauccugaaggugaagaagucccuggggauguucgucagcgacacccccggcgagcggaaccccuacgagaacauccucuacaagaucugccuguccggggacggcuggccguacaucgccagccgcaccuccaucguggggcgggcgugggagaacaccaccguggaccuggagagcgacggcaagccccacaaggucggcaccgccggguccaacaagagccuccaguccgccggcuuccccacggggcugaccuacagccagcugaugacccugaaggacuccaugaugcagcucgaccccagcgccaagaccuggaucgacaucgagggccgcccggaggaccccguggagaucgcccuguaccagcccauguccgggugcuacauccacuucuuccgggagcccacggaccugaagcaguucaagcaggacgcgaaguacagccacggcaucgacgucgccgaccucuucccggcccagcccggccugaccuccgccgugaucgaggcccugccccgcaacauggugcugaccugccaggggagcgacgacaucaagcggcuccuggacagccagggccgcaaggacaucaagcucaucgacaucgcgcuguccaagaccgacagccgccgguucgagaacgccgucugggaccagugcaaggaccugugccacaugcacacgggggugguggucgagaagaagaagcgcggcgggaaggaggagaucacgccccacugcgcccucauggacugcaucauguacgacgccgccguguccggcggccugaacaucccggugcugcgggcgguccucccccgcgacaugguguuccggaccagcucccccaaggugguccugugaggacuaguuauaagacugacuagcccgaugggccucccaacgggcccuccuccccuccuugcaccgagauuaauaaaaaaaaaaaaaaaaaaaaaaaaaaaaaaaaaaaaaaaaaaaaaaaaaaaaaaaaaaaaaaaaaaaaaaaaaaaaaaaaaaaaaaaaaaaaaaaaaaaa

SEQ ID NO: 19240 - RNA, 1962 nt, Artificial Sequence
  mRNA product Design i-3 (A100) comprising derived and/or modified sequence from LASV(LASV003-NIG-2008;Clade II)__AIT17581__SP-HsPLAT_NP(2-569) (opt1)
aggagaaagcuuaccauggacgccaugaagcgcggccugugcugcgugcuccugcugugcggggccgucuucgugagccccagcgccuccaaggaggugaaguccuuccuguggacccagagccuccgccgggagcugagcggcuacugcuccagcaucaagcugcaggucgugaaggacgcccaggcgcuccugcacgggcuggacuucuccgaggugagcaacguccagcgccucaugcggaagcagaagcgcgacgacuccgaccugaagcggcugcgcgaccucaaccaggccgugaacaaccugguggagcucaagagcacccagcagaaguccguccugcgggugggcacccugaccagcgacgaccugcucacccuggccgccgaccuggagaagcucaaguccaaggugauccgcaccgagcggccccugagcuccggggucuacaugggcaaccugagcgcccagcagcucgagcagcgccggacgcugcugaacaugaucgggauggugggcggcgcgcaggggacccagccgggccgcgacggggugguccgggugugggacgugaagaaccccgaccuccugaacaaccaguucggcaccaugcccucccugacccucgccugccugacgaagcaggggcaggucgaccugaacgacguggugcucgcccugaccgaccugggccucaucuacaccgccaaguaccccaacagcuccgaccuggaccgccugagccagagccacccgauccucuccauggucgacaccaagaaguccagccugaacaucagcggcuacaacuucucccugggggcggccgugaaggccggcgccugcaugcucgacgggggcaacaugcuggagacgaucaaggugacgccccagaccauggacggcauccucaagagcauccugaaggucaagaagucccuggggauguucgugagcgacacccccggcgagcggaaccccuacgagaacauccuguacaagaucugccucuccggggacggcuggccguacaucgccagccgcaccuccaucguggggcgggcgugggagaacaccaccgucgaccuggagagcgacggcaagccccagaaggugggcaccgccggguccaacaagagccugcaguccgccggcuuccccacggggcucaccuacagccagcugaugacccugaaggacuccaugaugcagcuggaccccagcgccaagaccuggaucgacaucgagggccgcccggaggaccccgucgagaucgcccucuaccagcccauguccgggugcuacauccacuucuuccgggagcccacggaccugaagcaguucaagcaggacgcgaaguacagccacggcaucgacgugaccgaccuguucccggcccagcccggccucaccagcgccgugaucgaggcccugccccgcaacaugguccugaccugccagggguccgacgacaucaagcggcuccuggacagccagggccgccgcgacaucaagcugaucgacaucgcccucuccaaggcggacagccggcgcuucgagaacgccgugugggaccagugcaaggaccugugccacaugcacacggggguggucguggagaagaagaagcggggcgggaaggaggagaucacgccccacugcgcccugauggacugcaucauguacgacgccgccguguccggcggccucaacaucccgguccugcgcgcggugcugccccgggacaugguguuccgcaccagcucccccaaggucgugcucugaggacuaguuauaagacugacuagcccgaugggccucccaacgggcccuccuccccuccuugcaccgagauuaauaaaaaaaaaaaaaaaaaaaaaaaaaaaaaaaaaaaaaaaaaaaaaaaaaaaaaaaaaaaaaaaaaaaaaaaaaaaaaaaaaaaaaaaaaaaaaaaaaaaa

SEQ ID NO: 19241 - RNA, 1962 nt, Artificial Sequence
  mRNA product Design i-3 (A100) comprising derived and/or modified sequence from LASV(LASV035-NIG-2009;Clade II)__AIT17589__SP-HsPLAT_NP(2-569) (opt1)
aggagaaagcuuaccauggacgccaugaagcgcggccugugcugcgugcuccugcugugcggggccgucuucgugagccccagcgccuccaaggaggugaaguccuuccuguggacccagagccuccgccgggagcugagcggcuacugcuccagcaucaagcugcaggucgugaaggacgcccaggcgcuccugcacgggcuggacuucuccgaggugagcaacguccagcgccucaugcggaagcagaagcgcgacgacuccgaccugaagcggcugcgcgaccucaaccaggccgugaacaaccugguggagcucaagagcacccagcagaaguccauccugcgggucggcacgcugaccagcgacgaccugcucacccuggccgccgaccuggagaagcucaaguccaaggugauccgcaccgagcggccccugagcuccgggguguacaugggcaaccugagcgcccagcagcucgagcagcgccgggcgcugcugaacaugaucgggauggucggcggcgcccaggggacgcagccgggccgcgacgggguggugcgggucugggacgugaagaaccccgaccuccugaacaaccaguucggcaccaugcccucccugacccucgccugccugaccaagcagggccagguggaccugaacgacgccguccucgcgcugacggaccuggggcucaucuacaccgccaaguaccccaacagcuccgaccuggaccgccugagccagagccacccgauccucaacaugguggacaccaagaaguccagccugaacaucuccggcuacaacuucagccugggggccgccgugaaggccggcgcgugcaugcucgacgggggcaacaugcuggagaccaucaaggucacgccccagaccauggacggcauccugaaguccauccucaaggugaagcggagccuggggauguucguguccgacacccccggcgagcgcaaccccuacgagaacauccuguacaagaucugccucagcggggacggcuggccguacaucgccucccggaccagcaucgucgggcgcgccugggagaacacgaccguggaccuggaguccgacggcaagccccagaaggugggcaccaccgggagcaacaagucccugcagagcgccggcuuccccacggggcucaccuacucccagcugaugacccugaaggacagcaugaugcagcuggaccccuccgccaagaccuggaucgacaucgagggccggccggaggaccccgucgagaucgcgcucuaccagcccaugagcgggugcuacauccacuucuuccgcgagcccacggaccugaagcaguucaagcaggacgccaaguacucccacggcaucgacguggccgaccuguucccggcccagcccggccucaccagcgccgucaucgaggcgcugccccggaacauggugcugaccugccaggggagcgacgacaucaagaagcuccuggacucccagggccgccgcgacaucaagcugaucgacaucgcccucagcaaggccgacucccggaaguucgagaacgccgugugggaccagugcaaggaccugugccacaugcacaccggggucgugguggagaagaagaagcgcggcgggaaggaggagaucacgccccacugcgcccugauggacugcaucauguacgacgcggccgucagcggcggccucaacaucccggugcugcgggccgugcugccccgcgacauggucuuccggaccuccagccccaagguggugcucugaggacuaguuauaagacugacuagcccgaugggccucccaacgggcccuccuccccuccuugcaccgagauuaauaaaaaaaaaaaaaaaaaaaaaaaaaaaaaaaaaaaaaaaaaaaaaaaaaaaaaaaaaaaaaaaaaaaaaaaaaaaaaaaaaaaaaaaaaaaaaaaaaaaa

SEQ ID NO: 19242 - RNA, 1962 nt, Artificial Sequence
  mRNA product Design i-3 (A100) comprising derived and/or modified sequence from LASV(LASV1000-NIG-2009;Clade II)__AIT17783__SP-HsPLAT_NP(2-569) (opt1)
aggagaaagcuuaccauggacgccaugaagcgcggccugugcugcgugcuccugcugugcggggccgucuucgugagccccagcgccuccaaggaggugaaguccuuccuguggacccagagccuccgccgggagcugagcggcuacugcuccaacaucaagcugcaggucgugaaggacgcccaggcgcuccugcacgggcuggacuucagcgagguguccaacguccagcgccucaugcggaagcagaagcgcgacgacagcgaccugaagcggcugcgcgaccucaaccaggccgugaacaaccugguggagcugaaguccacccagcagaaguccauccuccgggucggcacgcugaccagcgacgaccugcucacccuggccgccgaccuggagaagcucaagagcaaggugauccgcaccgagcggccccuguccagcgggguguacaugggcaaccuguccacgcagcagcucgagcagcgccgggcccugcugaacaugaucgggauggucggcggcgcgcaggggacccagccgggccgcgacgggguggugcgggucugggacgugaagaaccccgaccuccugaacaaccaguucggcaccaugcccagccugacccucgccugccugacgaagcagggccagguggaccugaacgacgucgugcucgcccugaccgaccuggggcucaucuacaccgccaaguaccccaacuccagcgaccuggaccgccugucccagagccacccgauccucaacaugguggacaccaagaaguccagccugaacaucagcggcuacaacuucucccugggggcggccgucaaggccggcgccugcaugcucgacgggggcaacaugcuggagacgaucaaggugacgccccagaccauggacggcauccucaagagcauccugaaggugaagaagucccuggggauguucgucagcgacacccccggcgagcggaaccccuacgagaacauccuguacaagaucugccucuccggggacggcuggccguacaucgccagccgcaccuccaucguggggcgggcgugggagaacaccaccguggaccuggagagcgacggcaagccccagaaggucggcaccgccggguccaacaagagccugcaguccgccggcuuccccacggggcucaccuacagccagcugaugacccugaaggacuccaugaugcagcuggaccccagcgccaagaccuggaucgacaucgagggccgcccggaggaccccguggagaucgcccucuaccagcccgucuccgggugcuacauccacuucuuccgggagcccacggaccugaagcaguucaagcaggacgcgaaguacagccacggcaucgacguggccgaccuguucccggcccagcccggccucaccuccgccgugaucgaggcccugccccgcaacaugguccugaccugccaggggagcgacgacaucaagcggcuccuggacagccagggccgccgcgacaucaagcugaucgacaucgcgcucuccaaggccgacagccggcgcuucgagaacgccgugugggaccagugcaaggaccugugccacaugcacaccgggguggucguggagaagaagaagcggggcgggaaggaggagaucacgccccacugcgcccugauggacugcaucauguacgacgccgcgguguccggcggccucaacaucccgguccugcgcgccgugcugccccgggacaugguguuccgcaccagcucccccaaggucgugcucugaggacuaguuauaagacugacuagcccgaugggccucccaacgggcccuccuccccuccuugcaccgagauuaauaaaaaaaaaaaaaaaaaaaaaaaaaaaaaaaaaaaaaaaaaaaaaaaaaaaaaaaaaaaaaaaaaaaaaaaaaaaaaaaaaaaaaaaaaaaaaaaaaaaa

SEQ ID NO: 19243 - RNA, 1962 nt, Artificial Sequence
  mRNA product Design i-3 (A100) comprising derived and/or modified sequence from LASV(LASV221-NIG-2010;Clade II)__AIT17625__SP-HsPLAT_NP(2-569) (opt1)
aggagaaagcuuaccauggacgccaugaagcgcggccugugcugcgugcuccugcugugcggggccgucuucgugagccccagcgccuccaaggaggugaaguccuuccuguggacccagagccuccgccgggagcugagcggcuacugcuccagcaucaagcugcaggucgugaaggacgcccaggcgcuccugcacgggcuggacuucuccgaggugagcaacguccagcgccucaugcggaagcagcgccgggacgacuccgaccugaagcgccugcgggaccucaaccaggccgugaacaaccugguggagcucaagagcacccagcagaaguccauccugcgcgucggcacgcugaccagcgacgaccugcucacccuggccgccgaccuggagaagcucaaguccaaggugauccggaccgagcgcccccugagcuccgggguguacaugggcaaccugagcacgcagcagcucgagcagcggcgcgcccugcugaacaugaucgggauggucggcggcgcgcaggggacccagccgggccgggacgggguggugcgcgucugggacgugaagaaccccgaccuccugaacaaccaguucggcaccaugcccucccugacccucgccugccugacgaagcagggccagguggaccugaacgacgccguccucgcccugaccgaccuggggcucaucuacaccgcgaaguaccccaacagcuccgaccuggaccggcugagccagagccacccgauccucaacaugguggacaccaagaaguccagccugaacaucuccggcuacaacuucagccugggggccgccgugaaggccggcgccugcaugcucgacgggggcaacaugcuggagacgaucaaggucacgccccagaccguggacggcauccugaaguccauccucaaggugaagcgcagccuggggauguucgucuccgacacccccggcgagcggaaccccuacgagaacauccuguacaagaucugccucagcggggacggcuggccguacaucgcgucccgcaccagcaucguggggcgggccugggagaacaccaccguggaccuggaguccgacggcaagccccagaaggucggcaccgccgggagcaacaagucccugcagagcgccggcuuccccacggggcucaccuacucccagcugaugacccugaaggacagcaugaugcagcuggaccccuccgccaagaccuggaucgacaucgagggccgcccggaggaccccguggagaucgcgcucuaccagcccaugagcgggugcuacauccacuucuuccgggagcccacggaccugaagcaguucaagcaggacgccaaguacucccacggcaucgacgucgccgaccuguucccggcccagcccggccucaccagcgccgugaucgaggcgcugccccgcaacauggugcugaccugccaggggagcgacgacaucaagcgccuccuggacucccagggccggcgcgacaucaagcugaucgacaucgcccucagcaaggccgacucccggaaguucgagaacgccgucugggaccagugcaaggaccugugccacaugcacaccggggugguggucgagaagaagaagcgcggcgggaaggaggagaucacgccccacugcgcccugauggacugcaucauguacgacgcggccgugagcggcggccucaacaucccggugcugcgggccguccugccccgcgacaugguguuccggaccuccagccccaaggugguccucugaggacuaguuauaagacugacuagcccgaugggccucccaacgggcccuccuccccuccuugcaccgagauuaauaaaaaaaaaaaaaaaaaaaaaaaaaaaaaaaaaaaaaaaaaaaaaaaaaaaaaaaaaaaaaaaaaaaaaaaaaaaaaaaaaaaaaaaaaaaaaaaaaaaa

SEQ ID NO: 19244 - RNA, 1962 nt, Artificial Sequence
  mRNA product Design i-3 (A100) comprising derived and/or modified sequence from LASV(LASV237-NIG-2010;Clade II)__AIT17639__SP-HsPLAT_NP(2-569) (opt1)
aggagaaagcuuaccauggacgccaugaagcgcggccugugcugcgugcuccugcugugcggggccgucuucgugagccccagcgccuccaaggaggugaaguccuuccuguggacccagagccuccgccgggagcugagcggcuacugcuccaacaucaagcugcaggucgugaaggacgcccaggcgcuccugcacgggcuggacuucagcgagguguccaacguccagcgccucaugcggaagcagaagcgcgacgacagcgaccugaagcggcugcgcgaccucaaccaggccgugaacaaccugguggagcugaaguccacccagcagaaguccauccuccgggucggcacccugaccagcgacgaccugcucacccuggccgccgaccuggagaagcucaagagcaaggugauccgcaccgagcggccccuguccagcgggguguacaugggcaaccuguccacgcagcagcucgagcagcgccgggcccugcugaacaugaucgggauggucggcggcgcgcaggggacccagccgggccgcgacgggguggugcgggucugggacgugaagaaccccgaccuccugaacaaccaguucggcaccaugcccagccugacccucgccugccugacgaagcagggccagguggaccugaacgacgccguccucgcccugaccgaccuggggcucaucuacaccgcgaaguaccccaacuccagcgaccuggaccgccugucccagagccacccgauccucaacaugguggacaucaagaaguccagccugaacaucagcggcuacaacuucucccugggggccgccgugaaggccggcgccugcaugcucgacgggggcaacaugcuggagaccaucaaggucacgccccagaccauggacggcauccucaagagcauccugaaggugaagcggucccuggggauguucgugagcgacacccccggcgagcgcaaccccuacgagaacauccuguacaagaucugccucuccggggacggcuggccguacaucgcgagccggaccuccaucgucgggcgcgccugggagaacacgaccguggaccuggagagcgacggcaagccccagaaggugggcuccgccgggagcaacaagucccugcagagcgccggcuuccccaccgggcucaccuacucccagcugaugacgcugaaggacagcaugaugcagcuggaccccuccgccaagaccuggaucgacaucgagggccggccggaggaccccgucgagaucgcgcucuaccagcccaugagcgggugcuacauccacuucuuccgcgagcccaccgaccugaagcaguucaagcaggacgccaaguacucccacggcaucgacguggccgaccuguucccggcccagcccggccucaccagcgccgucaucgaggcgcugccccggaacauggugcugacgugccaggggagcgacgacaucaagcgccuccuggacucccagggccgccgggacaucaagcugaucgacaucgcccucagcaaggccgacucccgccgguucgagaacgccgugugggaccagugcaaggaccugugccacaugcacaccggggucgugguggagaagaagaagcgcggcgggaaggaggagaucacgccccacugcgcccugauggacugcaucauguacgacgcggccgucagcggcggccucaacaucccggugcugcgggccgugcugccccgcgacauggucuuccggaccuccagccccaagguggugcucugaggacuaguuauaagacugacuagcccgaugggccucccaacgggcccuccuccccuccuugcaccgagauuaauaaaaaaaaaaaaaaaaaaaaaaaaaaaaaaaaaaaaaaaaaaaaaaaaaaaaaaaaaaaaaaaaaaaaaaaaaaaaaaaaaaaaaaaaaaaaaaaaaaaa

SEQ ID NO: 19245 - RNA, 1962 nt, Artificial Sequence
  mRNA product Design i-3 (A100) comprising derived and/or modified sequence from LASV(LASV253-NIG-2011;Clade II)__AIT17671__SP-HsPLAT_NP(2-569) (opt1)
aggagaaagcuuaccauggacgccaugaagcgcggccugugcugcgugcuccugcugugcggggccgucuucgugagccccagcgccuccaaggaggugaaguccuuccuguggacccagagccuccgccgggagcugagcggcuacugcuccagcaucaagcugcaggucgugaaggacgcccaggcgcuccugcacgggcuggacuucuccgaggugagcaacguccagcgccucaugcggaagcagaagcgcgacgacuccgaccugaagcggcugcgcgaccucaaccaggccgugaacaaccugguggagcucaagagcacccagcagaaguccguccugcgggugggcacccugaccagcgacgaccugcucacccuggccgccgaccuggagaagcucaaguccaaggugauccgcaccgagcggccccugagcuccggggucuacaugggcaaccugagcacgcagcagcucgagcagcgccgggcccugcugaacaugaucgggauggugggcggcgcgcaggggacccagccgggccgcgacggggugguccgggugugggacgugaagaaccccgaccuccugaacaaccaguucggcaccaugcccucccugacccucgccugccugacgaagcaggggcaggucgaccugaacgacguggugcucgcccugaccgaccugggccucaucuacaccgccaaguaccccaacagcuccgaccuggaccgccugagccagagccacccgauccucaacauggucgacaccaagaaguccagccugaacaucuccggcuacaacuucagccugggggcggccgugaaggccggcgccugcaugcucgacgggggcaacaugcuggagacgaucaaggugacgccccagaccauggacggcauccugaaguccauccucaaggucaagaagucccuggggauguucgugagcgacacccccggcgagcggaaccccuacgagaacauccuguacaagaucugccucagcggggacggcuggccguacaucgccucccgcaccagcaucguggggcgggcgugggagaacaccaccgucgaccuggaguccgacggcaagccccagaaggugggcaccgccgggagcaacaagucccugcagagcgccggcuuccccacggggcucaccuacucccagcugaugacccugaaggacagcaugaugcagcuggaccccuccgccaagaccuggaucgacaucgagggccgcccggaggaccccgucgagaucgcccucuaccagcccaugagcgggugcuacauccacuucuuccgggagcccacggaccugaagcaguucaagcaggacgcgaaguacucccacggcaucgacgugaccgaccuguucccggcccagcccggccucaccagcgccgugaucgaggcccugccccgcaacaugguccugaccugccaggggagcgacgacaucaagcggcuccuggacucccagggccgccgcgacaucaagcugaucgacaucgcccucagcaaggcggacucccggcgcuucgagaacgccgugugggaccagugcaaggaccugugccacaugcacacggggguggucguggagaagaagaagcggggcgggaaggaggagaucacgccccacugcgcccugauggacugcaucauguacgacgccgccgugagcggcggccucaacaucccgguccugcgcgcggugcugccccgggacaugguguuccgcaccuccagccccaaggucgugcucugaggacuaguuauaagacugacuagcccgaugggccucccaacgggcccuccuccccuccuugcaccgagauuaauaaaaaaaaaaaaaaaaaaaaaaaaaaaaaaaaaaaaaaaaaaaaaaaaaaaaaaaaaaaaaaaaaaaaaaaaaaaaaaaaaaaaaaaaaaaaaaaaaaaa

SEQ ID NO: 19246 - RNA, 1962 nt, Artificial Sequence
  mRNA product Design i-3 (A100) comprising derived and/or modified sequence from LASV(LASV254-NIG-2011;Clade II)__AIT17675__SP-HsPLAT_NP(2-569) (opt1)
aggagaaagcuuaccauggacgccaugaagcgcggccugugcugcgugcuccugcugugcggggccgucuucgugagccccagcgccuccaaggaggugaaguccuuccuguggacccagagccuccgccgggagcugagcggcuacugcuccagcaucaagcugcaggucgugaaggacgcccaggcgcuccugcacgggcuggacuucuccgaggugagcaacguccagcgccucaugcggaagcagaagcgcgacgacuccgaccugaagcggcugcgcgaccucaaccaggccgugaacaaccugguggagcucaagagcacccagcagaaguccguccugcgggugggcacgcugaccagcgacgaccugcucacccuggccgccgaccuggagaagcucaaguccaaggugauccgcaccgagcggccccugagcuccggggucuacaugggcaaccugagcacgcagcagcucgagcagcgccgggcccugcugaacaugaucgggauggugggcggcgcgcaggggacccagccgggccgcgacggggugguccgggugugggacgugaagaaccccgaccuccugaacaaccaguucggcaccaugcccucccugacccucgccugccugacgaagcaggggcaggucgaccugaacgacgccgugcucgcccugaccgaccugggccucaucuacaccgcgaaguaccccaacagcuccgaccuggaccgccugagccagagccacccgauccucaacaugguggacaccaagaaguccagccugaacaucuccggcuacaacuucagccugggggccgccgucaaggccggcgccugcaugcucgacgggggcaacaugcuggagacgaucaaggugacgccccagaccauggacggcauccugaaguccauccucaaggugaagaagucccuggggauguucgucagcgacacccccggcgagcggaaccccuacgagaacauccuguacaagaucugccucagcggggacggcuggccguacaucgcgucccgcaccagcaucguggggcgggccugggagaacaccaucguggaccuggaguccgacggcaagccccagaaggucggcaccgccgggagcaacaagucccugcagagcgccggcuuccccaccgggcucacguacucccagcugaugacccugaaggacagcaugaugcagcuggaccccuccgccaagaccuggaucgacaucgagggccgcccggaggaccccguggagaucgcgcucuaccagcccaugagcgggugcuacauccacuucuuccgggagcccaccgaccugaagcaguucaagcaggacgccaaguacucccacggcaucgacgucgccgaccuguucccggcccagcccggccucacgagcgccgugaucgaggcgcugccccgcaacauggugcugaccugccaggggagcgacgacaucaagcggcuccuggacucccagggccgccgcgacaucaagcugaucgacaucgcccucagcaaggccgacucccggcgcuucgagaacgccgucugggaccagugcaaggaccugugccacaugcacaccggggugguggucgagaagaagaagcggggcgggaaggaggagaucacgccccacugcgcccugauggacugcaucauguacgacgcggccgugagcggcggccucaacaucccggugcugcgcgccguccugccccgggacaugguguuccgcaccuccagccccaaggugguccucugaggacuaguuauaagacugacuagcccgaugggccucccaacgggcccuccuccccuccuugcaccgagauuaauaaaaaaaaaaaaaaaaaaaaaaaaaaaaaaaaaaaaaaaaaaaaaaaaaaaaaaaaaaaaaaaaaaaaaaaaaaaaaaaaaaaaaaaaaaaaaaaaaaaa

SEQ ID NO: 19247 - RNA, 1962 nt, Artificial Sequence
  mRNA product Design i-3 (A100) comprising derived and/or modified sequence from LASV(Nig08-04;Clade II)__ADU56611__SP-HsPLAT_NP(2-569) (opt1)
aggagaaagcuuaccauggacgccaugaagcgcggccugugcugcgugcuccugcugugcggggccgucuucgugagccccagcgccuccaaggaggugaaguccuuccuguggacccagagccuccgccgggagcugagcggcuacugcuccaacaucaagcugcaggucgugaaggacgcccaggcgcuccugcacgggcuggacuucagcgagguguccaacguccagcgccucaugcggaagcagaagcgcgacgacggcgaccugaagcggcugcgcgaccucaaccaggccgugaacaaccugguggagcucaagagcacccagcagaaguccguccugcggguggggacccugaccagcgacgaccugcucacccuggccgccgaccuggagaagcucaaguccaaggugauccgcaccgagcggccccugagcuccggcgucuacauggggaaccugagcacgcagcagcucgagcagcgcaaggcccugcuguccaugaucggcauggugggcggggcgcagggcacccagccggggcgggacggcgugguccgcgugugggacgugaagaaccccgaccuccugaacaaccaguucgggaccaugcccagccugacccucgccugccugacgaagcagggccaggucgaccugaacgacgccgugcucgcccugaccgaccugggccucaucuacaccgcgaaguaccccaacuccagcgaccuggaccggcugucccagagccacccgauccucaacaugguggacaccaagaaguccagccugaacaucagcggguacaacuucucccugggcgccgccgucaaggccggggccugcaugcucgacggcggcaacaugcuggagacgaucaaggugacgccccagaccauggacgggauccucaagagcauccugaaggugaagcgcucccugggcauguucgucagcgacacccccggggagcggaaccccuacgagaacauccuguacaagaucugccucuccggcgacggguggccguacaucgcgagccgcaccuccaucgugggccgggccugggagaacaccaccguggaccuggagagcgacggcaagccccagaaggucgggaccgccggcuccaacaagagccugcaguccgccggguuccccacgggccucaccuacagccagcugaugacccugaaggacuccaugaugcagcuggaccccagcgccaagaccuggaucgacaucgaggggcgcccggaggaccccguggagaucgcgcucuaccagcccauguccggcugcuacauccacuucuuccgggagcccacggaccugaagcaguucaagcaggacgccaaguacagccacggcaucgacgucaccgaccuguucuccgcccagccggggcucaccagcgccgugaucgaggcccugccccgcaacauggugcugaccugccagggcagcgacgacaucaagaagcuccuggacucccaggggcggcgcgacaucaagcugaucgacaucagccucaacaaggcggacucccgccgguucgagaacgccgucugggaccagugcaaggaccugugccacaugcacacgggcgugguggucgagaagaagaagcgcgggggcaaggaggagaucacgccccacugcgcccugauggacugcaucauguucgacgccgccgugagcggcgggcucaacauccccauccugcgggcggugcugccgcgcgacauggucuuccggaccuccagccccaagguggugcucugaggacuaguuauaagacugacuagcccgaugggccucccaacgggcccuccuccccuccuugcaccgagauuaauaaaaaaaaaaaaaaaaaaaaaaaaaaaaaaaaaaaaaaaaaaaaaaaaaaaaaaaaaaaaaaaaaaaaaaaaaaaaaaaaaaaaaaaaaaaaaaaaaaaa

SEQ ID NO: 19248 - RNA, 1965 nt, Artificial Sequence
  mRNA product Design i-3 (A100) comprising derived and/or modified sequence from LASV(GA391;Clade III)__AAA46284__SP-HsPLAT_NP(2-570) (opt1)
aggagaaagcuuaccauggacgccaugaagcgcggccugugcugcgugcuccugcugugcggggccgucuucgugagccccagcgccuccaaggaggugcgcagcugccuguggacccagucccuccggcgcgagcugagcggcuacugcuccaacaucaagcugcaggucgugaaggacgcccaggcgcuccugcacgggcuggacuucagcgagguguccaacguccagcggcucaugcgcaagcagaagcgggacgacggcgaccugaagcgccugcgggaccucaaccaggccgugaacaaccugguggagcugaaguccacccagcagaaguccguccuccgcguggggacgcugagcuccgacgaccugcucauccuggccgccgaccuggagaagcucaagagcaaggugacccggaccgagcgcccccuguccagcggcgucuacauggggaaccuguccagccagcagcucgaccagcggcgcgcccugcugaacaugaucggcaugaccggcguguccgggggcgggaagggcgcgagcaacgggaucgugcgggucugggacgugaagaacgccgagcuccugaacaaccaguucggcacgaugccgucccugacccucgccugccugaccaagcagggccagguggaccugaacgacgccguccaggcgcucaccgaccuggggcugaucuacacggccaaguaccccaacagcagcgaccucgaccgccugucccagagccaccccauccugaacaugaucgacaccaagaaguccagccucaacaucuccggcuacaacuucagccugggggccgccgugaaggccggcgcgugcaugcuggacggcgggaacaugcucgagaccaucaaggugagcccccagaccauggacggcauccucaagagcauccugaaggucaagaagucccuggggauguucgugagcgacacgccgggcgagcggaaccccuacgagaacauccuguacaagaucugccuguccggggacggcuggagcuacaucgccucccgcaccagcaucgugggccgggccugggagaacaccgucguggaccucgagcaggacaacaagccccagaagaucgggaacggcggguccaacaagagccugcaguccgccggcuucgccgcggggcugaucuacagccagcucaugacccugaaggacuucaagugcuucaaccugauccccaacgccaagacguggauggacaucgagggccgcccggaggaccccguggagaucgcccuguaccagcccuccagcggcugcuacguccacuucuuccgggagcccaccgaccucaagcaguucaagcaggacgccaaguacagccacgggcgcgacgugaccgaccuguucgccgcgcagccgggccugaccuccgccgucaucgaggcccucccccggaacauggugaucacgugccaggggagcgaggacauccgcaagcugcuggagucccagggccgccgggacaucaagcucaucgacaucacccugagcaaggccgacucccgcaaguucgagaacgccgugugggaccaguucaaggaccugugccacaugcacaccggggucgugguggagaagaagaagcggggcggcaaggaggagaucacgccccacugcgcgcucauggacugcaucauguucgacgccgccgucagcgggggccuggacgccaaggugcugcgcgugguccucccccgggacaugguguuccgcaccuccaccccgaaggugguccugugaggacuaguuauaagacugacuagcccgaugggccucccaacgggcccuccuccccuccuugcaccgagauuaauaaaaaaaaaaaaaaaaaaaaaaaaaaaaaaaaaaaaaaaaaaaaaaaaaaaaaaaaaaaaaaaaaaaaaaaaaaaaaaaaaaaaaaaaaaaaaaaaaaaa

SEQ ID NO: 19249 - RNA, 1962 nt, Artificial Sequence
  mRNA product Design i-3 (A100) comprising derived and/or modified sequence from LASV(Nig08-A19;Clade III)__ADU56619__SP-HsPLAT_NP(2-569) (opt1)
aggagaaagcuuaccauggacgccaugaagcgcggccugugcugcgugcuccugcugugcggggccgucuucgugagccccagcgccuccaaggaggugaaguccuuccuguggacccagucccuccgccgggagcugagcggcuacugcuccaacaucaagcugcaggucgugaaggacgcccaggcgcuccugcacgggcuggacuucagcgagguguccaacguccagcgccucaugcggaagcagaagcgcgacgacggcgaccugaagcggcugcgcgaccucaaccaggccgugaacaaccugguggagcucaagagcacccagcagaaguccguccugcggguggggacccugagcuccgacgaccugcucgugcuggccgccgaccuggagaagcucaagagcaaggucgugcgcaccgagcggccccuguccagcggcaucuacauggggaaccuguccagccagcagcucgaccagcgcaaggcccugcugaacaugaucggcaugaccggcgggaacggcgggcggaacaccacguccgacggcaucgugcgcgucugggacgugaagaacgcggagcuccugaacaaccaguucgggaccaugccgagccugacccucgccugccugaccaagcagggccagguggaccugaacgacgccguccaggcccucacggaccugggccugaucuacaccgcgaaguaccccaacuccagcgaccucgaccggcuggcccagagccaccccauccugaacaugaucgacaccaagaaguccagccucaacaucuccggguacaacuucagccugggcgccgccgugaaggccggggcgugcaugcuggacggcggcaacaugcucgagaccaucaaggugagcccccagacgauggacgggauccucaagagcauccugaaggucaagcgcucccugggcauguucaucagcgacaccccgggggagcggaaccccuacgagaacauccuguacaagaucugccuguccggcgacggguggcccuacaucgccagccgcaccuccaucgugggccgggccugggagaacaccguggucgaccucgagagcgacaacaagccccagaagacgggcaacgggggcuccaacaagagccugcaguccgccggguucgccgcgggccugaccuacagccagcucaugacccugaaggacuccaugcugcagcuggacccgaacgccaagaccuggauggacaucgaggggcgccccgaggaccccguggagaucgcccucuaccagcccagcuccggcugcuacauccacuucuuccgggagccgacggaccugaagcaguucaagcaggacgccaaguacagccacggcaucgacgugaccgaccuguucgccgcgcagcccgggcucaccagcgccgucaucgaggcccugccccgcaacauggugaucacgugccagggcuccgaggacauccggaagcugcucgagagccaggggcgccgcgacaucaagcugaucgacaucucccugagcaaggucgacucccggaaguucgagaacgccgugugggaccaguucaaggaccucugccacaugcacaccggcaucguggucgagaagaagaagcgcgggggcaaggaggagaucacgccccacugcgcccugauggacugcaucauguucgacgcggccgugagcggcgggguggacgccaagguccugcgggccgugcucccgcgcgacaugguguuccggaccuccacccccaaggucgugcugugaggacuaguuauaagacugacuagcccgaugggccucccaacgggcccuccuccccuccuugcaccgagauuaauaaaaaaaaaaaaaaaaaaaaaaaaaaaaaaaaaaaaaaaaaaaaaaaaaaaaaaaaaaaaaaaaaaaaaaaaaaaaaaaaaaaaaaaaaaaaaaaaaaaa

SEQ ID NO: 19250 - RNA, 1962 nt, Artificial Sequence
  mRNA product Design i-3 (A100) comprising derived and/or modified sequence from LASV(G1180-SLE-2010;Clade IV)__AIT17169__SP-HsPLAT_NP(2-569) (opt1)
aggagaaagcuuaccauggacgccaugaagcgcggccugugcugcgugcuccugcugugcggggccgucuucgugagccccagcgccuccaaggagaucaagagcuuccuguggacccagucccuccgccgggagcugagcggcuacugcuccaacaucaagcuccagguggucaaggacgcccaggcgcugcugcacgggcuggacuucagcgagguguccaacgugcagcgccucaugcggaaggagcgccgggacgacaacgaccugaagcgccugcgggaccucaaccaggccgucaacaaccugguggagcucaagagcacccagcagaaguccauccugcgcgugggcacccugaccagcgacgaccugcucauccuggccgccgaccuggagaagcucaaguccaaggucauccggaccgagcgcccccugagcgccgggguguacaugggcaaccuguccagccagcagcucgaccagcggcgcgcgcugcuguccaugaucgggaugagcuccggcaaccagcgggcccaggccggccgcgacggggugguccgggugugggacgugaagaacgucgagcuccugaacaaccaguucggcaccaugccgagccugacgcucgccugccugaccaagcagggccagguggaccugaacgacgcggugcaggcccucaccgaccuggggcugaucuacaccgccaaguaccccaacacguccgaccucgaccgccugacccagagccaccccauccugaacaugaucgacaccaagaaguccagccucaacaucagcggguacaacuucucccugggcgccgccgucaaggcgggcgccugcaugcuggacgggggcaacaugcucgagaccaucaaggugagcccccagacgauggacgggauccugaaguccauccugaaggugaagaaggcccucggcauguucaucagcgacaccccgggcgagcggaaccccuacgagaacauccuguacaagaucugccuguccggggacggcuggcccuacaucgccagccgcaccuccaucaccgggcgggccugggagaacacggucguggaccucgagagcgacggcaagccccagaaggcgggguccaacaacagcaacaagucccugcagagcgugggcuucaccgccggccugaccuacucccagcucaugacccugaaggacgccaugcugcagcuggacccgaacgccaagacguggauggacaucgaggggcgccccgaggaccccgucgagaucgcccucuaccagcccagcuccggcugcuacauccacuucuuccgggagccgaccgaccugaagcaguucaagcaggacgcgaaguacagccacgggaucgacgugaccgaccuguucgccgcccagcccggccucaccuccgccgugaucgacgcccugccccgcaacauggucaucacgugccaggggagcgacgacauccgcaagcugcucgagagccagggccggaaggacaucaagcugaucgacaucgcgcuguccaagaccgacagccgcaaguacgagaacgccgugugggaccaguacaaggaccucugccacaugcacaccggcgucgugguggagaagaagaagcgcgggggcaaggaggagaucacgccccacugcgcccugauggacugcaucauguucgacgccgcggucuccgggggccugaacaccagcgugcuccgggccgugcugccgcgggacauggucuuccgcaccuccacgccccggguggugcugugaggacuaguuauaagacugacuagcccgaugggccucccaacgggcccuccuccccuccuugcaccgagauuaauaaaaaaaaaaaaaaaaaaaaaaaaaaaaaaaaaaaaaaaaaaaaaaaaaaaaaaaaaaaaaaaaaaaaaaaaaaaaaaaaaaaaaaaaaaaaaaaaaaaa

SEQ ID NO: 19251 - RNA, 1962 nt, Artificial Sequence
  mRNA product Design i-3 (A100) comprising derived and/or modified sequence from LASV(G1442-SLE-2011;Clade IV)__AIT17181__SP-HsPLAT_NP(2-569) (opt1)
aggagaaagcuuaccauggacgccaugaagcgcggccugugcugcgugcuccugcugugcggggccgucuucgugagccccagcgccuccaaggaggugaaguccuuccuguggacccagagccuccgccgggagcugagcggcuacugcuccaacaucaagcugcaggucgugaaggacgcccaggcgcuccugcacgggcuggacuucagcgagguguccaacguccagcgccucaugcggaagcagcgccgggacgacaacgaccugaagcgccugcgggaccucaaccaggccgugaacaaccugguggagcucaagagcacccagcagaaguccguccugcgcgugggcacccugaccagcgacgaccugcucgugcuggccgccgaccuggagaagcucaaguccaaggucauccggaccgagcgcccccugagcgccgggguguacaugggcaaccuguccagccagcagcucgaccagcggcgcgcgcugcugaacaugaucgggauguccggcggcauccaggggacccggacgggccgcgacggggugguccgggugugggacgugaagaacgccgaccuccugaacaaccaguucggcaccaugccgagccugacccucgccugccugaccaagcaggggcaggucgaccugaacgacguggugcaggcccucacggaccugggccugaucuacaccgcgaaguaccccaacgccuccgaccucgaccgccugacccagagccaccccauccugaacaugaucgacaccaagaaguccagccucaacaucagcggcuacaacuucucccugggggccgccgucaaggccggcgcgugcaugcuggacgggggcaacaugcucgagacgaucaaggugagcccccagaccauggacggcauccugaaguccauccugaaggugaagaagacccucgggauguucaucagcgacaccccgggcgagcggaaccccuacgagaacauccuguacaagaucugccuguccggggacggcuggcccuacaucgccagccgcacguccaucaccgggcgggccugggagaacaccgucguggaccucgagagcgacggcaagccccagaaggccggcuccaacaacagcaacaagucccugcagagcgccggguucgcggccggccugaccuacucccagcucaugacgcugaaggacgccaugcugcagcuggacccgaacgccaagaccuggauggacaucgaggggcgccccgaggaccccguggagaucgcccucuaccagcccagcuccggcugcuacauccacuucuuccgggagccgaccgaccugaagcaguucaagcaggacgcgaaguacagccacgggaucgacgucaccgaccuguucgccgcccagcccggccucacguccgccgugaucgaggcccugccccgcaacauggucaucacgugccagggcagcgacgacaucaagaagcugcucgagucccaggggcgcaaggacaucaagcugaucgacaucgcgcugagcaagaccgacagccggaaguacgagaacgccgugugggaccaguacaaggaccucugccacaugcacaccggcguggucguggagaagaagaagcgcgggggcaaggaggagaucaccccgcacugcgcccugauggacugcaucauguucgacgccgcgguguccgggggccugaacacccucguccugcgggccgugcugccccgcgacaugguguuccggaccagcacgccccgcgucgugcucugaggacuaguuauaagacugacuagcccgaugggccucccaacgggcccuccuccccuccuugcaccgagauuaauaaaaaaaaaaaaaaaaaaaaaaaaaaaaaaaaaaaaaaaaaaaaaaaaaaaaaaaaaaaaaaaaaaaaaaaaaaaaaaaaaaaaaaaaaaaaaaaaaaaa

SEQ ID NO: 19252 - RNA, 1962 nt, Artificial Sequence
  mRNA product Design i-3 (A100) comprising derived and/or modified sequence from LASV(G3010-SLE-2013;Clade IV)__AIT17345__SP-HsPLAT_NP(2-569) (opt1)
aggagaaagcuuaccauggacgccaugaagcgcggccugugcugcgugcuccugcugugcggggccgucuucgugagccccagcgccuccaaggagaucaagagcuuccuguggacccagucccuccgccgggagcugagcggcuacugcuccaacaucaagcuccagguggucaaggacgcccaggcgcugcugcacgggcuggacuucagcgagguguccaacgugcagcgccucaugcggaaggagcgccgggacgacaacgaccugaagcgccugcgggaccucaaccaggccgucaacaaccugguggagcucaagagcacccagcagaaguccauccugcgcgugggcacccugaccagcgacgaccugcucauccuggccgccgaccuggagaagcucaaguccaaggucacccggaccgagcgcccccugagcgccgggguguacaugggcaaccuguccagccagcagcucgaccagcggcgcgcgcugcuguccaugaucgggaugagcuccggcgugcagggcgcccgggccgggcgcgacggcgucgugcgggugugggacgucaagaacgccgagcuccugaacaaccaguucgggacgaugccgagccugacccucgcgugccugaccaagcagggccagguggaccugaacgacgugguccaggcccucaccgaccuggggcugaucuacacggccaaguaccccaacaccuccgaccucgaccgccugacccagagccaccccauccugaacaugaucgacaccaagaaguccagccucaacaucagcggcuacaacuucucccugggcgccgccgugaaggcgggggccugcaugcuggacggcgggaacaugcucgagacgaucaaggugagcccccagaccauggacggcauccugaaguccauccugaaggucaagaaggcccucggcauguucaucagcgagaccccgggggagcggaaccccuacgagaacauccuguacaagaucugccuguccggcgacggguggcccuacaucgccagccgcaccuccaucacgggccgggccugggagaacaccgugguggaccucgagagcgacgggaagccccagaaggcgggcuccaacaacagcaacaagucccugcagagcgccggcuucaccgccgggcugaccuacucccagcucaugacgcugaaggacgccaugcugcagcuggacccgaacgccaagaccuggauggacaucgagggccgccccgaggaccccgucgagguggcgcucuaccagcccagcuccgggugcuacauccacuucuuccgggagccgaccgaccugaagcaguucaagcaggacgccaaguacagccacggcaucgacgugaccgaccuguucgccgcccagcccgggcucacguccgccgucaucgacgcgcugccccgcaacauggugaucacgugccagggcagcgacgacaucaagaagcugcucgagagccagggccgcaaggacaucaagcugaucgacaucgcccuguccaagaccgacagccggaaguacgagaacgccgucugggaccaguacaaggaccucugccacaugcacaccggggugguggucgagaagaagaagcgcggcgggaaggaggagaucaccccgcacugcgcccugauggacugcaucauguucgacgcggccguguccggcgggcugaacaccagcgugcuccgggccguccugccccgcgacaugguguuccggaccuccacgccccgcgugguccugugaggacuaguuauaagacugacuagcccgaugggccucccaacgggcccuccuccccuccuugcaccgagauuaauaaaaaaaaaaaaaaaaaaaaaaaaaaaaaaaaaaaaaaaaaaaaaaaaaaaaaaaaaaaaaaaaaaaaaaaaaaaaaaaaaaaaaaaaaaaaaaaaaaaa

SEQ ID NO: 19253 - RNA, 1962 nt, Artificial Sequence
  mRNA product Design i-3 (A100) comprising derived and/or modified sequence from LASV(G502-SLE-2009;Clade IV)__AIT17127__SP-HsPLAT_NP(2-569) (opt1)
aggagaaagcuuaccauggacgccaugaagcgcggccugugcugcgugcuccugcugugcggggccgucuucgugagccccagcgccuccaaggagaucaagagcuuccuguggacccagucccuccgccgggagcugagcggcuacugcuccaacaucaagcuccagguggucaaggacgcccaggcgcugcugcacgggcuggacuucagcgagguguccaacgugcagcgccucaugcggaaggagcgccgggacgacaacgaccugaagcgccugcgggaccucaaccaggccgucaacaaccugguggagcucaagagcacccagcagaaguccauccugcgcgugggcacccugaccagcgacgaccugcucauccuggccgccgaccuggagaagcucaaguccaaggucauccggaccgagcgcccccugagcgccgggguguacaugggcaaccuguccagccagcagcucgaccagcggcgcgcgcugcuguccaugaucgggaugagcggcggcaaccagggggugcgggccggcaaggacggggucgugcgcgugugggacgucaagaacgccgagcuccugaacaaccaguucggcaccaugccgucccugacgcucgccugccugaccaagcagggccagguggaccugaacgacgcggugcaggcccucaccgaccuggggcugaucuacaccgccaaguaccccaacacgagcgaccucgaccggcugacccagucccaccccauccugaacaugaucgacaccaagaaguccagccucaacaucuccggcuacaacuucagccugggggccgccgucaaggcgggcgccugcaugcuggacgggggcaacaugcucgagaccaucaaggugagcccccagacgauggacggcauccucaagagcauccugaaggugaagaaggcccuggggauguucaucuccgacaccccgggcgagcgcaaccccuacgagaacauccuguacaagaucugccugagcggggacggcuggcccuacaucgccucccggaccagcaucaccgggcgcgccugggagaacacggucguggaccucgaguccgacggcaagccccagaaggcgggcagcaacaacuccaacaagagccugcaguccgccggguucaccgccggccugaccuacagccagcucaugacccugaaggacgccaugcugcagcuggacccgaacacgaagaccuggauggacaucgaggggcggcccgaggaccccguggagaucgcccucuaccagcccuccagcggcugcuacauccacuucuuccgcgagccgaccgaccugaagcaguucaagcaggacgcgaaguacucccacgggaucgacgucaccgaccuguucgccgcccagcccggccucacgagcgccgugaucgacgcccugccccggaacauggugaucacgugccagggcuccgacgacauccgcaagcugcucgagagccaggggcgcaaggacaucaagcugaucgacaucgcgcugaacaagaccgacagccggaaguacgagaacgccgucugggaccaguacaaggaccucugccacaugcacaccggcguggucguggagaagaagaagcgcgggggcaaggaggagaucaccccgcacugcgcccugauggacugcaucauguucgacgccgcgguguccgggggccugaacaccagcguccuccgggccgugcugccccgcgacaugguguuccggaccuccacgccccgcgucgugcugugaggacuaguuauaagacugacuagcccgaugggccucccaacgggcccuccuccccuccuugcaccgagauuaauaaaaaaaaaaaaaaaaaaaaaaaaaaaaaaaaaaaaaaaaaaaaaaaaaaaaaaaaaaaaaaaaaaaaaaaaaaaaaaaaaaaaaaaaaaaaaaaaaaaa

SEQ ID NO: 19254 - RNA, 1962 nt, Artificial Sequence
  mRNA product Design i-3 (A100) comprising derived and/or modified sequence from LASV(G733-SLE-2010;Clade IV)__AIT17155__SP-HsPLAT_NP(2-569) (opt1)
aggagaaagcuuaccauggacgccaugaagcgcggccugugcugcgugcuccugcugugcggggccgucuucgugagccccagcgccuccaaggagaucaagagcuuccuguggacccagucccuccgccgggagcugagcggcuacugcuccaacaucaagcuccagguggucaaggacgcccaggcgcugcugcacgggcuggacuucagcgagguguccaacgugcagcgccucaugcggaaggagcgccgggacgacaacgaccugaagcgccugcgggaccucaaccaggccgucaacaaccugguggagcucaagagcacccagcagaaguccgugcugcgcgucggcacccugaccagcgacgagcugcucgugcuggccgccgaccuggagaagcucaaguccaaggugauccggaccgagcgcccccugagcgccggggucuacaugggcaaccuguccagccagcagcucgaccagcggcgcgcgcugcuguccaugaucgggaugagcggcggcaaccagggggcccggaccggccgcgacgggguggugcgggucugggacgugaagaacgccgagcuccugaacaaccaguucggcaccaugccgucccugacccucgccugccugaccaagcagggccagguggaccugaacgacgcgguccaggcccucaccgaccuggggcugaucuacacggccaaguaccccaacaccagcgaccucgaccgccugacccagucccaccccauccugaacaugaucgacaccaagaaguccagccucaacaucuccggcuacaacuucagccugggggccgccgugaaggcgggcgccugcaugcuggacgggggcaacaugcucgagacgaucaaggugagcccccagaccauggacggcauccucaagagcauccugaaggucaagaaggcccuggggauguucaucuccgacaccccgggcgagcggaaccccuacgagaacauccuguacaagaucugccugagcggggacggcuggcccuacaucgccucccgcaccagcaucacggggcgggccugggagaacaccgugguggaccucgaguccgacggcaagccccagaaggcgggcagcaacaacuccaacaagagccugcaguccgccggguucaccgccggccugaccuacagccagcucaugacgcugaaggacgccaugcugcagcuggacccgaacgccaagaccuggauggacaucgaggggcgccccgaggaccccgucgagaucgcgcucuaccagcccuccagcggcugcuacauccacuucuuccgggagccgaccgaccugaagcaguucaagcaggacgccaaguacucccacgggaucgacgugaccgaccuguucgccgcccagcccggccucacgagcgccgugaucgacgcgcugccccgcaacauggucaucacgugccagggcuccgacgacauccgcaagcugcucgagagccaggggcggaaggacaucaagcugaucgacaucgcccugagcaagaucgacucccgcaaguacgagaacgccgugugggaccaguacaaggaccucugccacaugcacaccggcgucgugguggagaagaagaagcgcgggggcaaggaggagaucacgccccacugcgcccugauggacugcaucauguucgacgcggccgucagcgggggccugaacucccucgugcugcgggccgugcugccgcgggacauggucuuccgcaccagcacgccccggguggugcucugaggacuaguuauaagacugacuagcccgaugggccucccaacgggcccuccuccccuccuugcaccgagauuaauaaaaaaaaaaaaaaaaaaaaaaaaaaaaaaaaaaaaaaaaaaaaaaaaaaaaaaaaaaaaaaaaaaaaaaaaaaaaaaaaaaaaaaaaaaaaaaaaaaaa

SEQ ID NO: 19255 - RNA, 1962 nt, Artificial Sequence
  mRNA product Design i-3 (A100) comprising derived and/or modified sequence from MOPV/LASV reassortant(IGS-1;Clade IV)__AFY05578__SP-HsPLAT_NP(2-569) (opt1)
aggagaaagcuuaccauggacgccaugaagcgcggccugugcugcgugcuccugcugugcggggccgucuucgugagccccagcgccuccaaggagaucaagagcuuccuguggacccagucccuccgccgggagcugagcggcuacugcuccaacaucaagcuccagguggucaaggacgcccaggcgcugcugcacgggcuggacuucagcgagguguccaacgugcagcgccucaugcggaaggagcgccgggacgacaacgaccugaagcgccugcgggaccucaaccaggccgucaacaaccugguggagcucaagagcacccagcagaaguccauccugcgcgugggcacccugaccagcgacgaccugcucauccuggccgccgaccuggagaagcuccgguccaaggucauccgcaccgagcggccccugagcgccgggguguacaugggcaaccuguccagccagcagcucgaccagcgccgggcgcugcugaacaugaucgggauguccggcggcaaccagggggcccgcgccggccgggacggggugguccgcgugugggacgugaagaacgccgagcuccugagcaaccaguucggcaccaugccgucccugacgcucgcgugccugaccaagcaggggcaggucgaccugaacgacgccgugcaggcccucaccgaccugggccugaucuacaccgccaaguaccccaacacgagcgaccucgaccggcugacccagucccaccccauccugaacaugaucgacaccaagaaguccagccucaacaucuccggcuacaacuucagccugggggccgcggugaaggccggcgccugcaugcuggacgggggcaacaugcucgagaccaucaaggucagcccccagacgauggacggcauccucaagagcauccugaaggugaagaaggcccuggggauguucaucuccgacaccccgggcgagcgcaaccccuacgagaacauccuguacaagaucugccugagcggggacggcuggcccuacaucgccucccggaccagcaucaccgggcgcgcgugggagaacacgguggucgaccucgaguccgacggcaagccccagaaggccgacagcaacaacuccagcaagucccugcagagcgccggcuucaccgccgggcugaccuacucccagcucaugacccugaaggacgccaugcugcagcuggacccgaacgcgaagacguggauggacaucgagggccggcccgaggaccccguggagaucgcccucuaccagcccagcuccgggugcuacauccacuucuuccgcgagccgaccgaccugaagcaguucaagcaggacgccaaguacagccacggcaucgacgugaccgaccuguucgccacccagcccgggcucacguccgccgucaucgacgcgcugccccgcaacauggugaucacgugccagggcagcgacgacauccggaagcugcucgagagccagggccgcaaggacaucaagcugaucgacaucgaccuguccaagaccgacagccggaaguacgagaacgccgugugggaccaguacaaggaccucugccacaugcacaccggggucguggucgagaagaagaagcgcggcgggaaggaggagaucaccccgcacugcgcccugauggacugcaucauguucgacgccgcgguguccggcgggcugaacaccagcgugcuccgggccguccugccccgcgacaugguguuccggaccuccacgccccgcgugguccugugaggacuaguuauaagacugacuagcccgaugggccucccaacgggcccuccuccccuccuugcaccgagauuaauaaaaaaaaaaaaaaaaaaaaaaaaaaaaaaaaaaaaaaaaaaaaaaaaaaaaaaaaaaaaaaaaaaaaaaaaaaaaaaaaaaaaaaaaaaaaaaaaaaaa

SEQ ID NO: 19256 - RNA, 1962 nt, Artificial Sequence
  mRNA product Design i-3 (A100) comprising derived and/or modified sequence from LASV(LM765-SLE-2012;Clade IV)__AIT17815__SP-HsPLAT_NP(2-569) (opt1)
aggagaaagcuuaccauggacgccaugaagcgcggccugugcugcgugcuccugcugugcggggccgucuucgugagccccagcgccuccaaggagaucaagagcuuccuguggacccagucccuccgccgggagcugagcggcuacugcuccaacaucaagcuccagguggucaaggacgcccaggcgcugcugcacgggcuggacuucagcgagguguccaacgugcagcgccucaugcggaaggagcgccgggacgacaacgaccugaagcgccugcgggaccucaaccaggccgucaacaaccugguggagcucaagagcacccagcagaaguccauccugcgcgugggcacccugaccagcgacgaccugcucauccuggccgccgaccuggagaagcucaaguccaaggucacccggaccgagcgcccccugagcgccgggguguacaugggcaaccuguccagccagcagcucgaccagcggcgcgcgcugcuggacaugaucgggauguccggcagcaaccagggcgcccgggccgggcgcgacggcgugguccgggugugggacgugaagaacgccgagcuccugaacaaccaguucgggacgaugccgucccugacccucgcgugccugaccaagcagggccaggucgaccugaacgacgccgugcaggcccucaccgaccuggggcugaucuacacggccaaguaccccaacaccagcgaccucgaccgccugacccagucccaccccauccugaacaugaucgacaccaagaaguccagccucaacaucuccggcuacaacuucagccugggcgccgcggugaaggccggggccugcaugcuggacggcgggaacaugcucgagacgaucaaggucagcccccagaccauggacggcauccucaagagcauccugaaggugaagaaggcccugggcauguucaucuccgacgccccgggggagcggaaccccuacgagaacauccuguacaagaucugccugagcggcgacggguggcccuacaucgcgucccgcaccagcaucaccggccgggccugggagaacacgguggucgaccucgaguccgacgggaagccccagaaggccggcagcaacggcuccaacaagagccugcaguccgccggguucaccgccggccugaccuacagccagcucaugacccugaaggacgcgaugcugcagcuggacccgaacgccaagacguggauggacaucgaggggcgccccgaggaccccguggagaucgcccucuaccagcccuccagcggcugcuacauccacuucuuccgggagccgaccgaccugaagcaguucaagcaggacgccaaguacucccacgggaucgacgugaccgaccuguucgccgcgcagcccggccucaccagcgccgucaucgacgcccugccccgcaacauggugaucacgugccagggcuccgacgacauccgcaagcuguucgagagccaggggcggaaggacaucaagcucaucgacaucgcccugagcaagaccgacucccgcaaguacgagaacgcggugugggaccaguacaaggaccugugccacaugcacaccggcaucgucguggagaagaagaagcgcgggggcaaggaggagaucacgccccacugcgcccucauggacugcaucauguucgacgccgccgucagcgggggccugaacaccuccgugcugcgggccgugcucccgcgggacauggucuuccgcaccagcacgccccggguggugcugugaggacuaguuauaagacugacuagcccgaugggccucccaacgggcccuccuccccuccuugcaccgagauuaauaaaaaaaaaaaaaaaaaaaaaaaaaaaaaaaaaaaaaaaaaaaaaaaaaaaaaaaaaaaaaaaaaaaaaaaaaaaaaaaaaaaaaaaaaaaaaaaaaaaa

SEQ ID NO: 19257 - RNA, 1962 nt, Artificial Sequence
  mRNA product Design i-3 (A100) comprising derived and/or modified sequence from LASV(LM776-SLE-2012;Clade IV)__AIT17825__SP-HsPLAT_NP(2-569) (opt1)
aggagaaagcuuaccauggacgccaugaagcgcggccugugcugcgugcuccugcugugcggggccgucuucgugagccccagcgccuccaaggagaucaagagcuuccuguggacccagucccuccgccgggagcugagcuccuacugcagcaacaucaagcuccagguggucaaggacgcccaggcgcugcugcacggccuggacuucuccgaggugagcaacgugcagcgccucaugcggaaggagcgccgggacgacaacgaccugaagcgccugcgggaccucaaccaggccgucaacaaccugguggagcugaaguccacccagcagaaguccauccuccgcguggggacccugaccuccgacgaccugcucauccuggccgccgaccuggagaagcucaagagcaaggucacccggaccgagcgcccccuguccgccggcguguacauggggaaccugagcucccagcagcucgaccagcggcgcgcgcugcugagcaugaucggcauguccgggagcaaccagggcgcccgggccggccgcgacggggugguccgggugugggacgugaagaacgccgagcuccugaacaaccaguucggcacgaugccgucccugacccucgcgugccugaccaagcaggggcaggucgaccugaacgacgccgugcaggcccucaccgaccugggccugaucuacacggccaaguaccccaacaccagcgaccucgaccgccugacccagagccaccccauccugaacaugaucgacaccaagaaguccagccucaacaucuccggguacaacuucagccugggcgccgcggugaaggccggcgccugcaugcuggacgggggcaacaugcucgagacgaucaaggucagcccccagaccauggacgggauccucaagagcauccugaaggugaagaaggcccugggcauguucaucuccgacaccccgggcgagcggaaccccuacgagaacauccuguacaagaucugccugagcggggacggcuggcccuacaucgccucccgcaccagcaucacggggcgggcgugggagaacaccguggucgaccucgaguccgacggcaagccccagaaggccgggagcaacaacuccaacaagagccugcaguccgccggcuucaccgccggccugaccuacagccagcucaugacgcugaaggacgccaugcugcagcuggacccgaacgcgaagaccuggauggacaucgaggggcgccccgaggaccccguggagguggcccucuaccagcccuccagcggcugcuacauccacuucuuccgggagccgaccgaccugaagcaguucaagcaggacgccaaguacucccacgggaucgacgucaccgaccuguucgccgcccagcccggccucacgagcgcggugaucgacgcccugccccgcaacauggugaucacgugccaggggagcgacgacauccgcaagcugcucgagucccagggccggaaggacaucaagcugaucgacaucgcccugagcaagaccgacucccgcaaguacgagaacgccgucugggaccaguacaaggaccucugccacaugcacaccggcguggucguggagaagaagaagcgcgggggcaaggaggagaucaccccgcacugcgcgcugauggacugcaucauguucgacgccgccgugagcgggggccugaacaccuccguccuccgggccgugcugccccgggacaugguguuccgcaccagcacgccccgggucgugcugugaggacuaguuauaagacugacuagcccgaugggccucccaacgggcccuccuccccuccuugcaccgagauuaauaaaaaaaaaaaaaaaaaaaaaaaaaaaaaaaaaaaaaaaaaaaaaaaaaaaaaaaaaaaaaaaaaaaaaaaaaaaaaaaaaaaaaaaaaaaaaaaaaaaa

SEQ ID NO: 19258 - RNA, 1962 nt, Artificial Sequence
  mRNA product Design i-3 (A100) comprising derived and/or modified sequence from LASV(Mad39;Clade IV)__ANH09723__SP-HsPLAT_NP(2-569) (opt1)
aggagaaagcuuaccauggacgccaugaagcgcggccugugcugcgugcuccugcugugcggggccgucuucgugagccccagcgccuccaaggagaucaagagcuuccuguggacccagucccuccgccgggagcugagcggcuacugcuccaacaucaagcuccagguggucaaggacgcccaggcgcugcugcacgggcuggacuucagcgagguguccaacgugcagcgccucaugcggaagcagcgccgggacgacaacgaccugaagcgccugcgggaccucaaccaggccgucaacaaccugguggagcugaaguccacccagcagaaguccgugcuccgcgucggcacgcugaccagcgacgaccugcucacccuggccgccgaccuggagaagcucaaguccaaggugacccggacggagcgcccccugaccgccgggguguacaugggcaaccugagcucccagcagcucgaccagcggcgcgcgcugcugaacaugaucgggaugagcggcggcaaccagggggcccggaccggccgcgacggggucgugcgggugugggacgucaagaacgccgagcuccugaacaaccaguucggcaccaugccgucccugacgcucgccugccugaccaagcagggccagguggaccugaacgacgugguccaggcgcucaccgaccuggggcugaucuacaccgccaaguaccccaacacgagcgaccucgaccgccugacccagucccaccccauccugaacaugaucgacaccaacaagagcucccucaacaucagcggcuacaacuucagccugggggccgccgugaaggccggcgcgugcaugcuggacgggggcaacaugcucgagaccaucaaggugagcccccagacgauggacggcauccucaagagcauccugaaggucaagaagucccuggggauguucaucagcgacaccccgggcgagcggaaccccuacgagaacauccuguacaagaucugccuguccggggacggcuggcccuacaucgccagccgcaccuccaucaccgggcgggccugggagaacacggugguggaccucgagagcggcggcaagccccagaaggccggguccaacaacagcaacaagucccugcagagcgccggcuucgcggccgggcugaccuacucccagcucaugacccugaaggacgccaugcugcagcuggacccgaacgccaagaccuggauggacaucgagggccgccccgaggaccccgucgagaucgcccucuaccagcccaucagcgggugcuacauccacuucuuccgggagccgacggaccugaagcaguucaagcaggacgcgaaguacucccacggcaucgacgugaccgaccuguucgccgcccagcccggccucaccagcgccgugaucgaggcccugccccgcaacauggucaucacgugccagggguccgacgacauccgcaagcuguucgagagccagggccggaaggacaucaagcucaucgacaucgcgcuguccaagaccgacagccgcaaguacgagaacgccgugugggaccaguacaaggaccugugccacaugcacaccggggucgugguggagaagaagaagaagggcgggaaggaggagaucacgccccacugcgcccucauggacugcaucauguucgacgccgcggucagcggcggccugaacacccuggugcuccgggccgugcugccgcgcgacauggucuuccggaccuccacccccaagguggugcugugaggacuaguuauaagacugacuagcccgaugggccucccaacgggcccuccuccccuccuugcaccgagauuaauaaaaaaaaaaaaaaaaaaaaaaaaaaaaaaaaaaaaaaaaaaaaaaaaaaaaaaaaaaaaaaaaaaaaaaaaaaaaaaaaaaaaaaaaaaaaaaaaaaaa

SEQ ID NO: 19259 - RNA, 1962 nt, Artificial Sequence
  mRNA product Design i-3 (A100) comprising derived and/or modified sequence from LASV(Z0947-SLE-2011;Clade IV)__AIT17841__SP-HsPLAT_NP(2-569) (opt1)
aggagaaagcuuaccauggacgccaugaagcgcggccugugcugcgugcuccugcugugcggggccgucuucgugagccccagcgccuccaaggagaucaagagcuuccuguggacccagucccuccgccgggagcugagcggcuacugcuccaacaucaagcuccagguggucaaggacgcccaggcgcugcugcacgggcuggacuucagcgagguguccaacgugcagcgccucaugcggaaggagcgccgggacgacaacgaccugaagcgccugcgggaccucaaccaggccgucaacaaccugguggagcucaagagcacccagcagaaguccauccugcgcgugggcacccugaccagcgacgaccugcucauccuggccgccgaccuggagaagcucaaguccaaggucacccggaccgagcgcccccugagcgccgggguguacaugggcaaccuguccagccagcagcucgaccagcggcgcgcgcugcugaacaugaucgggauguccggcagcaaccagggcgcccggacggggcgcgacggcgugguccgggugugggacgugaagaacgccgagcuccugaacaaccaguucgggaccaugccgucccugacccucgccugccugaccaagcagggccaggucgaccugaacgacgcggugcaggcccucacggaccuggggcugaucuacaccgccaaguaccccaacaccagcgaccucgaccgccugacccagucccaccccauccugaacaugaucgacacgaagaaguccagccucaacaucuccggcuacaacuucagccugggcgccgccgugaaggcgggggccugcaugcuggacggcgggaacaugcucgagaccaucaaggucagcccccagaccauggacggcauccucaagagcauccugaaggugaagaaggcccugggcauguucaucuccgacgccccgggggagcggaaccccuacgagaacauccuguacaagaucugccugagcggcgacggguggcccuacaucgccucccgcaccagcaucacgggccgggcgugggagaacaccguggucgaccucgaguccgacgggaagccccagaaggccggcagcaacggcuccaacaagagccugcaguccgccggguucaccgccggccugaccuacagccagcucaugacgcugaaggacgccaugcugcagcuggacccgaacgcgaagaccuggauggacaucgaggggcgccccgaggaccccguggagaucgcccucuaccagcccuccagcggcugcuacauccacuucuuccgggagccgaccgaccugaagcaguucaagcaggacgccaaguacucccacgggaucgacgugaccgaccuguucgccgcccagcccggccucacgagcgcggucaucgacgcccugccccgcaacauggugaucacgugccagggcuccgacgacauccgcaagcuguucgagagccaggggcggaaggacaucaagcucaucgacaucgcccugagcaagaccgacucccgcaaguacgagaacgccgugugggaccaguacaaggaccugugccacaugcacaccggcaucgucguggagaagaagaagcgcgggggcaaggaggagaucaccccgcacugcgcgcucauggacugcaucauguucgacgccgccgucagcgggggccugaacaccuccgugcugcgggccgugcucccccgggacauggucuuccgcaccagcacgccccggguggugcugugaggacuaguuauaagacugacuagcccgaugggccucccaacgggcccuccuccccuccuugcaccgagauuaauaaaaaaaaaaaaaaaaaaaaaaaaaaaaaaaaaaaaaaaaaaaaaaaaaaaaaaaaaaaaaaaaaaaaaaaaaaaaaaaaaaaaaaaaaaaaaaaaaaaa

SEQ ID NO: 19260 - RNA, 1962 nt, Artificial Sequence
  mRNA product Design i-3 (A100) comprising derived and/or modified sequence from LASV(Josiah;Clade IV)__NP_694869__SP-HsPLAT_NP(2-569) (opt4)
aggagaaagcuuaccauggacgccaugaagagaggccugugcugcgugcugcugcugugcggcgccguguucgugagccccagcgccagcaaggagaucaagagcuuccuguggacccagagccugagaagagagcugagcggcuacugcagcaacaucaagcugcagguggugaaggacgcccaggcccugcugcacggccuggacuucagcgaggugagcaacgugcagagacugaugagaaaggagagaagagacgacaacgaccugaagagacugagagaccugaaccaggccgugaacaaccugguggagcugaagagcacccagcagaagagcauccugagagugggcacccugaccagcgacgaccugcugauccuggccgccgaccuggagaagcugaagagcaaggugaucagaaccgagagaccccugagcgccggcguguacaugggcaaccugagcagccagcagcuggaccagagaagagcccugcugaacaugaucggcaugagcggcggcaaccagggcgccagagccggcagagacggcguggugagagugugggacgugaagaacgccgagcugcugaacaaccaguucggcaccaugcccagccugacccuggccugccugaccaagcagggccagguggaccugaacgacgccgugcaggcccugaccgaccugggccugaucuacaccgccaaguaccccaacaccagcgaccuggacagacugacccagagccaccccauccugaacaugaucgacaccaagaagagcagccugaacaucagcggcuacaacuucagccugggcgccgccgugaaggccggcgccugcaugcuggacggcggcaacaugcuggagaccaucaaggugagcccccagaccauggacggcauccugaagagcauccugaaggugaagaaggcccugggcauguucaucagcgacacccccggcgagagaaaccccuacgagaacauccuguacaagaucugccugagcggcgacggcuggcccuacaucgccagcagaaccagcaucaccggcagagccugggagaacaccgugguggaccuggagagcgacggcaagccccagaaggccgacagcaacaacagcagcaagagccugcagagcgccggcuucaccgccggccugaccuacagccagcugaugacccugaaggacgccaugcugcagcuggaccccaacgccaagaccuggauggacaucgagggcagacccgaggaccccguggagaucgcccuguaccagcccagcagcggcugcuacauccacuucuucagagagcccaccgaccugaagcaguucaagcaggacgccaaguacagccacggcaucgacgugaccgaccuguucgccacccagcccggccugaccagcgccgugaucgacgcccugcccagaaacauggugaucaccugccagggcagcgacgacaucagaaagcugcuggagagccagggcagaaaggacaucaagcugaucgacaucgcccugagcaagaccgacagcagaaaguacgagaacgccgugugggaccaguacaaggaccugugccacaugcacaccggcguggugguggagaagaagaagagaggcggcaaggaggagaucaccccccacugcgcccugauggacugcaucauguucgacgccgccgugagcggcggccugaacaccagcgugcugagagccgugcugcccagagacaugguguucagaaccagcacccccagaguggugcugugaggacuaguuauaagacugacuagcccgaugggccucccaacgggcccuccuccccuccuugcaccgagauuaauaaaaaaaaaaaaaaaaaaaaaaaaaaaaaaaaaaaaaaaaaaaaaaaaaaaaaaaaaaaaaaaaaaaaaaaaaaaaaaaaaaaaaaaaaaaaaaaaaaaa

SEQ ID NO: 19261 - RNA, 1962 nt, Artificial Sequence
  mRNA product Design i-3 (A100) comprising derived and/or modified sequence from LASV(LP;Clade I)__AAF86702__SP-HsPLAT_NP(2-569) (opt4)
aggagaaagcuuaccauggacgccaugaagagaggccugugcugcgugcugcugcugugcggcgccguguucgugagccccagcaacagcaaggagaucaagagcuuccuguggacccagagccugagaagagagcugagcggcuacugcagcaacaucaagcugcagguggugaaggacgcccaggcccugcugcacggccuggacuucagcgaggugagcaacgugcagagacugaugagaaagcagaagagagacgacgccgaccugaagagacugagagaccugaaccaggccgugaacaaccugguggagcugaagagcacccagcagaagaacgugcugagagugggcacccugagcagcgacgaccugaucacccuggccgccgaccuggagaagcugaagagcaaggugaucagaaccgagagaccccugagcagcggcguguacaugggcaaccugagcagccagcagcuggaccagagaagagcccugcugagcaugaucggcaugagcggcggcccccagggcaacagaaccggcggcgacggcguggugagagugugggacgugaagaacgccgagcugcugaacaaccaguucggcaccaugcccagccugacccuggccugccugaccaagcagggccagguggaccugaacgacgccgugcaggcccugaccgaccugggccugaucuacaccgccaaguaccccaacagcagcgaccuggacaugcugacccagagccaccccauccugggcaugguggacaccaagaagagcagccugaacaucagcggcuacaacuucagccugggcgccgccgugaaggccggcgccugcaugcuggacggcggcaacaugcuggagaccaucaaggugagcccccagaccauggacggcauccugaagagcauccugaaggugaagagaagccugggcauguucaucagcgacacccccggcgagagaaaccccuacgagaacauccuguacaagaucugccugagcggcgagggcuggcccuacaucgccagcagaaccagcaucaccggcagagccugggagaacacccugguggaccuggagagcgacaacaagccccccaagcugaacagcgccggcagcaacaagagccugcaggccgccggccugaacgccggccugaccuacagccagcugaugacccugaaggacugcaugcugcagcuggaccccagcagcaagaccuggaucgacaucgagggcagacccgaggaccccguggagaucgcccuguuccagcccagcagcggcugcuacauccacuucuucagagagcccaccgaccugaagcaguucaagcaggacgccaaguacagccacggcaucgacgugaccgaccuguucagcacccagcccggccugaccagcgccgugaucgaggcccugcccagaaacauggugcugaccugccagggcagcgacgacaucaagaagcugcuggagagccagggcagaagagacaucaagcugaucgacaucagccugagcaaggccgacagcagaaaguucgagaacgccgugugggaccaguacaaggaccugugccacaugcacaccggcguggugguggagaagaagaagagaggcggcaaggaggagaucaccccccacugcgcccugcuggacugcaucauguucgacgccgccaccaccggcagccugaacaucaccacccugagagccgugcugcccagagacaugguguucagaaccagcacccccaagguggugcugugaggacuaguuauaagacugacuagcccgaugggccucccaacgggcccuccuccccuccuugcaccgagauuaauaaaaaaaaaaaaaaaaaaaaaaaaaaaaaaaaaaaaaaaaaaaaaaaaaaaaaaaaaaaaaaaaaaaaaaaaaaaaaaaaaaaaaaaaaaaaaaaaaaaa

SEQ ID NO: 19262 - RNA, 1962 nt, Artificial Sequence
  mRNA product Design i-3 (A100) comprising derived and/or modified sequence from LASV(803213;Clade II)__AAF86704__SP-HsPLAT_NP(2-569) (opt4)
aggagaaagcuuaccauggacgccaugaagagaggccugugcugcgugcugcugcugugcggcgccguguucgugagccccagcgccagcaaggaggugaagagcuuccuguggacccagagccugagaagagagcugagcggcuacugcagcaacaucaagcugcagguggugaaggacgcccaggcccugcugcacggccuggacuucagcgaggugaacaacgugcagagacugaugagaaagcagaagagagacgacggcgaccugaagagacugagagaccugaaccaggccgugaacaaccugguggagcugaagagcacccagcagaagagcauccugagagugggcacccugaccagcgacgaccugcugacccuggccgccgaccuggagaagcugaagagcaaggugaucagaaccgagagaccccugagcagcggcguguacaugggcaaccugagcacccagcagcuggagcagagaagagcccugcugaacaugaucggcauggugggcggcgcccagggcacccagcccggcagagacggcguggugagagugugggacgugaagaaccccgaccugcugaacaaccaguucggcaccaugcccagccugacccuggccugccugaccaagcagggccagguggaccugaacgacgccgugcuggcccugaccgaccugggccugaucuacaccgccaaguaccccaacagcagcgaccuggacagacugagccagagccaccccauccugaacaugguggacaccaagaagagcagccugaacaucagcggcuacaacuucagccugggcgccgccgugaaggccggcgccugcaugcuggacggcggcaacaugcuggagaccaucaaggugaccccccagaccauggacggcauccugaagagcauccugaaggugaagagaagccugggcauguucgugagcgacacccccggcgagagaaaccccuacgagaacauccuguacaagaucugccugagcggcgacggcuggcccuacaucgccagcagaaccagcaucgugggcagagccugggagaacaccaccguggaccuggagagcgacggcaagccccagaaggugggcaccgccggcagcaacaagagccugcagagcgccggcuuccccaccggccugaccuacagccagcugaugacccugaaggacagcaugaugcagcuggaccccagcgccaagaccuggaucgacaucgagggcagacccgaggaccccguggagaucgcccuguaccagcccaugagcggcugcuacauccacuucuucagagagcccaccgaccugaagcaguucaagcaggacgccaaguacagccacggcaucgacguggccgaccuguuccccgcccagcccggccugaccagcgccgugaucgaggcccugcccagaaacauggugcugaccugccagggcagcgacgacaucaagaagcugcuggacagccagggcagaagagacaucaagcugaucgacaucagccugagcaagguggacagcagaaaguucgagaacgccgugugggaccagugcaaggaccugugccacaugcacaccggcguggugguggagaagaagaagagaggcggcaaggaggagaucaccccccacugcgcccugauggacugcaucauguucgacgccgccgugagcggcggccugaacauccccgugcugagagccgugcugcccagagacaugguguucagaaccagcagccccaagguggugcugugaggacuaguuauaagacugacuagcccgaugggccucccaacgggcccuccuccccuccuugcaccgagauuaauaaaaaaaaaaaaaaaaaaaaaaaaaaaaaaaaaaaaaaaaaaaaaaaaaaaaaaaaaaaaaaaaaaaaaaaaaaaaaaaaaaaaaaaaaaaaaaaaaaaa

SEQ ID NO: 19263 - RNA, 1965 nt, Artificial Sequence
  mRNA product Design i-3 (A100) comprising derived and/or modified sequence from LASV(GA391;Clade III)__CAA36646__SP-HsPLAT_NP(2-570) (opt4)
aggagaaagcuuaccauggacgccaugaagagaggccugugcugcgugcugcugcugugcggcgccguguucgugagccccagcgccagcaaggaggugagaagcuuccuguggacccagagccugagaagagagcugagcggcuacugcagcaacaucaagcugcagguggugaaggacgcccaggcccugcugcacggccuggacuucagcgaggugagcaacgugcagagacugaugagaaagcagaagagagacgacggcgaccugaagagacugagagaccugaaccaggccgugaacaaccugguggagcugaagagcacccagcagaagagcgugcugagagugggcacccugagcagcgacgaccugcugauccuggccgccgaccuggagaagcugaagagcaaggugaccagaaccgagagaccccugagcagcggcguguacaugggcaaccugagcagccagcagcuggaccagagaagagcccugcugaacaugaucggcaugaccggcgugagcggcggcggcaagggcgccagcgacggcaucgugagagugugggacgugaagaacgccgagcugcugaacaaccaguucggcaccaugcccagccugacccuggccugccugaccaagcagggccagguggaccugaacgacgccgugcaggcccugaccgaccugggccugaucuacaccgccaaguaccccaacagcagcgaccuggacagacugagccagagccaccccauccugaacaugaucgacaccaagaagagcagccugaacaucagcggcuacaacuucagccugggcgccgccgugaaggccggcgccugcaugcuggacggcggcaacaugcuggagaccaucaaggugagcccccagaccauggacggcauccugaagagcauccugaaggugaagaagagccugggcauguucgugagcgacacccccggcgagagaaaccccuacgagaacauccuguacaagaucugccugagcggcgacggcuggcccuacaucgccagcagaaccagcaucgugggcagagccugggagaacaccgugguggaccuggagcaggacaacaagccccagaagaucggcaacggcggcagcaacaagagccugcagagcgccggcuucgccgccggccugaccuacagccagcugaugacccugaaggacuucaagugcuucaaccugauccccaacgccaagaccuggauggacaucgagggcagacccgaggaccccguggagaucgcccuguaccagcccagcagcggcugcuacgugcacuucuucagagagcccaccgaccugaagcaguucaagcaggacgccaaguacagccacggcaucgacgugaccgaccuguucgccgcccagcccggccugaccagcgccgugaucgaggcccugcccagaaacauggugaucaccugccagggcagcgaggacaucagaaagcugcuggagagccagggcagaagagacaucaagcugaucgacaucacccugagcaaggccgacagcagaaaguucgagaacgccgugugggaccaguucaaggaccugugccacaugcacaccggcguggugguggagaagaagaagagaggcggcaaggaggagaucaccccccacugcgcccugauggacugcaucauguucgacgccgccgugagcggcggccuggacgccaaggugcugagaguggugcugcccagagacaugguguucagaaccagcacccccaagguggugcugugaggacuaguuauaagacugacuagcccgaugggccucccaacgggcccuccuccccuccuugcaccgagauuaauaaaaaaaaaaaaaaaaaaaaaaaaaaaaaaaaaaaaaaaaaaaaaaaaaaaaaaaaaaaaaaaaaaaaaaaaaaaaaaaaaaaaaaaaaaaaaaaaaaaa

SEQ ID NO: 19264 - RNA, 1962 nt, Artificial Sequence
  mRNA product Design i-3 (A100) comprising derived and/or modified sequence from LASV(AV;Clade V)__CCA30315__SP-HsPLAT_NP(2-569) (opt4)
aggagaaagcuuaccauggacgccaugaagagaggccugugcugcgugcugcugcugugcggcgccguguucgugagccccagcgccagcaaggaggugaagagcuuccuguggacccagagccugagaagagagcugagcggcuacugcagcaacaucaagcugcagguggugaaggacgcccaggcccugcugcacggccuggacuucagcgaggugagcaacgugcagagacugaugagaaagcagagaagagacgacagcgaccugaagagacugagagaccugaaccaggccgugaacaaccugguggagcugaagagcacccagcagaagagcgugcugagagugggcacccugagcagcgacgaccugcugacccuggccgccgaccuggagaagcugaagagcaaggugaccagaaccgagagaccccugagcagcggcguguacaugggcaaccugagcagccagcagcuggaccagagaagagcccugcugaaccugaucggcaugaccaacggcagccagggcagccaggccggcagagacggcguggugagagugugggacgugaagaacgccgagcugcugaacaaccaguucggcaccaugcccagccugacccuggccugccugaccaagcagggccagguggaccugaacgacguggugcaggcccugaccgaccugggccugaucuacaccgccaaguaccccaacaccagcgaccuggacagacugacccagagccaccccauccugaacaugaucgacaccaagaagagcagccugaacaucagcggcuacaacuucagccugggcgccgccgugaaggccggcgccugcaugcuggacggcggcaacaugcuggagaccaucaaggugagcccccagagcauggacggcauccugaagagcauccugaaggugaagagagcccugggcauguucgugagcgacacccccggcgagagaaaccccuacgagaacauccuguacaagaucugccugagcggcgacggcuggcccuacaucgccagcagaaccagcaucgugggcagagccugggagaacaccgugguggaccuggagaccgacggcaagccccagaagaucggcagcggcaacagcaacaagagccugcagagcgccggcuucagcgccggccugaccuacagccagcugaugacccugaaggacgccaugcugcagcuggaccccaacgccaagaccuggauggacaucgagggcagacccgaggaccccguggagguggcccuguaccagcccaucagcggcugcuacauccacuucuucagagagcccaccgaccugaagcaguucaagcaggacgccaaguacagccacggcaucgacaucgccgaccuguucgccgcccagcccggccugaccagcgccgugaucgaggcccugcccagaaacauggugaucaccugccagggcagcgaggacaucaagaagcugcuggagagccagggcagaaaggacaucaagcugaucgacaucgcccugagcaagaucgacagcagaaaguucgagaacgccgugugggaccaguacaaggaccugugccacaugcacaccggcguggugguggagaagaagaagagaggcggcaaggaggagaucaccccccacugcgcccugauggacugcaucauguucgacgccgccgugagcggcggccugaacacccuggugcugagagccgugcugcccagagacaugguguucagaaccagcacccccagaguggugcugugaggacuaguuauaagacugacuagcccgaugggccucccaacgggcccuccuccccuccuugcaccgagauuaauaaaaaaaaaaaaaaaaaaaaaaaaaaaaaaaaaaaaaaaaaaaaaaaaaaaaaaaaaaaaaaaaaaaaaaaaaaaaaaaaaaaaaaaaaaaaaaaaaaaa

SEQ ID NO: 19265 - RNA, 1962 nt, Artificial Sequence
  mRNA product Design i-3 (A100) comprising derived and/or modified sequence from LASV(Togo/2016/7082;Clade VI)__AMR44578__SP-HsPLAT_NP(2-569) (opt4)
aggagaaagcuuaccauggacgccaugaagagaggccugugcugcgugcugcugcugugcggcgccguguucgugagccccagcaacagcaaggaggugaagagcuuccuguggacccagagccugagaagagagcugagcggcuacugcagcaacaucaagcugcagguggugaaggacgcccaggcccugcugcacggccuggacuucagcgaggugagcaacgugcagagacugaugagaaagcagaagagagacgacggcgaccugaagagacugagagaccugaaccaggccgugaacaaccugguggagcugaagagcgugcagcagaagagcauccugagagugggcacccugaccagcgacgaccugcugacccuggccgccgaccuggagaagcugaagagcaaggugaccagaaccgagagaccccugagcagcggcguguacaugggcaaccugagcagccagcagcuggaccagagaagagcccugcugagcaugaucggcaugagcggcggcaaccagaacagccagcccaagggcgacggcguggugagagugugggacgugaagaacgccgaccugcugaacaaccaguucggcaccaugcccagccugacccuggccugccugaccaagcagggccagguggaccugaacgacgccgugcaggcccugaccgaccugggccugaucuacaccgccaaguaccccaacagcagcgaccuggacagacugagccagagccaccccauccugaacaugaucgacaccaagaagagcagccugaacaucagcggcuacaacuucagccugggcgccgccaucaagaccggcgccugcaugcuggacggcggcaacaugcuggagaccaucaaggugaccccccagaccauggacggcauccugaagagcauccugaaggugaagagaagccugggcauguucaucagcgacacccccggcgagagaaaccccuacgagaacauccuguacaagaucugccugagcggcgacggcuggcccuacaucgccagcagaaccgccaucaucggcagagccugggagaacaccgugguggaccuggagagcgacagcaagccccagaagaucggcagcaacggcagcaacaagagccugcagagcgccggcuucgcccccggccugaccuacagccagcugaugacccugaaggacagcaugcugcagcuggaccccaacgccaagaccuggaucgacaucgagggcagacccgaggaccccguggagguggcccuguuccagcccaucagcggcugcuacauccacuucuucagagagcccaccgaccugaagcaguucaagcaggacgccaaguacagccacggcaucgacgugaccgaccuguucgccgcccagcccggccugaccagcgccgugaucgaggcccugcccagaaacauggugcugaccugccagggcagcgacgacaucaagaagcugcuggacagccagggcagaagagacaucaagcugaucgacgugagccugaacaagaucgacagcagaaaguucgagaacgccgugugggaccaguacaaggaccugugccacaugcacaccggcguggugguggagaagaagaagaagggcggcaaggaggagaucaccccccacugcgcccugcuggacugcaucauguucgacgccgccgugagcggcggccugaacgccaccgugcugagagccgugcugcccagagacaugguguucagaaccagcagccccaagguggugcugugaggacuaguuauaagacugacuagcccgaugggccucccaacgggcccuccuccccuccuugcaccgagauuaauaaaaaaaaaaaaaaaaaaaaaaaaaaaaaaaaaaaaaaaaaaaaaaaaaaaaaaaaaaaaaaaaaaaaaaaaaaaaaaaaaaaaaaaaaaaaaaaaaaaa

SEQ ID NO: 19266 - RNA, 1962 nt, Artificial Sequence
  mRNA product Design i-3 (A100) comprising derived and/or modified sequence from LASV(KAK-428;Clade n.d. (VII))__ANH09741__SP-HsPLAT_NP(2-569) (opt4)
aggagaaagcuuaccauggacgccaugaagagaggccugugcugcgugcugcugcugugcggcgccguguucgugagccccagcaacagcaaggaggugaagagcuuccuguggacccagagccugagaagagagcugagcggcuacugcaccaacaucaagcugcagguggugaaggacgcccaggcccugcugcacggccuggacuucagcgaggugagcaacgugcagagacugaugagaaagcagaagagagacgacaacgaccugaagagacugagagaccugaaccaggccgugaacaaccugguggagcugaagagcgugcagcagaagagcgugcugaaggugggcacccugaacagcgacgaccugcugacccuggccgccgaccuggagaagcugaagagcaagguggugagaaccgagagaccccugagcagcggcguguacaugggcaaccugagcagccagcagcuggaccagagaagagcccugcugaacaugaucggcauggccggcggcagccagggcaaccagcccagcagagacggcguggugagagugugggacgugaagaacgccgaccugcugaacaaccaguucggcaccaugcccagccugacccuggccugccugaccaagcagggccagguggaccugaacgacguggugcuggcccugaccgaccugggccugaucuacaccgccaaguaccccaacagcagcgaccuggacagacugagccagaaccaccccgugcugaacaugaucgacgugaacaagagcagccugaacaucagcggcuacaacuucagccugggcgccgccgugaaggccggcgccugcaugcuggacggcggcaacaugcuggagaccaucaagaucagcccccagaccguggacggcauccugaagagcauccugaaggugaagagagcccugggcauguucgugagcgacacccccggcgagagaaaccccuacgagaacauccuguacaaggugugccugagcggcaacggcuggcccuacaucgccagcagaaccagcaucgugggcagagccugggagaacaccgugguggaccuggagagcaacaagaaccagcccaaggugggcaacaacggcagcaacaagaugcugcagagcagcggcuucgccaccggccugaccuacagccagcugaugacccugagagacagcaugcugcagcuggaccccaccgccaagaccuggaucgacaucgagggcagacccgaggaccccguggagcuggcccuguuccagcccagcagcggcugcuacauccacuucuucagagagcccaccgaccugaagcaguucaagcaggacgccaaguacagccacggcaucgacgugaacgaccuguucagcgcccagcccggccugaccagcgccgugcuggaggcccugcccagaaacauggugcugaccugccagggcagcgacgacaucagaaagcugcuggacagccaggacagaaaggacaucaagcugaucgacaucagccugagcaaggccgacgccagaaaguucgagaacgacgugugggaccaguucaaggaccugugccacaugcacaccggcaucgugguggagaagaagaagaagggcggcaagcaggagaugaccccccacugcgcccugcuggacugcaucauguucgacgccgccgugagcggcggccugaacgugcccacccugagagccgugcugcccaccgacaugguguucagaaccaucaccaccaagguggugcugugaggacuaguuauaagacugacuagcccgaugggccucccaacgggcccuccuccccuccuugcaccgagauuaauaaaaaaaaaaaaaaaaaaaaaaaaaaaaaaaaaaaaaaaaaaaaaaaaaaaaaaaaaaaaaaaaaaaaaaaaaaaaaaaaaaaaaaaaaaaaaaaaaaaa

SEQ ID NO: 19267 - RNA, 1962 nt, Artificial Sequence; identical to SEQ ID NO: 19261
  mRNA product Design i-3 (A100) comprising derived and/or modified sequence from LASV(Pinneo-NIG-1969;Clade I)__AIT17837__SP-HsPLAT_NP(2-569) (opt4)

SEQ ID NO: 19268 - RNA, 1962 nt, Artificial Sequence
  mRNA product Design i-3 (A100) comprising derived and/or modified sequence from LASV(ISTH0009-NIG-2011;Clade II)__AIT17405__SP-HsPLAT_NP(2-569) (opt4)
aggagaaagcuuaccauggacgccaugaagagaggccugugcugcgugcugcugcugugcggcgccguguucgugagccccagcgugagcaaggaggugaagagcuuccuguggacccagagccugagaagagagcugagcggcuacugcagcaacaucaagcugcagguggugaaggacgcccaggcccugcugcacggccuggacuucagcgaggugagcaacgugcagagacugaugagaaagcagaagagagacgacagcgaccugaagagacugagagaccugaaccaggccgugaacaaccugguggagcugaagagcacccagcagaagagcauccugagagugggcacccugaccagcgacgaccugcugacccuggccgccgaccuggagaagcugaagagcaaggugaucagaaccgagagaccccugagcagcggcguguacaugggcaaccugagcacccagcagcuggagcagagaagagcccugcugaacaugaucggcauggugggcggcgcccagggcacccagcccggcagagacggcguggugagagugugggacgugaagaaccccgaccugcugaacaaccaguucggcaccaugcccagccugacccuggccugccugaccaagcagggccagguggaccugaacgacgccgugcuggcccugaccgaccugggccugaucuacaccgccaaguaccccaacagcagcgaccuggacagacugagccagagccaccccauccugaacaugguggacaucaagaagagcagccugaacaucagcggcuacaacuucagccugggcgccgccgugaaggccggcgccugcaugcuggacggcggcaacaugcuggagaccaucaaggugaccccccagaccauggacggcauccugaagagcauccugaaggugaagagaagccugggcauguucgugagcgacacccccggcgagagaaaccccuacgagaacauccuguacaagaucugccugagcggcgacggcuggcccuacaucgccagcagaaccagcaucgugggcagagccugggagaacaccaccguggaccuggagagcgacggcaagccccagaaggugggcagcgccggcagcaacaagagccugcagagcgccggcuuccccaccggccugaccuacagccagcugaugacccugaaggacagcaugaugcagcuggaccccagcgccaagaccuggaucgacaucgagggcagacccgaggaccccguggagaucgcccuguaccagcccaugagcggcugcuacauccacuucuucagagagcccaccgaccugaagcaguucaagcaggacgccaaguacagccacggcaucgacguggccgaccuguuccccgcccagcccggccugaccagcgccgugaucgaggcccugcccagaaacauggugcugaccugccagggcagcgacgacaucaagagacugcuggacagccagggcagaagagacaucaagcugaucgacaucgcccugagcaaggccgacagcagaagauucgagaacgccgugugggaccagugcaaggaccugugccacaugcacaccggcguggugguggagaagaagaagagaggcggcaaggaggagaucaccccccacugcgcccugauggacugcaucauguacgacgccgccgugagcggcggccugaacauccccgugcugagagccgugcugcccagagacaugguguucagaaccagcagccccaagguggugcugugaggacuaguuauaagacugacuagcccgaugggccucccaacgggcccuccuccccuccuugcaccgagauuaauaaaaaaaaaaaaaaaaaaaaaaaaaaaaaaaaaaaaaaaaaaaaaaaaaaaaaaaaaaaaaaaaaaaaaaaaaaaaaaaaaaaaaaaaaaaaaaaaaaaa

SEQ ID NO: 19269 - RNA, 1962 nt, Artificial Sequence
  mRNA product Design i-3 (A100) comprising derived and/or modified sequence from LASV(ISTH2010-NIG-2012;Clade II)__AIT17483__SP-HsPLAT_NP(2-569) (opt4)
aggagaaagcuuaccauggacgccaugaagagaggccugugcugcgugcugcugcugugcggcgccguguucgugagccccagcgccagcaaggaggugaagagcuuccuguggacccagagccugagaagagagcugagcggcuacugcagcaacaucaagcugcagguggugaaggacgcccaggcccugcugcacggccuggacuucagcgaggugagcaacgugcagagacugaugagaaagcagaagagagacgacagcgaccugaagagacugagagaccugaaccaggccgugaacaaccugguggagcugaagagcacccagcagaagagcauccugagagugggcacccugaccagcgacgaccugcugacccuggccgccgaccuggagaagcugaagagcaaggugaucagaaccgagagaccccugagcagcggcguguacaugggcaaccugagcacccagcagcuggagcagagaagagcccugcugaaccugaucggcauggugggcggcgcccagggcacccagcccggcagagacggcguggugagagugugggacgugaagaaccccgaccugcugaacaaccaguucggcaccaugcccagccugacccuggccugccugaccaagcagggccagguggaccugaacgacgccgugcuggcccugaccgaccugggccugaucuacaccgccaaguaccccaacagcagcgaccuggacagacugagccagagccaccccauccugaacaugguggacaccaagaagagcagccugaacaucagcggcuucaacuucagccugggcgccgccgugaaggccggcgccugcaugcuggacggcggcaacaugcuggagaccaucaaggugaccccccagaccauggacggcauccugaagagcauccugaaggugaagaagagccugggcauguucgugagcgacacccccggcgagagaaaccccuacgagaacauccuguacaagaucugccugagcggcgacggcuggcccuacaucgccagcagaaccagcaucgugggcagagccugggagaacaccaccguggaccuggagagcgacggcaagccccacaaggugggcaccgccggcagcaacaagagccugcagagcgccggcuuccccaccggccugaccuacagccagcugaugacccugaaggacagcaugaugcagcuggaccccagcgccaagaccuggaucgacaucgagggcagacccgaggaccccguggagaucgcccuguaccagcccaugagcggcugcuacauccacuucuucagagagcccaccgaccugaagcaguucaagcaggacgccaaguacagccacggcaucgacguggccgaccuguuccccgcccagcccggccugaccagcgccgugaucgaggcccugcccagaaacauggugcugaccugccagggcagcgacgacaucaagagacugcuggacagccagggcagaagagacaucaagcugaucgacaucgcccugagcaaggccgacagcagaagauucgagaacgccgugugggaccagugcaaggaccugugccacaugcacaccggcguggugguggagaagaagaagagaggcggcaaggaggagaucaccccccacugcgcccugauggacugcaucauguacgacgccgccgugagcggcggccugaacauccccgugcugagagccgugcugcccagagacaugguguucagaaccagcagccccaagguggugcugugaggacuaguuauaagacugacuagcccgaugggccucccaacgggcccuccuccccuccuugcaccgagauuaauaaaaaaaaaaaaaaaaaaaaaaaaaaaaaaaaaaaaaaaaaaaaaaaaaaaaaaaaaaaaaaaaaaaaaaaaaaaaaaaaaaaaaaaaaaaaaaaaaaaa

SEQ ID NO: 19270 - RNA, 1962 nt, Artificial Sequence
  mRNA product Design i-3 (A100) comprising derived and/or modified sequence from LASV(Lassa virus/H.sapiens-wt/NGA/2015/ISTH_0543;Clade II)__AVO03640__SP-HsPLAT_NP(2-569) (opt4)
aggagaaagcuuaccauggacgccaugaagagaggccugugcugcgugcugcugcugugcggcgccguguucgugagccccagcgccagcaaggaggugaagagcuuccuguggacccagagccugagaagagagcugagcggcuacugcagcaacaucaagcugcagguggugaaggacgcccaggcccugcugcacggccuggacuucagcgaggugagcaacgugcagagacugaugagaaagcagaagagagacgacagcgaccugaagagacugagagaccugaaccaggccgugaacaaccugguggagcugaagagcacccagcagaagagcauccugagagugggcacccugaccagcgacgaccugcugacccuggccgccgaccuggagaagcugaagagcaaggugaucagaaccgagagaccccugagcagcggcguguacaugggcaaccugagcacccagcagcuggagcagagaagagcccugcugaacaugaucggcauggugggcggcgcccagggcacccagcccggcagagacggcguggugagagugugggacgugaagaaccccgaccugcugaacaaccaguucggcaccaugcccagccugacccuggccugccugaccaagcagggccagguggaccugaacgacgccgugcuggcccugaccgaccugggccugaucuacaccgccaaguaccccaacagcagcgaccuggacagacugagccagagccaccccauccugaacaugguggacaccaagaagagcagccugaacaucagcggcuacaacuucagccugggcgccgccgugaaggccggcgccugcaugcuggacggcggcaacaugcuggagaccaucaaggugaccccccagaccauggacggcauccugaagagcauccugaaggugaagaagagccugggcauguucgugagcgacacccccggcgagagaaaccccuacgagaacauccuguacaagaucugccugagcggcgacggcuggcccuacaucgccagcagaaccagcaucgugggcagagccugggagaacaccaccguggaccuggagagcgacggcaagccccagaaggugggcagcgccggcagcaacaagagccugcagagcgccggcuuccccaccggccugaccuacagccagcugaugacccugaaggacagcaugaugcagcuggaccccagcgccaagaccuggaucgacaucgagggcagacccgaggaccccguggagaucgcccuguaccagcccaugagcggcugcuacauccacuucuucagagagcccaccgaccugaagcaguucaagcaggacgccaaguacagccacggcaucgacguggccgaccuguuccccgcccagcccggccugaccagcgccgugaucgaggcccugcccagaaacauggugcugaccugccagggcagcgacgacaucaagagacugcuggacagccagggcagaaaggacaucaagcugaucgacaucgcccugagcaaggccgacagcagaagauucgagaacgccgugugggaccagugcaaggaccugugccacaugcacaccggcguggugguggagaagaagaagagaggcggcaaggaggagaucaccccccacugcgcccugauggacugcaucauguacgacgccgccgugagcggcggccugaacauccccgugcugagagccgugcugcccagagacaugguguucagaaccagcagccccaagguggugcugugaggacuaguuauaagacugacuagcccgaugggccucccaacgggcccuccuccccuccuugcaccgagauuaauaaaaaaaaaaaaaaaaaaaaaaaaaaaaaaaaaaaaaaaaaaaaaaaaaaaaaaaaaaaaaaaaaaaaaaaaaaaaaaaaaaaaaaaaaaaaaaaaaaaa

SEQ ID NO: 19271 - RNA, 1962 nt, Artificial Sequence
  mRNA product Design i-3 (A100) comprising derived and/or modified sequence from LASV(Lassa virus/H.sapiens-wt/NGA/2016/ISTH_0009;Clade II)__AVO03572__SP-HsPLAT_NP(2-569) (opt4)
aggagaaagcuuaccauggacgccaugaagagaggccugugcugcgugcugcugcugugcggcgccguguucgugagccccagcgccagcaaggaggugaagagcuuccuguggacccagagccugagaagagagcugagcggcuacugcagcaacaucaagcugcagguggugaaggacgcccaggcccugcugcacggccuggacuucagcgaggugagcaacgugcagagacugaugagaaagcagaagagagacgacagcgaccugaagagacugagagaccugaaccaggccgugaacaaccugguggagcugaagagcacccagcagaagagcauccugagagugggcacccugaccagcgacgaccugcugacccuggccgccgaccuggagaagcugaagagcaaggugaucagaaccgagagaccccugagcagcggcguguacaugggcaaccugagcacccagcagcuggagcagagaagagcccugcugaacaugaucggcauggugggcggcgcccagggcacccagcccggcagagacggcguggugagagugugggacgugaagaaccccgaccugcugaacaaccaguucggcaccaugcccagccugacccuggccugccugaccaagcagggccagguggaccugaacgacgccgugcuggcccugaccgaccugggccugaucuacaccgccaaguaccccaacagcagcgaccuggacagacugagccagagccaccccauccugaacaugguggacaccaagaagagcagccugaacaucagcggcuacaacuucagccugggcgccgccgugaaggccggcgccugcaugcuggacggcggcaacaugcuggagaccaucaaggugaccccccagaccauggacggcauccugaagagcauccugaaggugaagaagagccugggcauguucgugagcgacacccccggcgagagaaaccccuacgagaacauccuguacaagaucugccugagcggcgacggcuggcccuacaucgccagcagaaccagcaucgugggcagagccugggagaacaccaccguggaccuggagagcgacggcaagccccagaaggugggcagcgccggcagcaacaagagccugcagagcgccggcuuccccaccggccugaccuacagccagcugaugacccugaaggacagcaugaugcagcuggaccccagcgccaagaccuggaucgacaucgagggcagacccgaggaccccguggagaucgcccuguaccagcccaugagcggcugcuacauccacuucuucagagagcccaccgaccugaagcaguucaagcaggacgccaaguacagccacggcaucgacguggccgaccuguuccccgcccagcccggccugaccagcgccgugaucgaggcccugcccagaaacauggugcugaccugccagggcagcgacgacaucaagagacugcuggacagccagggcagaagagacaucaagcugaucgacaucgcccugagcaaggccgacagcagaagauucgagaacgccgugugggaccagugcaaggaccugugccacaugcacaccggcguggugguggagaagaagaagagaggcggcaaggaggagaucaccccccacugcgcccugauggacugcaucauguacgacgccgccgugagcggcggccugaacauccccgugcugagagccgugcugcccagagacaugguguucagaaccagcagccccaagguggugcugugaggacuaguuauaagacugacuagcccgaugggccucccaacgggcccuccuccccuccuugcaccgagauuaauaaaaaaaaaaaaaaaaaaaaaaaaaaaaaaaaaaaaaaaaaaaaaaaaaaaaaaaaaaaaaaaaaaaaaaaaaaaaaaaaaaaaaaaaaaaaaaaaaaaa

SEQ ID NO: 19272 - RNA, 1962 nt, Artificial Sequence
  mRNA product Design i-3 (A100) comprising derived and/or modified sequence from LASV(Lassa virus/H.sapiens-wt/NGA/2016/ISTH_0017;Clade II)__AVO03568__SP-HsPLAT_NP(2-569) (opt4)
aggagaaagcuuaccauggacgccaugaagagaggccugugcugcgugcugcugcugugcggcgccguguucgugagccccagcgccagcaaggaggugaagagcuuccuguggacccagagccugagaagagagcugagcggcuacugcagcagcaucaagcugcagguggugaaggacgcccaggcccugcugcacggccuggacuucagcgaggugagcaacgugcagagacugaugagaaagcagaagagagacgacagcgaccugaagagacugagagaccugaaccaggccgugaacaaccugguggagcugaagagcacccagcagaagagcauccugagagugggcacccugaccagcgacgaccugcugacccuggccgccgaccuggagaagcugaagagcaaggugaucagaaccgagagaccccugagcagcggcguguacaugggcaaccugagcacccagcagcuggagcagagaagagcccugcugaacaugaucggcauggccggcggcgcccagggcacccagcccggcagagacggcguggugagagugugggacgugaagaaccccgaccugcugaacaaccaguucggcaccaugcccagccugacccuggccugccugaccaagcagggccagguggaccugaacgacgccgugcuggcccugaccgaccugggccugaucuacaccgccaaguaccccaacagcagcgaccuggacagacugagccagagccaccccauccugaacaugguggacaccaagaagagcagccugaacaucagcggcuacaacuucagccugggcgccgccgugaaggccggcgccugcaugcuggacggcggcaacaugcuggagaccaucaaggugaccccccagaccauggacggcauccugaagagcauccugaaggugaagagaagccugggcauguucgugagcgacgcccccggcgagagaaaccccuacgagaacauccuguacaagaucugccugagcggcgacggcuggcccuacaucgccagcagaaccagcaucgugggcagagccugggagaacaccaccguggaccuggagagcgacggcaagccccagaaggugggcgccaccggcagcaacaagagccugcagagcgccggcuuccccaccggccugaccuacagccagcugaugacccugaaggacagcaugaugcagcuggaccccagcgccaagaccuggaucgacaucgagggcagacccgaggaccccguggagguggcccuguaccagcccgugagcggcugcuacauccacuucuucagagagcccaccgaccugaagcaguucaagcaggacgccaaguacagccacggcaucgacguggccgaccuguuccccgcccagcccggccugaccagcgccgugaucgaggcccugcccagaaacauggugcugaccugccagggcagcgacgacaucaagaagcugcuggacagccagggcagaaaggacaucaagcugaucgacaucgcccugagcaaggccgacagcagaagauucgagaacgccgugugggaccagugcaaggaccugugccacaugcacaccggcguggugguggagaagaagaagagaggcggcaaggaggagaucaccccccacugcgcccugauggacugcaucauguacgacgccgccgugagcggcggccugaacauccccgugcugagagccgugcugcccagagacaugguguucagaaccagcagccccaagguggugcugugaggacuaguuauaagacugacuagcccgaugggccucccaacgggcccuccuccccuccuugcaccgagauuaauaaaaaaaaaaaaaaaaaaaaaaaaaaaaaaaaaaaaaaaaaaaaaaaaaaaaaaaaaaaaaaaaaaaaaaaaaaaaaaaaaaaaaaaaaaaaaaaaaaaa

SEQ ID NO: 19273 - RNA, 1962 nt, Artificial Sequence
  mRNA product Design i-3 (A100) comprising derived and/or modified sequence from LASV(Lassa virus/H.sapiens-wt/NGA/2018/ISTH_0959;Clade II)__AVV65100__SP-HsPLAT_NP(2-569) (opt4)
aggagaaagcuuaccauggacgccaugaagagaggccugugcugcgugcugcugcugugcggcgccguguucgugagccccagcgccagcaaggaggugaagagcuuccuguggacccagagccugagaagagagcugagcggcuacugcagcaacaucaagcugcagguggugaaggacgcccaggcccugcugcacggccuggacuucagcgaggugagcaacgugcagagacugaugagaaagcagaagagagacgacagcgaccugaagagacugagagaccugaaccaggccgugaacaaccugguggagcugaagagcacccagcagaagagcauccugagagugggcacccugaccagcgacgaccugcugacccuggccgccgaccuggagaagcugaagagcaaggugaucagaaccgagagaccccugagcagcggcguguacaugggcaaccugagcacccagcagcuggagcagagaagagcccugcugaaccugaucggcauggugggcggcgcccagggcacccagcccggcagagacggcguggugagagugugggacgugaagaaccccgaccugcugaacaaccaguucggcaccaugcccagccugacccuggccugccugaccaagcagggccagguggaccugaacgacguggugcuggcccugaccgaccugggccugaucuacaccgccaaguaccccaacagcagcgaccuggacagacugagccagagccaccccauccugaacaugguggacaccaagaagagcagccugaacaucagcggcuucaacuucagccugggcgccgccgugaaggccggcgccugcaugcuggacggcggcaacaugcuggagaccaucaaggugaccccccagaccauggacggcauccugaagagcauccugaaggugaagaagagccugggcauguucgugagcgacacccccggcgagagaaaccccuacgagaacauccuguacaagaucugccugagcggcgacggcuggcccuacaucgccagcagaaccagcaucgugggcagagccugggagaacaccaccguggaccuggagagcgacggcaagccccacaaggugggcaccgccggcagcaacaagagccugcagagcgccggcuuccccaccggccugaccuacagccagcugaugacccugaaggacagcaugaugcagcuggaccccagcgccaagaccuggaucgacaucgagggcagacccgaggaccccguggagaucgcccuguaccagcccaugagcggcugcuacauccacuucuucagagagcccaccgaccugaagcaguucaagcaggacgccaaguacagccacggcaucgacguggccgaccuguuccccgcccagcccggccugaccagcgccgugaucgaggcccugcccagaaacauggugcugaccugccagggcagcgacgacaucaagagacugcuggacagccagggcagaaaggacaucaagcugaucgacaucgcccugagcaagaccgacagcagaagauucgagaacgccgugugggaccagugcaaggaccugugccacaugcacaccggcguggugguggagaagaagaagagaggcggcaaggaggagaucaccccccacugcgcccugauggacugcaucauguacgacgccgccgugagcggcggccugaacauccccgugcugagagccgugcugcccagagacaugguguucagaaccagcagccccaagguggugcugugaggacuaguuauaagacugacuagcccgaugggccucccaacgggcccuccuccccuccuugcaccgagauuaauaaaaaaaaaaaaaaaaaaaaaaaaaaaaaaaaaaaaaaaaaaaaaaaaaaaaaaaaaaaaaaaaaaaaaaaaaaaaaaaaaaaaaaaaaaaaaaaaaaaa

SEQ ID NO: 19274 - RNA, 1962 nt, Artificial Sequence
  mRNA product Design i-3 (A100) comprising derived and/or modified sequence from LASV(LASV003-NIG-2008;Clade II)__AIT17581__SP-HsPLAT_NP(2-569) (opt4)
aggagaaagcuuaccauggacgccaugaagagaggccugugcugcgugcugcugcugugcggcgccguguucgugagccccagcgccagcaaggaggugaagagcuuccuguggacccagagccugagaagagagcugagcggcuacugcagcagcaucaagcugcagguggugaaggacgcccaggcccugcugcacggccuggacuucagcgaggugagcaacgugcagagacugaugagaaagcagaagagagacgacagcgaccugaagagacugagagaccugaaccaggccgugaacaaccugguggagcugaagagcacccagcagaagagcgugcugagagugggcacccugaccagcgacgaccugcugacccuggccgccgaccuggagaagcugaagagcaaggugaucagaaccgagagaccccugagcagcggcguguacaugggcaaccugagcgcccagcagcuggagcagagaagaacccugcugaacaugaucggcauggugggcggcgcccagggcacccagcccggcagagacggcguggugagagugugggacgugaagaaccccgaccugcugaacaaccaguucggcaccaugcccagccugacccuggccugccugaccaagcagggccagguggaccugaacgacguggugcuggcccugaccgaccugggccugaucuacaccgccaaguaccccaacagcagcgaccuggacagacugagccagagccaccccauccugagcaugguggacaccaagaagagcagccugaacaucagcggcuacaacuucagccugggcgccgccgugaaggccggcgccugcaugcuggacggcggcaacaugcuggagaccaucaaggugaccccccagaccauggacggcauccugaagagcauccugaaggugaagaagagccugggcauguucgugagcgacacccccggcgagagaaaccccuacgagaacauccuguacaagaucugccugagcggcgacggcuggcccuacaucgccagcagaaccagcaucgugggcagagccugggagaacaccaccguggaccuggagagcgacggcaagccccagaaggugggcaccgccggcagcaacaagagccugcagagcgccggcuuccccaccggccugaccuacagccagcugaugacccugaaggacagcaugaugcagcuggaccccagcgccaagaccuggaucgacaucgagggcagacccgaggaccccguggagaucgcccuguaccagcccaugagcggcugcuacauccacuucuucagagagcccaccgaccugaagcaguucaagcaggacgccaaguacagccacggcaucgacgugaccgaccuguuccccgcccagcccggccugaccagcgccgugaucgaggcccugcccagaaacauggugcugaccugccagggcagcgacgacaucaagagacugcuggacagccagggcagaagagacaucaagcugaucgacaucgcccugagcaaggccgacagcagaagauucgagaacgccgugugggaccagugcaaggaccugugccacaugcacaccggcguggugguggagaagaagaagagaggcggcaaggaggagaucaccccccacugcgcccugauggacugcaucauguacgacgccgccgugagcggcggccugaacauccccgugcugagagccgugcugcccagagacaugguguucagaaccagcagccccaagguggugcugugaggacuaguuauaagacugacuagcccgaugggccucccaacgggcccuccuccccuccuugcaccgagauuaauaaaaaaaaaaaaaaaaaaaaaaaaaaaaaaaaaaaaaaaaaaaaaaaaaaaaaaaaaaaaaaaaaaaaaaaaaaaaaaaaaaaaaaaaaaaaaaaaaaaa

SEQ ID NO: 19275 - RNA, 1962 nt, Artificial Sequence
  mRNA product Design i-3 (A100) comprising derived and/or modified sequence from LASV(LASV035-NIG-2009;Clade II)__AIT17589__SP-HsPLAT_NP(2-569) (opt4)
aggagaaagcuuaccauggacgccaugaagagaggccugugcugcgugcugcugcugugcggcgccguguucgugagccccagcgccagcaaggaggugaagagcuuccuguggacccagagccugagaagagagcugagcggcuacugcagcagcaucaagcugcagguggugaaggacgcccaggcccugcugcacggccuggacuucagcgaggugagcaacgugcagagacugaugagaaagcagaagagagacgacagcgaccugaagagacugagagaccugaaccaggccgugaacaaccugguggagcugaagagcacccagcagaagagcauccugagagugggcacccugaccagcgacgaccugcugacccuggccgccgaccuggagaagcugaagagcaaggugaucagaaccgagagaccccugagcagcggcguguacaugggcaaccugagcgcccagcagcuggagcagagaagagcccugcugaacaugaucggcauggugggcggcgcccagggcacccagcccggcagagacggcguggugagagugugggacgugaagaaccccgaccugcugaacaaccaguucggcaccaugcccagccugacccuggccugccugaccaagcagggccagguggaccugaacgacgccgugcuggcccugaccgaccugggccugaucuacaccgccaaguaccccaacagcagcgaccuggacagacugagccagagccaccccauccugaacaugguggacaccaagaagagcagccugaacaucagcggcuacaacuucagccugggcgccgccgugaaggccggcgccugcaugcuggacggcggcaacaugcuggagaccaucaaggugaccccccagaccauggacggcauccugaagagcauccugaaggugaagagaagccugggcauguucgugagcgacacccccggcgagagaaaccccuacgagaacauccuguacaagaucugccugagcggcgacggcuggcccuacaucgccagcagaaccagcaucgugggcagagccugggagaacaccaccguggaccuggagagcgacggcaagccccagaaggugggcaccaccggcagcaacaagagccugcagagcgccggcuuccccaccggccugaccuacagccagcugaugacccugaaggacagcaugaugcagcuggaccccagcgccaagaccuggaucgacaucgagggcagacccgaggaccccguggagaucgcccuguaccagcccaugagcggcugcuacauccacuucuucagagagcccaccgaccugaagcaguucaagcaggacgccaaguacagccacggcaucgacguggccgaccuguuccccgcccagcccggccugaccagcgccgugaucgaggcccugcccagaaacauggugcugaccugccagggcagcgacgacaucaagaagcugcuggacagccagggcagaagagacaucaagcugaucgacaucgcccugagcaaggccgacagcagaaaguucgagaacgccgugugggaccagugcaaggaccugugccacaugcacaccggcguggugguggagaagaagaagagaggcggcaaggaggagaucaccccccacugcgcccugauggacugcaucauguacgacgccgccgugagcggcggccugaacauccccgugcugagagccgugcugcccagagacaugguguucagaaccagcagccccaagguggugcugugaggacuaguuauaagacugacuagcccgaugggccucccaacgggcccuccuccccuccuugcaccgagauuaauaaaaaaaaaaaaaaaaaaaaaaaaaaaaaaaaaaaaaaaaaaaaaaaaaaaaaaaaaaaaaaaaaaaaaaaaaaaaaaaaaaaaaaaaaaaaaaaaaaaa

SEQ ID NO: 19276 - RNA, 1962 nt, Artificial Sequence
  mRNA product Design i-3 (A100) comprising derived and/or modified sequence from LASV(LASV1000-NIG-2009;Clade II)__AIT17783__SP-HsPLAT_NP(2-569) (opt4)
aggagaaagcuuaccauggacgccaugaagagaggccugugcugcgugcugcugcugugcggcgccguguucgugagccccagcgccagcaaggaggugaagagcuuccuguggacccagagccugagaagagagcugagcggcuacugcagcaacaucaagcugcagguggugaaggacgcccaggcccugcugcacggccuggacuucagcgaggugagcaacgugcagagacugaugagaaagcagaagagagacgacagcgaccugaagagacugagagaccugaaccaggccgugaacaaccugguggagcugaagagcacccagcagaagagcauccugagagugggcacccugaccagcgacgaccugcugacccuggccgccgaccuggagaagcugaagagcaaggugaucagaaccgagagaccccugagcagcggcguguacaugggcaaccugagcacccagcagcuggagcagagaagagcccugcugaacaugaucggcauggugggcggcgcccagggcacccagcccggcagagacggcguggugagagugugggacgugaagaaccccgaccugcugaacaaccaguucggcaccaugcccagccugacccuggccugccugaccaagcagggccagguggaccugaacgacguggugcuggcccugaccgaccugggccugaucuacaccgccaaguaccccaacagcagcgaccuggacagacugagccagagccaccccauccugaacaugguggacaccaagaagagcagccugaacaucagcggcuacaacuucagccugggcgccgccgugaaggccggcgccugcaugcuggacggcggcaacaugcuggagaccaucaaggugaccccccagaccauggacggcauccugaagagcauccugaaggugaagaagagccugggcauguucgugagcgacacccccggcgagagaaaccccuacgagaacauccuguacaagaucugccugagcggcgacggcuggcccuacaucgccagcagaaccagcaucgugggcagagccugggagaacaccaccguggaccuggagagcgacggcaagccccagaaggugggcaccgccggcagcaacaagagccugcagagcgccggcuuccccaccggccugaccuacagccagcugaugacccugaaggacagcaugaugcagcuggaccccagcgccaagaccuggaucgacaucgagggcagacccgaggaccccguggagaucgcccuguaccagcccgugagcggcugcuacauccacuucuucagagagcccaccgaccugaagcaguucaagcaggacgccaaguacagccacggcaucgacguggccgaccuguuccccgcccagcccggccugaccagcgccgugaucgaggcccugcccagaaacauggugcugaccugccagggcagcgacgacaucaagagacugcuggacagccagggcagaagagacaucaagcugaucgacaucgcccugagcaaggccgacagcagaagauucgagaacgccgugugggaccagugcaaggaccugugccacaugcacaccggcguggugguggagaagaagaagagaggcggcaaggaggagaucaccccccacugcgcccugauggacugcaucauguacgacgccgccgugagcggcggccugaacauccccgugcugagagccgugcugcccagagacaugguguucagaaccagcagccccaagguggugcugugaggacuaguuauaagacugacuagcccgaugggccucccaacgggcccuccuccccuccuugcaccgagauuaauaaaaaaaaaaaaaaaaaaaaaaaaaaaaaaaaaaaaaaaaaaaaaaaaaaaaaaaaaaaaaaaaaaaaaaaaaaaaaaaaaaaaaaaaaaaaaaaaaaaa

SEQ ID NO: 19277 - RNA, 1962 nt, Artificial Sequence
  mRNA product Design i-3 (A100) comprising derived and/or modified sequence from LASV(LASV221-NIG-2010;Clade II)__AIT17625__SP-HsPLAT_NP(2-569) (opt4)
aggagaaagcuuaccauggacgccaugaagagaggccugugcugcgugcugcugcugugcggcgccguguucgugagccccagcgccagcaaggaggugaagagcuuccuguggacccagagccugagaagagagcugagcggcuacugcagcagcaucaagcugcagguggugaaggacgcccaggcccugcugcacggccuggacuucagcgaggugagcaacgugcagagacugaugagaaagcagagaagagacgacagcgaccugaagagacugagagaccugaaccaggccgugaacaaccugguggagcugaagagcacccagcagaagagcauccugagagugggcacccugaccagcgacgaccugcugacccuggccgccgaccuggagaagcugaagagcaaggugaucagaaccgagagaccccugagcagcggcguguacaugggcaaccugagcacccagcagcuggagcagagaagagcccugcugaacaugaucggcauggugggcggcgcccagggcacccagcccggcagagacggcguggugagagugugggacgugaagaaccccgaccugcugaacaaccaguucggcaccaugcccagccugacccuggccugccugaccaagcagggccagguggaccugaacgacgccgugcuggcccugaccgaccugggccugaucuacaccgccaaguaccccaacagcagcgaccuggacagacugagccagagccaccccauccugaacaugguggacaccaagaagagcagccugaacaucagcggcuacaacuucagccugggcgccgccgugaaggccggcgccugcaugcuggacggcggcaacaugcuggagaccaucaaggugaccccccagaccguggacggcauccugaagagcauccugaaggugaagagaagccugggcauguucgugagcgacacccccggcgagagaaaccccuacgagaacauccuguacaagaucugccugagcggcgacggcuggcccuacaucgccagcagaaccagcaucgugggcagagccugggagaacaccaccguggaccuggagagcgacggcaagccccagaaggugggcaccgccggcagcaacaagagccugcagagcgccggcuuccccaccggccugaccuacagccagcugaugacccugaaggacagcaugaugcagcuggaccccagcgccaagaccuggaucgacaucgagggcagacccgaggaccccguggagaucgcccuguaccagcccaugagcggcugcuacauccacuucuucagagagcccaccgaccugaagcaguucaagcaggacgccaaguacagccacggcaucgacguggccgaccuguuccccgcccagcccggccugaccagcgccgugaucgaggcccugcccagaaacauggugcugaccugccagggcagcgacgacaucaagagacugcuggacagccagggcagaagagacaucaagcugaucgacaucgcccugagcaaggccgacagcagaaaguucgagaacgccgugugggaccagugcaaggaccugugccacaugcacaccggcguggugguggagaagaagaagagaggcggcaaggaggagaucaccccccacugcgcccugauggacugcaucauguacgacgccgccgugagcggcggccugaacauccccgugcugagagccgugcugcccagagacaugguguucagaaccagcagccccaagguggugcugugaggacuaguuauaagacugacuagcccgaugggccucccaacgggcccuccuccccuccuugcaccgagauuaauaaaaaaaaaaaaaaaaaaaaaaaaaaaaaaaaaaaaaaaaaaaaaaaaaaaaaaaaaaaaaaaaaaaaaaaaaaaaaaaaaaaaaaaaaaaaaaaaaaaa

SEQ ID NO: 19278 - RNA, 1962 nt, Artificial Sequence
  mRNA product Design i-3 (A100) comprising derived and/or modified sequence from LASV(LASV237-NIG-2010;Clade II)__AIT17639__SP-HsPLAT_NP(2-569) (opt4)
aggagaaagcuuaccauggacgccaugaagagaggccugugcugcgugcugcugcugugcggcgccguguucgugagccccagcgccagcaaggaggugaagagcuuccuguggacccagagccugagaagagagcugagcggcuacugcagcaacaucaagcugcagguggugaaggacgcccaggcccugcugcacggccuggacuucagcgaggugagcaacgugcagagacugaugagaaagcagaagagagacgacagcgaccugaagagacugagagaccugaaccaggccgugaacaaccugguggagcugaagagcacccagcagaagagcauccugagagugggcacccugaccagcgacgaccugcugacccuggccgccgaccuggagaagcugaagagcaaggugaucagaaccgagagaccccugagcagcggcguguacaugggcaaccugagcacccagcagcuggagcagagaagagcccugcugaacaugaucggcauggugggcggcgcccagggcacccagcccggcagagacggcguggugagagugugggacgugaagaaccccgaccugcugaacaaccaguucggcaccaugcccagccugacccuggccugccugaccaagcagggccagguggaccugaacgacgccgugcuggcccugaccgaccugggccugaucuacaccgccaaguaccccaacagcagcgaccuggacagacugagccagagccaccccauccugaacaugguggacaucaagaagagcagccugaacaucagcggcuacaacuucagccugggcgccgccgugaaggccggcgccugcaugcuggacggcggcaacaugcuggagaccaucaaggugaccccccagaccauggacggcauccugaagagcauccugaaggugaagagaagccugggcauguucgugagcgacacccccggcgagagaaaccccuacgagaacauccuguacaagaucugccugagcggcgacggcuggcccuacaucgccagcagaaccagcaucgugggcagagccugggagaacaccaccguggaccuggagagcgacggcaagccccagaaggugggcagcgccggcagcaacaagagccugcagagcgccggcuuccccaccggccugaccuacagccagcugaugacccugaaggacagcaugaugcagcuggaccccagcgccaagaccuggaucgacaucgagggcagacccgaggaccccguggagaucgcccuguaccagcccaugagcggcugcuacauccacuucuucagagagcccaccgaccugaagcaguucaagcaggacgccaaguacagccacggcaucgacguggccgaccuguuccccgcccagcccggccugaccagcgccgugaucgaggcccugcccagaaacauggugcugaccugccagggcagcgacgacaucaagagacugcuggacagccagggcagaagagacaucaagcugaucgacaucgcccugagcaaggccgacagcagaagauucgagaacgccgugugggaccagugcaaggaccugugccacaugcacaccggcguggugguggagaagaagaagagaggcggcaaggaggagaucaccccccacugcgcccugauggacugcaucauguacgacgccgccgugagcggcggccugaacauccccgugcugagagccgugcugcccagagacaugguguucagaaccagcagccccaagguggugcugugaggacuaguuauaagacugacuagcccgaugggccucccaacgggcccuccuccccuccuugcaccgagauuaauaaaaaaaaaaaaaaaaaaaaaaaaaaaaaaaaaaaaaaaaaaaaaaaaaaaaaaaaaaaaaaaaaaaaaaaaaaaaaaaaaaaaaaaaaaaaaaaaaaaa

SEQ ID NO: 19279 - RNA, 1962 nt, Artificial Sequence
  mRNA product Design i-3 (A100) comprising derived and/or modified sequence from LASV(LASV253-NIG-2011;Clade II)__AIT17671__SP-HsPLAT_NP(2-569) (opt4)
aggagaaagcuuaccauggacgccaugaagagaggccugugcugcgugcugcugcugugcggcgccguguucgugagccccagcgccagcaaggaggugaagagcuuccuguggacccagagccugagaagagagcugagcggcuacugcagcagcaucaagcugcagguggugaaggacgcccaggcccugcugcacggccuggacuucagcgaggugagcaacgugcagagacugaugagaaagcagaagagagacgacagcgaccugaagagacugagagaccugaaccaggccgugaacaaccugguggagcugaagagcacccagcagaagagcgugcugagagugggcacccugaccagcgacgaccugcugacccuggccgccgaccuggagaagcugaagagcaaggugaucagaaccgagagaccccugagcagcggcguguacaugggcaaccugagcacccagcagcuggagcagagaagagcccugcugaacaugaucggcauggugggcggcgcccagggcacccagcccggcagagacggcguggugagagugugggacgugaagaaccccgaccugcugaacaaccaguucggcaccaugcccagccugacccuggccugccugaccaagcagggccagguggaccugaacgacguggugcuggcccugaccgaccugggccugaucuacaccgccaaguaccccaacagcagcgaccuggacagacugagccagagccaccccauccugaacaugguggacaccaagaagagcagccugaacaucagcggcuacaacuucagccugggcgccgccgugaaggccggcgccugcaugcuggacggcggcaacaugcuggagaccaucaaggugaccccccagaccauggacggcauccugaagagcauccugaaggugaagaagagccugggcauguucgugagcgacacccccggcgagagaaaccccuacgagaacauccuguacaagaucugccugagcggcgacggcuggcccuacaucgccagcagaaccagcaucgugggcagagccugggagaacaccaccguggaccuggagagcgacggcaagccccagaaggugggcaccgccggcagcaacaagagccugcagagcgccggcuuccccaccggccugaccuacagccagcugaugacccugaaggacagcaugaugcagcuggaccccagcgccaagaccuggaucgacaucgagggcagacccgaggaccccguggagaucgcccuguaccagcccaugagcggcugcuacauccacuucuucagagagcccaccgaccugaagcaguucaagcaggacgccaaguacagccacggcaucgacgugaccgaccuguuccccgcccagcccggccugaccagcgccgugaucgaggcccugcccagaaacauggugcugaccugccagggcagcgacgacaucaagagacugcuggacagccagggcagaagagacaucaagcugaucgacaucgcccugagcaaggccgacagcagaagauucgagaacgccgugugggaccagugcaaggaccugugccacaugcacaccggcguggugguggagaagaagaagagaggcggcaaggaggagaucaccccccacugcgcccugauggacugcaucauguacgacgccgccgugagcggcggccugaacauccccgugcugagagccgugcugcccagagacaugguguucagaaccagcagccccaagguggugcugugaggacuaguuauaagacugacuagcccgaugggccucccaacgggcccuccuccccuccuugcaccgagauuaauaaaaaaaaaaaaaaaaaaaaaaaaaaaaaaaaaaaaaaaaaaaaaaaaaaaaaaaaaaaaaaaaaaaaaaaaaaaaaaaaaaaaaaaaaaaaaaaaaaaa

SEQ ID NO: 19280 - RNA, 1962 nt, Artificial Sequence
  mRNA product Design i-3 (A100) comprising derived and/or modified sequence from LASV(LASV254-NIG-2011;Clade II)__AIT17675__SP-HsPLAT_NP(2-569) (opt4)
aggagaaagcuuaccauggacgccaugaagagaggccugugcugcgugcugcugcugugcggcgccguguucgugagccccagcgccagcaaggaggugaagagcuuccuguggacccagagccugagaagagagcugagcggcuacugcagcagcaucaagcugcagguggugaaggacgcccaggcccugcugcacggccuggacuucagcgaggugagcaacgugcagagacugaugagaaagcagaagagagacgacagcgaccugaagagacugagagaccugaaccaggccgugaacaaccugguggagcugaagagcacccagcagaagagcgugcugagagugggcacccugaccagcgacgaccugcugacccuggccgccgaccuggagaagcugaagagcaaggugaucagaaccgagagaccccugagcagcggcguguacaugggcaaccugagcacccagcagcuggagcagagaagagcccugcugaacaugaucggcauggugggcggcgcccagggcacccagcccggcagagacggcguggugagagugugggacgugaagaaccccgaccugcugaacaaccaguucggcaccaugcccagccugacccuggccugccugaccaagcagggccagguggaccugaacgacgccgugcuggcccugaccgaccugggccugaucuacaccgccaaguaccccaacagcagcgaccuggacagacugagccagagccaccccauccugaacaugguggacaccaagaagagcagccugaacaucagcggcuacaacuucagccugggcgccgccgugaaggccggcgccugcaugcuggacggcggcaacaugcuggagaccaucaaggugaccccccagaccauggacggcauccugaagagcauccugaaggugaagaagagccugggcauguucgugagcgacacccccggcgagagaaaccccuacgagaacauccuguacaagaucugccugagcggcgacggcuggcccuacaucgccagcagaaccagcaucgugggcagagccugggagaacaccaucguggaccuggagagcgacggcaagccccagaaggugggcaccgccggcagcaacaagagccugcagagcgccggcuuccccaccggccugaccuacagccagcugaugacccugaaggacagcaugaugcagcuggaccccagcgccaagaccuggaucgacaucgagggcagacccgaggaccccguggagaucgcccuguaccagcccaugagcggcugcuacauccacuucuucagagagcccaccgaccugaagcaguucaagcaggacgccaaguacagccacggcaucgacguggccgaccuguuccccgcccagcccggccugaccagcgccgugaucgaggcccugcccagaaacauggugcugaccugccagggcagcgacgacaucaagagacugcuggacagccagggcagaagagacaucaagcugaucgacaucgcccugagcaaggccgacagcagaagauucgagaacgccgugugggaccagugcaaggaccugugccacaugcacaccggcguggugguggagaagaagaagagaggcggcaaggaggagaucaccccccacugcgcccugauggacugcaucauguacgacgccgccgugagcggcggccugaacauccccgugcugagagccgugcugcccagagacaugguguucagaaccagcagccccaagguggugcugugaggacuaguuauaagacugacuagcccgaugggccucccaacgggcccuccuccccuccuugcaccgagauuaauaaaaaaaaaaaaaaaaaaaaaaaaaaaaaaaaaaaaaaaaaaaaaaaaaaaaaaaaaaaaaaaaaaaaaaaaaaaaaaaaaaaaaaaaaaaaaaaaaaaa

SEQ ID NO: 19281 - RNA, 1962 nt, Artificial Sequence
  mRNA product Design i-3 (A100) comprising derived and/or modified sequence from LASV(Nig08-04;Clade II)__ADU56611__SP-HsPLAT_NP(2-569) (opt4)
aggagaaagcuuaccauggacgccaugaagagaggccugugcugcgugcugcugcugugcggcgccguguucgugagccccagcgccagcaaggaggugaagagcuuccuguggacccagagccugagaagagagcugagcggcuacugcagcaacaucaagcugcagguggugaaggacgcccaggcccugcugcacggccuggacuucagcgaggugagcaacgugcagagacugaugagaaagcagaagagagacgacggcgaccugaagagacugagagaccugaaccaggccgugaacaaccugguggagcugaagagcacccagcagaagagcgugcugagagugggcacccugaccagcgacgaccugcugacccuggccgccgaccuggagaagcugaagagcaaggugaucagaaccgagagaccccugagcagcggcguguacaugggcaaccugagcacccagcagcuggagcagagaaaggcccugcugagcaugaucggcauggugggcggcgcccagggcacccagcccggcagagacggcguggugagagugugggacgugaagaaccccgaccugcugaacaaccaguucggcaccaugcccagccugacccuggccugccugaccaagcagggccagguggaccugaacgacgccgugcuggcccugaccgaccugggccugaucuacaccgccaaguaccccaacagcagcgaccuggacagacugagccagagccaccccauccugaacaugguggacaccaagaagagcagccugaacaucagcggcuacaacuucagccugggcgccgccgugaaggccggcgccugcaugcuggacggcggcaacaugcuggagaccaucaaggugaccccccagaccauggacggcauccugaagagcauccugaaggugaagagaagccugggcauguucgugagcgacacccccggcgagagaaaccccuacgagaacauccuguacaagaucugccugagcggcgacggcuggcccuacaucgccagcagaaccagcaucgugggcagagccugggagaacaccaccguggaccuggagagcgacggcaagccccagaaggugggcaccgccggcagcaacaagagccugcagagcgccggcuuccccaccggccugaccuacagccagcugaugacccugaaggacagcaugaugcagcuggaccccagcgccaagaccuggaucgacaucgagggcagacccgaggaccccguggagaucgcccuguaccagcccaugagcggcugcuacauccacuucuucagagagcccaccgaccugaagcaguucaagcaggacgccaaguacagccacggcaucgacgugaccgaccuguucagcgcccagcccggccugaccagcgccgugaucgaggcccugcccagaaacauggugcugaccugccagggcagcgacgacaucaagaagcugcuggacagccagggcagaagagacaucaagcugaucgacaucagccugaacaaggccgacagcagaagauucgagaacgccgugugggaccagugcaaggaccugugccacaugcacaccggcguggugguggagaagaagaagagaggcggcaaggaggagaucaccccccacugcgcccugauggacugcaucauguucgacgccgccgugagcggcggccugaacauccccauccugagagccgugcugcccagagacaugguguucagaaccagcagccccaagguggugcugugaggacuaguuauaagacugacuagcccgaugggccucccaacgggcccuccuccccuccuugcaccgagauuaauaaaaaaaaaaaaaaaaaaaaaaaaaaaaaaaaaaaaaaaaaaaaaaaaaaaaaaaaaaaaaaaaaaaaaaaaaaaaaaaaaaaaaaaaaaaaaaaaaaaa

SEQ ID NO: 19282 - RNA, 1965 nt, Artificial Sequence
  mRNA product Design i-3 (A100) comprising derived and/or modified sequence from LASV(GA391;Clade III)__AAA46284__SP-HsPLAT_NP(2-570) (opt4)
aggagaaagcuuaccauggacgccaugaagagaggccugugcugcgugcugcugcugugcggcgccguguucgugagccccagcgccagcaaggaggugagaagcugccuguggacccagagccugagaagagagcugagcggcuacugcagcaacaucaagcugcagguggugaaggacgcccaggcccugcugcacggccuggacuucagcgaggugagcaacgugcagagacugaugagaaagcagaagagagacgacggcgaccugaagagacugagagaccugaaccaggccgugaacaaccugguggagcugaagagcacccagcagaagagcgugcugagagugggcacccugagcagcgacgaccugcugauccuggccgccgaccuggagaagcugaagagcaaggugaccagaaccgagagaccccugagcagcggcguguacaugggcaaccugagcagccagcagcuggaccagagaagagcccugcugaacaugaucggcaugaccggcgugagcggcggcggcaagggcgccagcaacggcaucgugagagugugggacgugaagaacgccgagcugcugaacaaccaguucggcaccaugcccagccugacccuggccugccugaccaagcagggccagguggaccugaacgacgccgugcaggcccugaccgaccugggccugaucuacaccgccaaguaccccaacagcagcgaccuggacagacugagccagagccaccccauccugaacaugaucgacaccaagaagagcagccugaacaucagcggcuacaacuucagccugggcgccgccgugaaggccggcgccugcaugcuggacggcggcaacaugcuggagaccaucaaggugagcccccagaccauggacggcauccugaagagcauccugaaggugaagaagagccugggcauguucgugagcgacacccccggcgagagaaaccccuacgagaacauccuguacaagaucugccugagcggcgacggcuggagcuacaucgccagcagaaccagcaucgugggcagagccugggagaacaccgugguggaccuggagcaggacaacaagccccagaagaucggcaacggcggcagcaacaagagccugcagagcgccggcuucgccgccggccugaucuacagccagcugaugacccugaaggacuucaagugcuucaaccugauccccaacgccaagaccuggauggacaucgagggcagacccgaggaccccguggagaucgcccuguaccagcccagcagcggcugcuacgugcacuucuucagagagcccaccgaccugaagcaguucaagcaggacgccaaguacagccacggcagagacgugaccgaccuguucgccgcccagcccggccugaccagcgccgugaucgaggcccugcccagaaacauggugaucaccugccagggcagcgaggacaucagaaagcugcuggagagccagggcagaagagacaucaagcugaucgacaucacccugagcaaggccgacagcagaaaguucgagaacgccgugugggaccaguucaaggaccugugccacaugcacaccggcguggugguggagaagaagaagagaggcggcaaggaggagaucaccccccacugcgcccugauggacugcaucauguucgacgccgccgugagcggcggccuggacgccaaggugcugagaguggugcugcccagagacaugguguucagaaccagcacccccaagguggugcugugaggacuaguuauaagacugacuagcccgaugggccucccaacgggcccuccuccccuccuugcaccgagauuaauaaaaaaaaaaaaaaaaaaaaaaaaaaaaaaaaaaaaaaaaaaaaaaaaaaaaaaaaaaaaaaaaaaaaaaaaaaaaaaaaaaaaaaaaaaaaaaaaaaaa

SEQ ID NO: 19283 - RNA, 1962 nt, Artificial Sequence
  mRNA product Design i-3 (A100) comprising derived and/or modified sequence from LASV(Nig08-A19;Clade III)__ADU56619__SP-HsPLAT_NP(2-569) (opt4)
aggagaaagcuuaccauggacgccaugaagagaggccugugcugcgugcugcugcugugcggcgccguguucgugagccccagcgccagcaaggaggugaagagcuuccuguggacccagagccugagaagagagcugagcggcuacugcagcaacaucaagcugcagguggugaaggacgcccaggcccugcugcacggccuggacuucagcgaggugagcaacgugcagagacugaugagaaagcagaagagagacgacggcgaccugaagagacugagagaccugaaccaggccgugaacaaccugguggagcugaagagcacccagcagaagagcgugcugagagugggcacccugagcagcgacgaccugcuggugcuggccgccgaccuggagaagcugaagagcaagguggugagaaccgagagaccccugagcagcggcaucuacaugggcaaccugagcagccagcagcuggaccagagaaaggcccugcugaacaugaucggcaugaccggcggcaacggcggcagaaacaccaccagcgacggcaucgugagagugugggacgugaagaacgccgagcugcugaacaaccaguucggcaccaugcccagccugacccuggccugccugaccaagcagggccagguggaccugaacgacgccgugcaggcccugaccgaccugggccugaucuacaccgccaaguaccccaacagcagcgaccuggacagacuggcccagagccaccccauccugaacaugaucgacaccaagaagagcagccugaacaucagcggcuacaacuucagccugggcgccgccgugaaggccggcgccugcaugcuggacggcggcaacaugcuggagaccaucaaggugagcccccagaccauggacggcauccugaagagcauccugaaggugaagagaagccugggcauguucaucagcgacacccccggcgagagaaaccccuacgagaacauccuguacaagaucugccugagcggcgacggcuggcccuacaucgccagcagaaccagcaucgugggcagagccugggagaacaccgugguggaccuggagagcgacaacaagccccagaagaccggcaacggcggcagcaacaagagccugcagagcgccggcuucgccgccggccugaccuacagccagcugaugacccugaaggacagcaugcugcagcuggaccccaacgccaagaccuggauggacaucgagggcagacccgaggaccccguggagaucgcccuguaccagcccagcagcggcugcuacauccacuucuucagagagcccaccgaccugaagcaguucaagcaggacgccaaguacagccacggcaucgacgugaccgaccuguucgccgcccagcccggccugaccagcgccgugaucgaggcccugcccagaaacauggugaucaccugccagggcagcgaggacaucagaaagcugcuggagagccagggcagaagagacaucaagcugaucgacaucagccugagcaagguggacagcagaaaguucgagaacgccgugugggaccaguucaaggaccugugccacaugcacaccggcaucgugguggagaagaagaagagaggcggcaaggaggagaucaccccccacugcgcccugauggacugcaucauguucgacgccgccgugagcggcggcguggacgccaaggugcugagagccgugcugcccagagacaugguguucagaaccagcacccccaagguggugcugugaggacuaguuauaagacugacuagcccgaugggccucccaacgggcccuccuccccuccuugcaccgagauuaauaaaaaaaaaaaaaaaaaaaaaaaaaaaaaaaaaaaaaaaaaaaaaaaaaaaaaaaaaaaaaaaaaaaaaaaaaaaaaaaaaaaaaaaaaaaaaaaaaaaa

SEQ ID NO: 19284 - RNA, 1962 nt, Artificial Sequence
  mRNA product Design i-3 (A100) comprising derived and/or modified sequence from LASV(G1180-SLE-2010;Clade IV)__AIT17169__SP-HsPLAT_NP(2-569) (opt4)
aggagaaagcuuaccauggacgccaugaagagaggccugugcugcgugcugcugcugugcggcgccguguucgugagccccagcgccagcaaggagaucaagagcuuccuguggacccagagccugagaagagagcugagcggcuacugcagcaacaucaagcugcagguggugaaggacgcccaggcccugcugcacggccuggacuucagcgaggugagcaacgugcagagacugaugagaaaggagagaagagacgacaacgaccugaagagacugagagaccugaaccaggccgugaacaaccugguggagcugaagagcacccagcagaagagcauccugagagugggcacccugaccagcgacgaccugcugauccuggccgccgaccuggagaagcugaagagcaaggugaucagaaccgagagaccccugagcgccggcguguacaugggcaaccugagcagccagcagcuggaccagagaagagcccugcugagcaugaucggcaugagcagcggcaaccagagagcccaggccggcagagacggcguggugagagugugggacgugaagaacguggagcugcugaacaaccaguucggcaccaugcccagccugacccuggccugccugaccaagcagggccagguggaccugaacgacgccgugcaggcccugaccgaccugggccugaucuacaccgccaaguaccccaacaccagcgaccuggacagacugacccagagccaccccauccugaacaugaucgacaccaagaagagcagccugaacaucagcggcuacaacuucagccugggcgccgccgugaaggccggcgccugcaugcuggacggcggcaacaugcuggagaccaucaaggugagcccccagaccauggacggcauccugaagagcauccugaaggugaagaaggcccugggcauguucaucagcgacacccccggcgagagaaaccccuacgagaacauccuguacaagaucugccugagcggcgacggcuggcccuacaucgccagcagaaccagcaucaccggcagagccugggagaacaccgugguggaccuggagagcgacggcaagccccagaaggccggcagcaacaacagcaacaagagccugcagagcgugggcuucaccgccggccugaccuacagccagcugaugacccugaaggacgccaugcugcagcuggaccccaacgccaagaccuggauggacaucgagggcagacccgaggaccccguggagaucgcccuguaccagcccagcagcggcugcuacauccacuucuucagagagcccaccgaccugaagcaguucaagcaggacgccaaguacagccacggcaucgacgugaccgaccuguucgccgcccagcccggccugaccagcgccgugaucgacgcccugcccagaaacauggugaucaccugccagggcagcgacgacaucagaaagcugcuggagagccagggcagaaaggacaucaagcugaucgacaucgcccugagcaagaccgacagcagaaaguacgagaacgccgugugggaccaguacaaggaccugugccacaugcacaccggcguggugguggagaagaagaagagaggcggcaaggaggagaucaccccccacugcgcccugauggacugcaucauguucgacgccgccgugagcggcggccugaacaccagcgugcugagagccgugcugcccagagacaugguguucagaaccagcacccccagaguggugcugugaggacuaguuauaagacugacuagcccgaugggccucccaacgggcccuccuccccuccuugcaccgagauuaauaaaaaaaaaaaaaaaaaaaaaaaaaaaaaaaaaaaaaaaaaaaaaaaaaaaaaaaaaaaaaaaaaaaaaaaaaaaaaaaaaaaaaaaaaaaaaaaaaaaa

SEQ ID NO: 19285 - RNA, 1962 nt, Artificial Sequence
  mRNA product Design i-3 (A100) comprising derived and/or modified sequence from LASV(G1442-SLE-2011;Clade IV)__AIT17181__SP-HsPLAT_NP(2-569) (opt4)
aggagaaagcuuaccauggacgccaugaagagaggccugugcugcgugcugcugcugugcggcgccguguucgugagccccagcgccagcaaggaggugaagagcuuccuguggacccagagccugagaagagagcugagcggcuacugcagcaacaucaagcugcagguggugaaggacgcccaggcccugcugcacggccuggacuucagcgaggugagcaacgugcagagacugaugagaaagcagagaagagacgacaacgaccugaagagacugagagaccugaaccaggccgugaacaaccugguggagcugaagagcacccagcagaagagcgugcugagagugggcacccugaccagcgacgaccugcuggugcuggccgccgaccuggagaagcugaagagcaaggugaucagaaccgagagaccccugagcgccggcguguacaugggcaaccugagcagccagcagcuggaccagagaagagcccugcugaacaugaucggcaugagcggcggcauccagggcaccagaaccggcagagacggcguggugagagugugggacgugaagaacgccgaccugcugaacaaccaguucggcaccaugcccagccugacccuggccugccugaccaagcagggccagguggaccugaacgacguggugcaggcccugaccgaccugggccugaucuacaccgccaaguaccccaacgccagcgaccuggacagacugacccagagccaccccauccugaacaugaucgacaccaagaagagcagccugaacaucagcggcuacaacuucagccugggcgccgccgugaaggccggcgccugcaugcuggacggcggcaacaugcuggagaccaucaaggugagcccccagaccauggacggcauccugaagagcauccugaaggugaagaagacccugggcauguucaucagcgacacccccggcgagagaaaccccuacgagaacauccuguacaagaucugccugagcggcgacggcuggcccuacaucgccagcagaaccagcaucaccggcagagccugggagaacaccgugguggaccuggagagcgacggcaagccccagaaggccggcagcaacaacagcaacaagagccugcagagcgccggcuucgccgccggccugaccuacagccagcugaugacccugaaggacgccaugcugcagcuggaccccaacgccaagaccuggauggacaucgagggcagacccgaggaccccguggagaucgcccuguaccagcccagcagcggcugcuacauccacuucuucagagagcccaccgaccugaagcaguucaagcaggacgccaaguacagccacggcaucgacgugaccgaccuguucgccgcccagcccggccugaccagcgccgugaucgaggcccugcccagaaacauggugaucaccugccagggcagcgacgacaucaagaagcugcuggagagccagggcagaaaggacaucaagcugaucgacaucgcccugagcaagaccgacagcagaaaguacgagaacgccgugugggaccaguacaaggaccugugccacaugcacaccggcguggugguggagaagaagaagagaggcggcaaggaggagaucaccccccacugcgcccugauggacugcaucauguucgacgccgccgugagcggcggccugaacacccuggugcugagagccgugcugcccagagacaugguguucagaaccagcacccccagaguggugcugugaggacuaguuauaagacugacuagcccgaugggccucccaacgggcccuccuccccuccuugcaccgagauuaauaaaaaaaaaaaaaaaaaaaaaaaaaaaaaaaaaaaaaaaaaaaaaaaaaaaaaaaaaaaaaaaaaaaaaaaaaaaaaaaaaaaaaaaaaaaaaaaaaaaa

SEQ ID NO: 19286 - RNA, 1962 nt, Artificial Sequence
  mRNA product Design i-3 (A100) comprising derived and/or modified sequence from LASV(G3010-SLE-2013;Clade IV)__AIT17345__SP-HsPLAT_NP(2-569) (opt4)
aggagaaagcuuaccauggacgccaugaagagaggccugugcugcgugcugcugcugugcggcgccguguucgugagccccagcgccagcaaggagaucaagagcuuccuguggacccagagccugagaagagagcugagcggcuacugcagcaacaucaagcugcagguggugaaggacgcccaggcccugcugcacggccuggacuucagcgaggugagcaacgugcagagacugaugagaaaggagagaagagacgacaacgaccugaagagacugagagaccugaaccaggccgugaacaaccugguggagcugaagagcacccagcagaagagcauccugagagugggcacccugaccagcgacgaccugcugauccuggccgccgaccuggagaagcugaagagcaaggugaccagaaccgagagaccccugagcgccggcguguacaugggcaaccugagcagccagcagcuggaccagagaagagcccugcugagcaugaucggcaugagcagcggcgugcagggcgccagagccggcagagacggcguggugagagugugggacgugaagaacgccgagcugcugaacaaccaguucggcaccaugcccagccugacccuggccugccugaccaagcagggccagguggaccugaacgacguggugcaggcccugaccgaccugggccugaucuacaccgccaaguaccccaacaccagcgaccuggacagacugacccagagccaccccauccugaacaugaucgacaccaagaagagcagccugaacaucagcggcuacaacuucagccugggcgccgccgugaaggccggcgccugcaugcuggacggcggcaacaugcuggagaccaucaaggugagcccccagaccauggacggcauccugaagagcauccugaaggugaagaaggcccugggcauguucaucagcgagacccccggcgagagaaaccccuacgagaacauccuguacaagaucugccugagcggcgacggcuggcccuacaucgccagcagaaccagcaucaccggcagagccugggagaacaccgugguggaccuggagagcgacggcaagccccagaaggccggcagcaacaacagcaacaagagccugcagagcgccggcuucaccgccggccugaccuacagccagcugaugacccugaaggacgccaugcugcagcuggaccccaacgccaagaccuggauggacaucgagggcagacccgaggaccccguggagguggcccuguaccagcccagcagcggcugcuacauccacuucuucagagagcccaccgaccugaagcaguucaagcaggacgccaaguacagccacggcaucgacgugaccgaccuguucgccgcccagcccggccugaccagcgccgugaucgacgcccugcccagaaacauggugaucaccugccagggcagcgacgacaucaagaagcugcuggagagccagggcagaaaggacaucaagcugaucgacaucgcccugagcaagaccgacagcagaaaguacgagaacgccgugugggaccaguacaaggaccugugccacaugcacaccggcguggugguggagaagaagaagagaggcggcaaggaggagaucaccccccacugcgcccugauggacugcaucauguucgacgccgccgugagcggcggccugaacaccagcgugcugagagccgugcugcccagagacaugguguucagaaccagcacccccagaguggugcugugaggacuaguuauaagacugacuagcccgaugggccucccaacgggcccuccuccccuccuugcaccgagauuaauaaaaaaaaaaaaaaaaaaaaaaaaaaaaaaaaaaaaaaaaaaaaaaaaaaaaaaaaaaaaaaaaaaaaaaaaaaaaaaaaaaaaaaaaaaaaaaaaaaaa

SEQ ID NO: 19287 - RNA, 1962 nt, Artificial Sequence
  mRNA product Design i-3 (A100) comprising derived and/or modified sequence from LASV(G502-SLE-2009;Clade IV)__AIT17127__SP-HsPLAT_NP(2-569) (opt4)
aggagaaagcuuaccauggacgccaugaagagaggccugugcugcgugcugcugcugugcggcgccguguucgugagccccagcgccagcaaggagaucaagagcuuccuguggacccagagccugagaagagagcugagcggcuacugcagcaacaucaagcugcagguggugaaggacgcccaggcccugcugcacggccuggacuucagcgaggugagcaacgugcagagacugaugagaaaggagagaagagacgacaacgaccugaagagacugagagaccugaaccaggccgugaacaaccugguggagcugaagagcacccagcagaagagcauccugagagugggcacccugaccagcgacgaccugcugauccuggccgccgaccuggagaagcugaagagcaaggugaucagaaccgagagaccccugagcgccggcguguacaugggcaaccugagcagccagcagcuggaccagagaagagcccugcugagcaugaucggcaugagcggcggcaaccagggcgugagagccggcaaggacggcguggugagagugugggacgugaagaacgccgagcugcugaacaaccaguucggcaccaugcccagccugacccuggccugccugaccaagcagggccagguggaccugaacgacgccgugcaggcccugaccgaccugggccugaucuacaccgccaaguaccccaacaccagcgaccuggacagacugacccagagccaccccauccugaacaugaucgacaccaagaagagcagccugaacaucagcggcuacaacuucagccugggcgccgccgugaaggccggcgccugcaugcuggacggcggcaacaugcuggagaccaucaaggugagcccccagaccauggacggcauccugaagagcauccugaaggugaagaaggcccugggcauguucaucagcgacacccccggcgagagaaaccccuacgagaacauccuguacaagaucugccugagcggcgacggcuggcccuacaucgccagcagaaccagcaucaccggcagagccugggagaacaccgugguggaccuggagagcgacggcaagccccagaaggccggcagcaacaacagcaacaagagccugcagagcgccggcuucaccgccggccugaccuacagccagcugaugacccugaaggacgccaugcugcagcuggaccccaacaccaagaccuggauggacaucgagggcagacccgaggaccccguggagaucgcccuguaccagcccagcagcggcugcuacauccacuucuucagagagcccaccgaccugaagcaguucaagcaggacgccaaguacagccacggcaucgacgugaccgaccuguucgccgcccagcccggccugaccagcgccgugaucgacgcccugcccagaaacauggugaucaccugccagggcagcgacgacaucagaaagcugcuggagagccagggcagaaaggacaucaagcugaucgacaucgcccugaacaagaccgacagcagaaaguacgagaacgccgugugggaccaguacaaggaccugugccacaugcacaccggcguggugguggagaagaagaagagaggcggcaaggaggagaucaccccccacugcgcccugauggacugcaucauguucgacgccgccgugagcggcggccugaacaccagcgugcugagagccgugcugcccagagacaugguguucagaaccagcacccccagaguggugcugugaggacuaguuauaagacugacuagcccgaugggccucccaacgggcccuccuccccuccuugcaccgagauuaauaaaaaaaaaaaaaaaaaaaaaaaaaaaaaaaaaaaaaaaaaaaaaaaaaaaaaaaaaaaaaaaaaaaaaaaaaaaaaaaaaaaaaaaaaaaaaaaaaaaa

SEQ ID NO: 19288 - RNA, 1962 nt, Artificial Sequence
  mRNA product Design i-3 (A100) comprising derived and/or modified sequence from LASV(G733-SLE-2010;Clade IV)__AIT17155__SP-HsPLAT_NP(2-569) (opt4)
aggagaaagcuuaccauggacgccaugaagagaggccugugcugcgugcugcugcugugcggcgccguguucgugagccccagcgccagcaaggagaucaagagcuuccuguggacccagagccugagaagagagcugagcggcuacugcagcaacaucaagcugcagguggugaaggacgcccaggcccugcugcacggccuggacuucagcgaggugagcaacgugcagagacugaugagaaaggagagaagagacgacaacgaccugaagagacugagagaccugaaccaggccgugaacaaccugguggagcugaagagcacccagcagaagagcgugcugagagugggcacccugaccagcgacgagcugcuggugcuggccgccgaccuggagaagcugaagagcaaggugaucagaaccgagagaccccugagcgccggcguguacaugggcaaccugagcagccagcagcuggaccagagaagagcccugcugagcaugaucggcaugagcggcggcaaccagggcgccagaaccggcagagacggcguggugagagugugggacgugaagaacgccgagcugcugaacaaccaguucggcaccaugcccagccugacccuggccugccugaccaagcagggccagguggaccugaacgacgccgugcaggcccugaccgaccugggccugaucuacaccgccaaguaccccaacaccagcgaccuggacagacugacccagagccaccccauccugaacaugaucgacaccaagaagagcagccugaacaucagcggcuacaacuucagccugggcgccgccgugaaggccggcgccugcaugcuggacggcggcaacaugcuggagaccaucaaggugagcccccagaccauggacggcauccugaagagcauccugaaggugaagaaggcccugggcauguucaucagcgacacccccggcgagagaaaccccuacgagaacauccuguacaagaucugccugagcggcgacggcuggcccuacaucgccagcagaaccagcaucaccggcagagccugggagaacaccgugguggaccuggagagcgacggcaagccccagaaggccggcagcaacaacagcaacaagagccugcagagcgccggcuucaccgccggccugaccuacagccagcugaugacccugaaggacgccaugcugcagcuggaccccaacgccaagaccuggauggacaucgagggcagacccgaggaccccguggagaucgcccuguaccagcccagcagcggcugcuacauccacuucuucagagagcccaccgaccugaagcaguucaagcaggacgccaaguacagccacggcaucgacgugaccgaccuguucgccgcccagcccggccugaccagcgccgugaucgacgcccugcccagaaacauggugaucaccugccagggcagcgacgacaucagaaagcugcuggagagccagggcagaaaggacaucaagcugaucgacaucgcccugagcaagaucgacagcagaaaguacgagaacgccgugugggaccaguacaaggaccugugccacaugcacaccggcguggugguggagaagaagaagagaggcggcaaggaggagaucaccccccacugcgcccugauggacugcaucauguucgacgccgccgugagcggcggccugaacagccuggugcugagagccgugcugcccagagacaugguguucagaaccagcacccccagaguggugcugugaggacuaguuauaagacugacuagcccgaugggccucccaacgggcccuccuccccuccuugcaccgagauuaauaaaaaaaaaaaaaaaaaaaaaaaaaaaaaaaaaaaaaaaaaaaaaaaaaaaaaaaaaaaaaaaaaaaaaaaaaaaaaaaaaaaaaaaaaaaaaaaaaaaa

SEQ ID NO: 19289 - RNA, 1962 nt, Artificial Sequence
  mRNA product Design i-3 (A100) comprising derived and/or modified sequence from MOPV/LASV reassortant(IGS-1;Clade IV)__AFY05578__SP-HsPLAT_NP(2-569) (opt4)
aggagaaagcuuaccauggacgccaugaagagaggccugugcugcgugcugcugcugugcggcgccguguucgugagccccagcgccagcaaggagaucaagagcuuccuguggacccagagccugagaagagagcugagcggcuacugcagcaacaucaagcugcagguggugaaggacgcccaggcccugcugcacggccuggacuucagcgaggugagcaacgugcagagacugaugagaaaggagagaagagacgacaacgaccugaagagacugagagaccugaaccaggccgugaacaaccugguggagcugaagagcacccagcagaagagcauccugagagugggcacccugaccagcgacgaccugcugauccuggccgccgaccuggagaagcugagaagcaaggugaucagaaccgagagaccccugagcgccggcguguacaugggcaaccugagcagccagcagcuggaccagagaagagcccugcugaacaugaucggcaugagcggcggcaaccagggcgccagagccggcagagacggcguggugagagugugggacgugaagaacgccgagcugcugagcaaccaguucggcaccaugcccagccugacccuggccugccugaccaagcagggccagguggaccugaacgacgccgugcaggcccugaccgaccugggccugaucuacaccgccaaguaccccaacaccagcgaccuggacagacugacccagagccaccccauccugaacaugaucgacaccaagaagagcagccugaacaucagcggcuacaacuucagccugggcgccgccgugaaggccggcgccugcaugcuggacggcggcaacaugcuggagaccaucaaggugagcccccagaccauggacggcauccugaagagcauccugaaggugaagaaggcccugggcauguucaucagcgacacccccggcgagagaaaccccuacgagaacauccuguacaagaucugccugagcggcgacggcuggcccuacaucgccagcagaaccagcaucaccggcagagccugggagaacaccgugguggaccuggagagcgacggcaagccccagaaggccgacagcaacaacagcagcaagagccugcagagcgccggcuucaccgccggccugaccuacagccagcugaugacccugaaggacgccaugcugcagcuggaccccaacgccaagaccuggauggacaucgagggcagacccgaggaccccguggagaucgcccuguaccagcccagcagcggcugcuacauccacuucuucagagagcccaccgaccugaagcaguucaagcaggacgccaaguacagccacggcaucgacgugaccgaccuguucgccacccagcccggccugaccagcgccgugaucgacgcccugcccagaaacauggugaucaccugccagggcagcgacgacaucagaaagcugcuggagagccagggcagaaaggacaucaagcugaucgacaucgaccugagcaagaccgacagcagaaaguacgagaacgccgugugggaccaguacaaggaccugugccacaugcacaccggcguggugguggagaagaagaagagaggcggcaaggaggagaucaccccccacugcgcccugauggacugcaucauguucgacgccgccgugagcggcggccugaacaccagcgugcugagagccgugcugcccagagacaugguguucagaaccagcacccccagaguggugcugugaggacuaguuauaagacugacuagcccgaugggccucccaacgggcccuccuccccuccuugcaccgagauuaauaaaaaaaaaaaaaaaaaaaaaaaaaaaaaaaaaaaaaaaaaaaaaaaaaaaaaaaaaaaaaaaaaaaaaaaaaaaaaaaaaaaaaaaaaaaaaaaaaaaa

SEQ ID NO: 19290 - RNA, 1962 nt, Artificial Sequence
  mRNA product Design i-3 (A100) comprising derived and/or modified sequence from LASV(LM765-SLE-2012;Clade IV)__AIT17815__SP-HsPLAT_NP(2-569) (opt4)
aggagaaagcuuaccauggacgccaugaagagaggccugugcugcgugcugcugcugugcggcgccguguucgugagccccagcgccagcaaggagaucaagagcuuccuguggacccagagccugagaagagagcugagcggcuacugcagcaacaucaagcugcagguggugaaggacgcccaggcccugcugcacggccuggacuucagcgaggugagcaacgugcagagacugaugagaaaggagagaagagacgacaacgaccugaagagacugagagaccugaaccaggccgugaacaaccugguggagcugaagagcacccagcagaagagcauccugagagugggcacccugaccagcgacgaccugcugauccuggccgccgaccuggagaagcugaagagcaaggugaccagaaccgagagaccccugagcgccggcguguacaugggcaaccugagcagccagcagcuggaccagagaagagcccugcuggacaugaucggcaugagcggcagcaaccagggcgccagagccggcagagacggcguggugagagugugggacgugaagaacgccgagcugcugaacaaccaguucggcaccaugcccagccugacccuggccugccugaccaagcagggccagguggaccugaacgacgccgugcaggcccugaccgaccugggccugaucuacaccgccaaguaccccaacaccagcgaccuggacagacugacccagagccaccccauccugaacaugaucgacaccaagaagagcagccugaacaucagcggcuacaacuucagccugggcgccgccgugaaggccggcgccugcaugcuggacggcggcaacaugcuggagaccaucaaggugagcccccagaccauggacggcauccugaagagcauccugaaggugaagaaggcccugggcauguucaucagcgacgcccccggcgagagaaaccccuacgagaacauccuguacaagaucugccugagcggcgacggcuggcccuacaucgccagcagaaccagcaucaccggcagagccugggagaacaccgugguggaccuggagagcgacggcaagccccagaaggccggcagcaacggcagcaacaagagccugcagagcgccggcuucaccgccggccugaccuacagccagcugaugacccugaaggacgccaugcugcagcuggaccccaacgccaagaccuggauggacaucgagggcagacccgaggaccccguggagaucgcccuguaccagcccagcagcggcugcuacauccacuucuucagagagcccaccgaccugaagcaguucaagcaggacgccaaguacagccacggcaucgacgugaccgaccuguucgccgcccagcccggccugaccagcgccgugaucgacgcccugcccagaaacauggugaucaccugccagggcagcgacgacaucagaaagcuguucgagagccagggcagaaaggacaucaagcugaucgacaucgcccugagcaagaccgacagcagaaaguacgagaacgccgugugggaccaguacaaggaccugugccacaugcacaccggcaucgugguggagaagaagaagagaggcggcaaggaggagaucaccccccacugcgcccugauggacugcaucauguucgacgccgccgugagcggcggccugaacaccagcgugcugagagccgugcugcccagagacaugguguucagaaccagcacccccagaguggugcugugaggacuaguuauaagacugacuagcccgaugggccucccaacgggcccuccuccccuccuugcaccgagauuaauaaaaaaaaaaaaaaaaaaaaaaaaaaaaaaaaaaaaaaaaaaaaaaaaaaaaaaaaaaaaaaaaaaaaaaaaaaaaaaaaaaaaaaaaaaaaaaaaaaaa

SEQ ID NO: 19291 - RNA, 1962 nt, Artificial Sequence
  mRNA product Design i-3 (A100) comprising derived and/or modified sequence from LASV(LM776-SLE-2012;Clade IV)__AIT17825__SP-HsPLAT_NP(2-569) (opt4)
aggagaaagcuuaccauggacgccaugaagagaggccugugcugcgugcugcugcugugcggcgccguguucgugagccccagcgccagcaaggagaucaagagcuuccuguggacccagagccugagaagagagcugagcagcuacugcagcaacaucaagcugcagguggugaaggacgcccaggcccugcugcacggccuggacuucagcgaggugagcaacgugcagagacugaugagaaaggagagaagagacgacaacgaccugaagagacugagagaccugaaccaggccgugaacaaccugguggagcugaagagcacccagcagaagagcauccugagagugggcacccugaccagcgacgaccugcugauccuggccgccgaccuggagaagcugaagagcaaggugaccagaaccgagagaccccugagcgccggcguguacaugggcaaccugagcagccagcagcuggaccagagaagagcccugcugagcaugaucggcaugagcggcagcaaccagggcgccagagccggcagagacggcguggugagagugugggacgugaagaacgccgagcugcugaacaaccaguucggcaccaugcccagccugacccuggccugccugaccaagcagggccagguggaccugaacgacgccgugcaggcccugaccgaccugggccugaucuacaccgccaaguaccccaacaccagcgaccuggacagacugacccagagccaccccauccugaacaugaucgacaccaagaagagcagccugaacaucagcggcuacaacuucagccugggcgccgccgugaaggccggcgccugcaugcuggacggcggcaacaugcuggagaccaucaaggugagcccccagaccauggacggcauccugaagagcauccugaaggugaagaaggcccugggcauguucaucagcgacacccccggcgagagaaaccccuacgagaacauccuguacaagaucugccugagcggcgacggcuggcccuacaucgccagcagaaccagcaucaccggcagagccugggagaacaccgugguggaccuggagagcgacggcaagccccagaaggccggcagcaacaacagcaacaagagccugcagagcgccggcuucaccgccggccugaccuacagccagcugaugacccugaaggacgccaugcugcagcuggaccccaacgccaagaccuggauggacaucgagggcagacccgaggaccccguggagguggcccuguaccagcccagcagcggcugcuacauccacuucuucagagagcccaccgaccugaagcaguucaagcaggacgccaaguacagccacggcaucgacgugaccgaccuguucgccgcccagcccggccugaccagcgccgugaucgacgcccugcccagaaacauggugaucaccugccagggcagcgacgacaucagaaagcugcuggagagccagggcagaaaggacaucaagcugaucgacaucgcccugagcaagaccgacagcagaaaguacgagaacgccgugugggaccaguacaaggaccugugccacaugcacaccggcguggugguggagaagaagaagagaggcggcaaggaggagaucaccccccacugcgcccugauggacugcaucauguucgacgccgccgugagcggcggccugaacaccagcgugcugagagccgugcugcccagagacaugguguucagaaccagcacccccagaguggugcugugaggacuaguuauaagacugacuagcccgaugggccucccaacgggcccuccuccccuccuugcaccgagauuaauaaaaaaaaaaaaaaaaaaaaaaaaaaaaaaaaaaaaaaaaaaaaaaaaaaaaaaaaaaaaaaaaaaaaaaaaaaaaaaaaaaaaaaaaaaaaaaaaaaaa

SEQ ID NO: 19292 - RNA, 1962 nt, Artificial Sequence
  mRNA product Design i-3 (A100) comprising derived and/or modified sequence from LASV(Mad39;Clade IV)__ANH09723__SP-HsPLAT_NP(2-569) (opt4)
aggagaaagcuuaccauggacgccaugaagagaggccugugcugcgugcugcugcugugcggcgccguguucgugagccccagcgccagcaaggagaucaagagcuuccuguggacccagagccugagaagagagcugagcggcuacugcagcaacaucaagcugcagguggugaaggacgcccaggcccugcugcacggccuggacuucagcgaggugagcaacgugcagagacugaugagaaagcagagaagagacgacaacgaccugaagagacugagagaccugaaccaggccgugaacaaccugguggagcugaagagcacccagcagaagagcgugcugagagugggcacccugaccagcgacgaccugcugacccuggccgccgaccuggagaagcugaagagcaaggugaccagaaccgagagaccccugaccgccggcguguacaugggcaaccugagcagccagcagcuggaccagagaagagcccugcugaacaugaucggcaugagcggcggcaaccagggcgccagaaccggcagagacggcguggugagagugugggacgugaagaacgccgagcugcugaacaaccaguucggcaccaugcccagccugacccuggccugccugaccaagcagggccagguggaccugaacgacguggugcaggcccugaccgaccugggccugaucuacaccgccaaguaccccaacaccagcgaccuggacagacugacccagagccaccccauccugaacaugaucgacaccaacaagagcagccugaacaucagcggcuacaacuucagccugggcgccgccgugaaggccggcgccugcaugcuggacggcggcaacaugcuggagaccaucaaggugagcccccagaccauggacggcauccugaagagcauccugaaggugaagaagagccugggcauguucaucagcgacacccccggcgagagaaaccccuacgagaacauccuguacaagaucugccugagcggcgacggcuggcccuacaucgccagcagaaccagcaucaccggcagagccugggagaacaccgugguggaccuggagagcggcggcaagccccagaaggccggcagcaacaacagcaacaagagccugcagagcgccggcuucgccgccggccugaccuacagccagcugaugacccugaaggacgccaugcugcagcuggaccccaacgccaagaccuggauggacaucgagggcagacccgaggaccccguggagaucgcccuguaccagcccaucagcggcugcuacauccacuucuucagagagcccaccgaccugaagcaguucaagcaggacgccaaguacagccacggcaucgacgugaccgaccuguucgccgcccagcccggccugaccagcgccgugaucgaggcccugcccagaaacauggugaucaccugccagggcagcgacgacaucagaaagcuguucgagagccagggcagaaaggacaucaagcugaucgacaucgcccugagcaagaccgacagcagaaaguacgagaacgccgugugggaccaguacaaggaccugugccacaugcacaccggcguggugguggagaagaagaagaagggcggcaaggaggagaucaccccccacugcgcccugauggacugcaucauguucgacgccgccgugagcggcggccugaacacccuggugcugagagccgugcugcccagagacaugguguucagaaccagcacccccaagguggugcugugaggacuaguuauaagacugacuagcccgaugggccucccaacgggcccuccuccccuccuugcaccgagauuaauaaaaaaaaaaaaaaaaaaaaaaaaaaaaaaaaaaaaaaaaaaaaaaaaaaaaaaaaaaaaaaaaaaaaaaaaaaaaaaaaaaaaaaaaaaaaaaaaaaaa

SEQ ID NO: 19293 - RNA, 1962 nt, Artificial Sequence
  mRNA product Design i-3 (A100) comprising derived and/or modified sequence from LASV(Z0947-SLE-2011;Clade IV)__AIT17841__SP-HsPLAT_NP(2-569) (opt4)
aggagaaagcuuaccauggacgccaugaagagaggccugugcugcgugcugcugcugugcggcgccguguucgugagccccagcgccagcaaggagaucaagagcuuccuguggacccagagccugagaagagagcugagcggcuacugcagcaacaucaagcugcagguggugaaggacgcccaggcccugcugcacggccuggacuucagcgaggugagcaacgugcagagacugaugagaaaggagagaagagacgacaacgaccugaagagacugagagaccugaaccaggccgugaacaaccugguggagcugaagagcacccagcagaagagcauccugagagugggcacccugaccagcgacgaccugcugauccuggccgccgaccuggagaagcugaagagcaaggugaccagaaccgagagaccccugagcgccggcguguacaugggcaaccugagcagccagcagcuggaccagagaagagcccugcugaacaugaucggcaugagcggcagcaaccagggcgccagaaccggcagagacggcguggugagagugugggacgugaagaacgccgagcugcugaacaaccaguucggcaccaugcccagccugacccuggccugccugaccaagcagggccagguggaccugaacgacgccgugcaggcccugaccgaccugggccugaucuacaccgccaaguaccccaacaccagcgaccuggacagacugacccagagccaccccauccugaacaugaucgacaccaagaagagcagccugaacaucagcggcuacaacuucagccugggcgccgccgugaaggccggcgccugcaugcuggacggcggcaacaugcuggagaccaucaaggugagcccccagaccauggacggcauccugaagagcauccugaaggugaagaaggcccugggcauguucaucagcgacgcccccggcgagagaaaccccuacgagaacauccuguacaagaucugccugagcggcgacggcuggcccuacaucgccagcagaaccagcaucaccggcagagccugggagaacaccgugguggaccuggagagcgacggcaagccccagaaggccggcagcaacggcagcaacaagagccugcagagcgccggcuucaccgccggccugaccuacagccagcugaugacccugaaggacgccaugcugcagcuggaccccaacgccaagaccuggauggacaucgagggcagacccgaggaccccguggagaucgcccuguaccagcccagcagcggcugcuacauccacuucuucagagagcccaccgaccugaagcaguucaagcaggacgccaaguacagccacggcaucgacgugaccgaccuguucgccgcccagcccggccugaccagcgccgugaucgacgcccugcccagaaacauggugaucaccugccagggcagcgacgacaucagaaagcuguucgagagccagggcagaaaggacaucaagcugaucgacaucgcccugagcaagaccgacagcagaaaguacgagaacgccgugugggaccaguacaaggaccugugccacaugcacaccggcaucgugguggagaagaagaagagaggcggcaaggaggagaucaccccccacugcgcccugauggacugcaucauguucgacgccgccgugagcggcggccugaacaccagcgugcugagagccgugcugcccagagacaugguguucagaaccagcacccccagaguggugcugugaggacuaguuauaagacugacuagcccgaugggccucccaacgggcccuccuccccuccuugcaccgagauuaauaaaaaaaaaaaaaaaaaaaaaaaaaaaaaaaaaaaaaaaaaaaaaaaaaaaaaaaaaaaaaaaaaaaaaaaaaaaaaaaaaaaaaaaaaaaaaaaaaaaa

SEQ ID NO: 19294 - RNA, 1962 nt, Artificial Sequence
  mRNA product Design i-3 (A100) comprising derived and/or modified sequence from LASV(Josiah;Clade IV)__NP_694869__SP-HsPLAT_NP(2-569) (opt5)
aggagaaagcuuaccauggacgccaugaagagaggccugugcugugugcuccugcuuugcggggcugucuucguuagccccagcgccuccaaggagaucaaaucuuuccuguggacccagagccucagacgggaacuguccggcuacugcucuaacauuaagcugcaaguggucaaagacgcucaggcccugcuccacgggcuggauuuuagcgagguuuccaaugugcagcgccuuaugagaaaggaacggcgcgacgauaacgaccugaaaagacuccgggaucugaaucaggcggugaacaaucuggucgagcucaagucuacacaacaaaagagcauccugcgcgugggaacgcuuaccuccgacgaucugcucauucuggcugccgaccuugaaaaacuuaagagcaaaguuaucagaacagagcggccccucucugccggcguguauauggggaaccuguccagccagcagcuggaucagcgcagagcucuccugaauaugauuggaaugucuggcgggaaccagggagcccgggcuggccgcgacggcgucgugagaguuugggaugugaagaaugccgagcuucugaacaaucaguucgggaccaugccuucccucacacuggcgugucuuaccaaacagggacaagucgaccugaacgaugccgugcaggcucucacagaccugggccugaucuacaccgccaaguauccgaauacgagcgaccucgaucggcugacccagucucaucccauccuuaacaugauugacacaaagaaauccagccugaauaucuccggguacaacuuuucucucggagcugccgugaaggcgggcgccugcaugcuggaugggggaaacaugcuugaaaccauuaaagucagcccucaaacaauggacggcauccugaaguccauucucaaaguuaagaaagcucugggcauguucaucagcgauacccccggggagcgcaauccuuaugaaaacauucuguacaagaucugucucucuggagacggcuggcccuauaucgccuccagaacgagcauuacagggcgggcuugggagaauaccgugguggaucuggagucugacggaaagccucagaaagccgauagcaacaauuccucuaagagccuucaguccgccggcuuuacagcugggcugaccuacagccagcucaugacccugaaagacgcgaugcugcaacuugauccgaacgccaagacauggauggacaucgaaggaagacccgaggacccugucgaaauugcucucuaccagcccucuuccggcugcuauauccacuucuuucgcgagccuacggaucugaaacaguucaagcaggacgccaaguacagccauggcauugaugugaccgaccuguuugccacacaacccgggcucaccucugcuguuaucgaugcccugccgcggaauauggugaucacaugucagggauccgacgauauuagaaaacuucuggaaagccagggccgcaaggacaucaaacucauugauaucgcgcuguccaagaccgacucucggaaauaugagaacgcugucugggaucaguacaaggaccugugccacaugcauacgggggugguuguggagaagaaaaagagaggaggcaaagaagagauuacaccucacugugcccuuauggauugcaucauguucgacgccgcugucagcgggggccucaauaccuccgugcugcgcgccguccugccccgggacaugguguuuagaaccucuacaccucgcguugugcucugaggacuaguuauaagacugacuagcccgaugggccucccaacgggcccuccuccccuccuugcaccgagauuaauaaaaaaaaaaaaaaaaaaaaaaaaaaaaaaaaaaaaaaaaaaaaaaaaaaaaaaaaaaaaaaaaaaaaaaaaaaaaaaaaaaaaaaaaaaaaaaaaaaaa

SEQ ID NO: 19295 - RNA, 1962 nt, Artificial Sequence
  mRNA product Design i-3 (A100) comprising derived and/or modified sequence from LASV(LP;Clade I)__AAF86702__SP-HsPLAT_NP(2-569) (opt5)
aggagaaagcuuaccauggacgccaugaagagaggccugugcugugugcuccugcuuugcggggcugucuucguuagccccagcaacuccaaggagaucaaaucuuuccuguggacccagagccucagacgggaacuguccggcuacugcucuaauauuaagcuccaaguggucaaagacgcccaggcucugcuccacgggcuggauuuuagcgagguuuccaacgugcagcgccuuaugagaaagcagaaacgggacgaugccgaccugaagcgccucagagaucugaaucaagcggugaacaaucuggucgaacucaagucuacacagcagaaaaacgugcugcggguuggaacgcuuagcuccgacgaucugaucacccucgcugccgaccuggagaaacuuaaaagcaaggugauucgcacagaaagaccccugucuuccggcgucuauauggggaaucucagcucucagcaacuggaucagcggcgcgcccugcucuccaugaucggaaugagcggcgggccucagggaaacagaaccggcggcgacggggugguucgggugugggaugucaaaaaugcugagcugcuuaacaaucaguucggaacaaugccgucucugacccucgccugucugacaaagcaaggccagguggaccuuaacgaugcugugcaggcccugaccgaccucgggcugauuuacacggcgaaguaucccaauuccagcgaccuggauaugcucacccaaucccauccuauccugggaauggucgacacaaagaagucuagccuuaacaucuccggcuacaauuuuagccugggggccgcuguuaaagccggagcuugcaugcucgauggcggcaacaugcuggagaccauuaaggugucuccccagacaauggacgggauccuuaaauccauucugaaggugaaacgcagccucggaauguucaucucugauaccccuggcgaaagaaaccccuaugagaauauucuguacaagaucugucugagcggggaaggauggccuuauauugccucccggacgucuaucacaggccgcgcgugggagaacacccucgucgaccuggagagcgauaauaagccgcccaaacuuaacuccgccgggagcaauaagucucugcaggcugccggacucaacgcuggccugacauacucccagcugaugacccuuaaagacugcaugcuccaacuggauccuagcucuaagaccuggaucgacauugaaggcagacccgaggauccuguggaaaucgcccuguuucagcccuccagcggguguuacauucacuucuuucgggagccgacagaccucaaacaguucaagcaggacgccaaguauucccauggaaucgauguuacggaccuguuuucuacccaaccuggccuuacaagcgcugugauugaagcgcugcccagaaauaugguccuuaccugccagggguccgaugacaucaaaaagcugcuggagucucagggacgccgggauaucaaacuuauugacaucagccucuccaaggccgauagcagaaaauucgagaacgcugugugggaccaguacaaggaucugugucacaugcauacaggcguuguggucgaaaagaaaaagcgcgggggcaaagaggaaauuaccccucacugcgcccugcucgacuguaucauguuugaugccgcuacgacaggaucucugaauauuaccacccuucgggccgugcugcccagagacauggucuuccgcacauccacccccaaggugguucucugaggacuaguuauaagacugacuagcccgaugggccucccaacgggcccuccuccccuccuugcaccgagauuaauaaaaaaaaaaaaaaaaaaaaaaaaaaaaaaaaaaaaaaaaaaaaaaaaaaaaaaaaaaaaaaaaaaaaaaaaaaaaaaaaaaaaaaaaaaaaaaaaaaaa

SEQ ID NO: 19296 - RNA, 1962 nt, Artificial Sequence
  mRNA product Design i-3 (A100) comprising derived and/or modified sequence from LASV(803213;Clade II)__AAF86704__SP-HsPLAT_NP(2-569) (opt5)
aggagaaagcuuaccauggacgccaugaagagaggccugugcugugugcuccugcuuugcggggcugucuucguuagccccagcgccuccaaggaggugaaaucuuuccuguggacccagagccucagacgggaacuguccggcuacugcucuaacaucaaacuucaagucguuaaggacgcucaggcccugcuccacgggcuggauuuuagcgaggugaauaacgugcagcgccuuaugagaaagcagaaacgggacgauggagaccugaagcgccucagagaucugaaucaagcggucaacaaucugguggaacucaaguccacacagcagaaaucuauucugcggguuggcacgcuuaccagcgacgaucugcucacacuggcugccgaccuugagaagcugaaauccaaggugauccgcaccgaaagaccccucagcucuggggucuauaugggaaaccuguccacacagcaacuggagcagcggcgcgcccuccugaauaugauuggcauggugggaggagcucagggcacccagccuggcagagaugggguugugcgggucugggacgugaaaaacccggaucuucugaauaaccaauucggaacaaugcccagccucacccuggccugucuuacgaagcagggccagguggaccugaaugaugcuguccucgcccugaccgaccuggggcucaucuacacagcgaaguauccuaacucuuccgaccuggaucgccuuagccaaucucaucccauucugaauaugguugacaccaaaaaguccagccucaacaucuccggauacaauuuuucucugggcgccgcugugaaagccggggcuugcaugcuugauggaggcaacaugcuggagacaaucaaggugaccccucagacgauggacggcauucucaaaagcauccugaaggucaaaagaucccuggggauguucgugagcgauacacccggagaacggaacccuuaugagaauauucucuacaagaucugucugucuggcgacggguggccguauauugccucccgcaccagcaucguugggagagcgugggaaaacacaaccguggaucuugagucugacggcaagccccagaaagucgggaccgccggaagcaauaagucccugcagucugcuggcuuuccuacaggccucacguacagccaacugaugacccugaaagauuccaugaugcagcuugaccccagcgccaagacauggauugauaucgaggggcggccugaagaccccguggagaucgcucucuaccagccgaugucuggaugcuauauucacuucuuuagagaaccuaccgaccugaaacaguucaagcaagaugccaaguacucccauggcaucgacguugccgaucuguuucccgcucagccugggcucacaagcgcggugauugaggcccugccccgcaacaugguccuuaccugucagggaucugacgauaucaaaaagcugcucgacucccagggccggagagauauuaaacugaucgacaucagccuguccaagguggauucucgcaaauucgaaaaugcugucugggaccaaugcaaggaucuuugucacaugcauacgggggugguuguggagaagaaaaagcggggcggaaaagaggaaauuacaccccacugcgcccucauggacuguaucauguuugaugccgcugucagcggcgggcugaacauuccugugcugagagccguucucccgcgcgacaugguguuccggaccuccucucccaaggucgugcugugaggacuaguuauaagacugacuagcccgaugggccucccaacgggcccuccuccccuccuugcaccgagauuaauaaaaaaaaaaaaaaaaaaaaaaaaaaaaaaaaaaaaaaaaaaaaaaaaaaaaaaaaaaaaaaaaaaaaaaaaaaaaaaaaaaaaaaaaaaaaaaaaaaaa

SEQ ID NO: 19297 - RNA, 1965 nt, Artificial Sequence
  mRNA product Design i-3 (A100) comprising derived and/or modified sequence from LASV(GA391;Clade III)__CAA36646__SP-HsPLAT_NP(2-570) (opt5)
aggagaaagcuuaccauggacgccaugaagagaggccugugcugugugcuccugcuuugcggggcugucuucguuagccccagcgccuccaaggaggugagaucuuuccuguggacccagagccuccggcgcgaacuguccggcuacugcucuaacaucaaacuucaagucguuaaggacgcucaggcccugcuccacgggcuggauuuuagcgagguguccaaugugcagagacuuaugcggaaacagaagcgcgacgauggagaccugaaaagacuccgggaucugaaccaagcggucaauaaccugguggaacucaagucuacacagcagaaaagcguucugcgcgugggcacgcuuuccagcgacgaucugcucauucuggcugccgaccuugagaaacugaagucuaaagucaccagaacagaacggccccucuccagcgggguguauaugggaaaucugucuucccagcaacuggaucagcgcagagcccuccugaacaugaucggcaugaccgggguuagcggaggcggcaagggggcuucugacggaauugugcgggucugggaugugaaaaaugccgagcuucugaacaaucaguucggcacaaugccuucccucacccuggcuugucuuacaaagcaggggcaaguggaccugaacgaugccguccaggcgcucaccgaccugggacugaucuacacggccaaguauccgaauagcuccgaccucgaucgccugucucagagccaucccauucuuaacaugaucgacaccaaaaaguccagccugaauaucucuggcuacaacuuuucccucggggcugccguuaaagcuggagccugcaugcuggauggcggcaauaugcuugagacaauuaaggugagcccucaaaccauggacgggauccugaaaucuauucucaaggugaaaaagagccugggaauguucgucuccgauacacccggcgaaagaaacccuuaugagaacauccuguacaagauuugucucucuggggacggauggcccuauaucgcgagccggaccuccauugugggccgcgccugggaaaauacgguuguggaucuggagcaggacaacaaaccucagaagaucgggaauggaggcagcaacaaaucucuucaguccgcuggcuuugccgcugggcugacauacagccaacucaugacccugaaggauuucaaaugcuuuaaucugaucccgaacgccaagacauggauggacauugagggaagacccgaagauccugucgagaucgcccuuuaccagcccucuuccggcuguuaugugcacuucuuucgggaaccuaccgaccucaagcaguucaaacaggacgcuaaguacagccaugggauugauguuaccgaccuguuugcggcccaacccggacugacauccgcugugaucgaggcccucccgagaaauauggucauuacgugccagggcucugaagauauccgcaaacugcuugagagccaggggcggagagacaucaagcugauugauaucacccucuccaaagccgacucucgcaaguucgagaacgcugugugggaucaguuuaaggaccugugucacaugcauacaggcgucgugguugaaaagaagaaacggggaggcaaggaggaaauuaccccucacugcgcccugauggauuguaucauguucgacgcggcugugagcgggggacuugaugccaaaguccucagagugguucugccccgcgacaugguguuccggacauccaccccuaaggucgugcugugaggacuaguuauaagacugacuagcccgaugggccucccaacgggcccuccuccccuccuugcaccgagauuaauaaaaaaaaaaaaaaaaaaaaaaaaaaaaaaaaaaaaaaaaaaaaaaaaaaaaaaaaaaaaaaaaaaaaaaaaaaaaaaaaaaaaaaaaaaaaaaaaaaaa

SEQ ID NO: 19298 - RNA, 1962 nt, Artificial Sequence
  mRNA product Design i-3 (A100) comprising derived and/or modified sequence from LASV(AV;Clade V)__CCA30315__SP-HsPLAT_NP(2-569) (opt5)
aggagaaagcuuaccauggacgccaugaagagaggccugugcugugugcuccugcuuugcggggcugucuucguuagccccagcgccuccaaggaggugaaaucuuuccuguggacccagagccucagacgggaacuguccggcuacugcucuaacaucaaacuucaagucguuaaggacgcucaggcccugcuccacgggcuggauuuuagcgagguguccaaugugcagcgccuuaugagaaagcagcggcgcgacgauucugaccugaaaagacuccgggaucugaaccaagcggucaauaaccugguggaacucaagagcacacagcagaaguccguucugcgcgugggaacgcuuagcucugacgaucugcucacccuggcugccgaccuugagaaacugaaguccaaagucacaagaaccgaacggccccucagcucuggcguguauauggggaaucuguccagccagcaacuggaucagcgcagagcccuccugaaccuuauuggaaugacaaauggcucucaggggucccaggcuggacgggacggcguugugcgcgucugggaugugaagaacgccgagcugcucaauaaccaauucggcaccaugccuagccugacacuugcuugucugaccaaacagggacagguggaccucaaugaugucguucaagcccugacggaccuggggcucaucuacaccgcgaaguauccgaacacauccgaccuggauagacuuacccagucucaucccauucugaauaugaucgacacaaagaaaagcucccucaacauuagcggcuacaauuuuucucugggggccgcugugaaggccggagcuugcaugcuugauggcgggaacaugcuggagaccaucaaaguguccccucagagcauggacggaauccucaagucuauucugaaagucaagcgggcccugggcauguucgugagcgauacgcccggcgaacgcaacccuuaugagaauauccucuacaaaauuugucuguccggggacggauggcccuauaucgcgucuagaacaagcauuguuggccgggccugggaaaacaccguggucgaucuugagacagacgggaagccucagaagaucggauccggcaauagcaacaaaucucugcaauccgcuggguuuagcgccggacucaccuacucucagcugaugacccugaaggaugcuaugcuucagcucgacccgaaugccaaaacauggauggauauugagggcagacccgaagacccuguggagguugcccuguaccagcccaucuccggcugcuauauccacuucuuucgcgaaccuacggaccugaagcaauucaaacaggaugcuaaguacagccaugggauugacaucgcggaucucuuugccgcucagcccggacugaccuccgccgugauugaggcccuuccgcggaacauggucaucacaugucagggcucugaagacauuaagaaacugcucgagagccaagggagaaaggauaucaaacugaucgacauugcucuguccaagaucgauucucgcaaauucgagaaugccgugugggaccaguauaaggaucuuugccacaugcauaccggagucgugguugaaaagaaaaagcggggcgggaaagaggaaauuacaccucacugugcgcucauggacugcaucauguuugaugcugccgugagcggcggacugaacacccugguccucagagccgugcugccccgcgacaugguuuuccggacguccacaccuagagugguccuuugaggacuaguuauaagacugacuagcccgaugggccucccaacgggcccuccuccccuccuugcaccgagauuaauaaaaaaaaaaaaaaaaaaaaaaaaaaaaaaaaaaaaaaaaaaaaaaaaaaaaaaaaaaaaaaaaaaaaaaaaaaaaaaaaaaaaaaaaaaaaaaaaaaaa

SEQ ID NO: 19299 - RNA, 1962 nt, Artificial Sequence
  mRNA product Design i-3 (A100) comprising derived and/or modified sequence from LASV(Togo/2016/7082;Clade VI)__AMR44578__SP-HsPLAT_NP(2-569) (opt5)
aggagaaagcuuaccauggacgccaugaagagaggccugugcugugugcuccugcuuugcggggcugucuucguuagccccagcaacuccaaggaggugaaaucuuuccuguggacccagagccucagacgggaacuguccggcuacugcucuaauaucaaacuucaagucguuaaagacgcccaggcucugcuccacgggcuggauuuuagcgagguguccaacgugcagcgccuuaugagaaagcagaaacgggacgauggagaccugaagcgccucagagaucugaaucaagccgucaacaaucugguggaacucaagucuguucagcagaaaagcauucugcgggugggcacacuuacguccgacgaucugcucacccuggcggcugaccuugagaagcugaaaagcaaggucacacgcaccgaaagaccccucucuuccgggguguauaugggaaaccugagcucucagcaacuggaucagcggcgcgcccuccuguccaugaucggcaugagcgggggaaaucagaacucucagccuaaaggcgacggcguugugagagucugggaugugaagaaugccgaccuucugaacaaucaauucgggacaaugccgucccucacccuggcuugucuuacaaagcagggacagguggaucugaacgacgccguccaagcucucaccgaccugggccugauuuacacggccaaauaucccaauagcuccgaucucgaccggcugucucagagccauccuauccuuaacaugauugauaccaagaaauccagccugaauaucucuggguacaacuuuucccucggagcggccaucaagacaggcgcuugcaugcuggacgggggaaacaugcuugagaccauuaaaguuacaccccagaccauggauggcauccucaagagcauucugaaagugaagcgcucucugggcauguucaucagcgacacgccuggggagagaaaucccuaugaaaacauucuguacaagaucugucucuccggagauggcuggccuuauauugccucucggacagcuaucaucgggcgcgccugggagaauaccguggucgaccuggaaagcgauuccaaaccgcagaagauuggaagcaacggcucuaauaaaucccuucaaagcgcgggguuugcccccggacugacauacucucagcucaugacccugaaggacuccaugcugcagcuugauccuaacgcuaaaaccuggaucgacauugagggcagacccgaggacccuguggaaguugcccucuuccagcccaucagcggcugcuacauucacuuuuuccgggagccgacagaucugaagcaauuuaagcaggacgcuaaauauucccaugggaucgaugugacggaccuguucgccgcccagccuggacucaccucugcugucaucgaagcgcugcccagaaauauggugcuuacaugucagggcagcgaugacauuaagaaacugcucgauucccaagggcgccgggacaucaagcugauugauguuucucugaacaaaaucgacagcagaaaguuugagaaugccgugugggaucaguacaaggaccuuugccacaugcauaccggagucguggucgaaaagaagaaaaagggcgggaaagaggagauuacaccucacugugcucuccuggauugcaucauguucgacgccgccguguccggcggacugaacgcuaccguucuccgcgccgugcugccccgggacauggucuuuagaacgagcucucccaaggugguucuuugaggacuaguuauaagacugacuagcccgaugggccucccaacgggcccuccuccccuccuugcaccgagauuaauaaaaaaaaaaaaaaaaaaaaaaaaaaaaaaaaaaaaaaaaaaaaaaaaaaaaaaaaaaaaaaaaaaaaaaaaaaaaaaaaaaaaaaaaaaaaaaaaaaaa

SEQ ID NO: 19300 - RNA, 1962 nt, Artificial Sequence
  mRNA product Design i-3 (A100) comprising derived and/or modified sequence from LASV(KAK-428;Clade n.d. (VII))__ANH09741__SP-HsPLAT_NP(2-569) (opt5)
aggagaaagcuuaccauggacgccaugaagagaggccugugcugugugcuccugcuuugcggggcugucuucguuagccccagcaacuccaaggaggugaaaucuuuccuguggacccagagccucagacgggaacuguccggcuacugcacaaauaucaaacuucaagucguuaaggacgcccaggcucugcuccacgggcuggauuuuucugaggugagcaacgugcagcgccuuaugagaaagcagaaacgggacgauaaugaccugaagcgccucagagaucugaaccaagccgucaauaaccugguggaacucaaguccguucagcagaaaucugugcugaaggucggaacgcuuaauagcgacgaucugcucacccuggcggcugaccuugagaaacugaaguccaaagugguucggacagaacgcccccucagcucuggcguguauauggggaaccuguccagccagcaacuggaucagagacgggcccuccugaauaugauuggaauggccggcgggucucagggaaaccagccuucccgcgacggcgucgugagagugugggaugucaagaaugcugaccuucugaacaaucaauucggcaccaugccgagccucacacuggccugucuuaccaagcaggggcagguugaucugaacgacguggugcucgcucugacagaccugggacucaucuacaccgccaaauaucccaauucuuccgaucuggaccggcuuagccaaaaccauccuguccugaacaugauugaugugaauaaguccucucucaacaucagcggcuacaauuuuucccugggggcggccguuaaagcuggagccugcaugcuugacggcgggaacaugcuggagacgauuaagaucagcccccagaccguggauggaauccucaaaucuauucugaaggucaaacgcgcucugggcauguucguguccgacacaccuggcgagagaaaucccuaugaaaacauccucuacaagguuugucugagcgggaauggauggccuuauauugccucucggaccagcaucgugggccgcgcgugggagaacacagucguggaucuugaauccaauaagaaccagccgaaagucgggaauaacggaucuaauaagaugcugcagagcuccggcuuugccaccgggcucacguacagccaacugaugacacugagagacucuaugcuucagcucgaucccaccgcuaaaacauggauugacaucgagggacggccugaggaucccguggaacuggcccuguuccagccuuccagcggcugcuacauucacuuuuucagagagcccaccgaccucaagcaguuuaaacaagacgcuaaguauucucauggcaucgauguuaacgaccuguucuccgcccagccggggcuuaccagcgccgugcuggaagcucucccucgcaauaugguccugacaugucagggauccgaugacauccggaagcugcuugauucucaggacagaaaagauauuaagcucaucgacauuagccuguccaaagcggaugcccgcaaguuugagaacgacgugugggaucaauucaaagaccugugccacaugcauacgggcaucguuguggaaaagaagaaaaagggagggaaacaggagaugacaccccacugugcucuccuggauugcauuauguuugacgccgccgucucuggcgggcuuaacgugccuacccugcgggcugugcuccccaccgacaugguuuucagaacaaucaccacgaaggucgugcugugaggacuaguuauaagacugacuagcccgaugggccucccaacgggcccuccuccccuccuugcaccgagauuaauaaaaaaaaaaaaaaaaaaaaaaaaaaaaaaaaaaaaaaaaaaaaaaaaaaaaaaaaaaaaaaaaaaaaaaaaaaaaaaaaaaaaaaaaaaaaaaaaaaaa

SEQ ID NO: 19301 - RNA, 1962 nt, Artificial Sequence; identical to SEQ ID NO: 19295
  mRNA product Design i-3 (A100) comprising derived and/or modified sequence from LASV(Pinneo-NIG-1969;Clade I)__AIT17837__SP-HsPLAT_NP(2-569) (opt5)

SEQ ID NO: 19302 - RNA, 1962 nt, Artificial Sequence
  mRNA product Design i-3 (A100) comprising derived and/or modified sequence from LASV(ISTH0009-NIG-2011;Clade II)__AIT17405__SP-HsPLAT_NP(2-569) (opt5)
aggagaaagcuuaccauggacgccaugaagagaggccugugcugugugcuccugcuuugcggggcugucuucguuagccccagcguguccaaggaggucaaaucuuuccuguggacccagagccucagacgggaacuguccggcuacugcucuaacaucaaacuucaaguugugaaggacgcccaggcucugcuccacgggcuggauuuuagcgagguguccaauguccagcgccuuaugagaaagcagaaacgggacgauucugaccugaagcgccucagagaucugaaccaagccgugaauaaccugguugaacucaagagcacacagcagaaauccauucugcgggugggaacgcuuaccagcgacgaucugcucacacuggcggcugaccuugagaagcugaaaucuaaggucauccgcaccgaaagaccccucuccagcggcguguauauggggaaucugucuacacagcaacuggagcagcggcgcgcccuccugaacaugauuggaaugguuggcggggcccagggaacccagccuggcagagauggcgugguccgggugugggacgugaaaaauccggaucuucugaacaaucaauucgggacaaugcccucccucacccuggcuugucuuacgaagcagggacaggucgaccugaacgaugccguucucgcucugaccgaccugggccucaucuacacagccaaguauccuaauagcucugaccuggaucgccuuucccaaagccaucccauucugaacaugguggacaucaaaaaguccucucucaauaucagcggguacaacuuuucccugggagcggccgugaaagcuggcgccugcaugcuugaugggggaaauaugcuggagaccauuaaggucacaccucagaccauggacggcauccucaaaagcauucugaaggugaaaagaucucugggcauguucguuuccgauacgcccggggaacggaacccuuaugagaacauccucuacaagauuugucugagcggagacggcuggccguauaucgcuucucgcacaagcauuguggggagagccugggaaaauaccacagucgaucuugaguccgacggaaagccccagaaagugggcucugcggggagcaacaagucccugcagagcgccggauuuccuaccggccucaccuacucucaacugaugacacugaaagauuccaugaugcagcuugaccccagcgcuaagacguggaucgauaucgagggccggccugaagaccccguugagauugcccucuaccagccgaugucugggugcuauauccacuucuuuagagaaccuaccgaccugaaacaguucaagcaagaugcuaaguacucccauggaauugacguggccgaucuguuucccgcccagccuggccucacaagcgcugucaucgaggcgcugccccgcaauauggugcuuaccugucagggguccgacgauauuaaacggcugcucgacucucagggaagacgcgauaucaagcugaucgacauugcccugagcaaagcugauucccggagauucgaaaacgccgucugggaccaaugcaaggaucuuugucacaugcauacaggcgugguuguggagaaaaagaagcgcgggggcaaagaggaaaucacgccccacugcgcccucauggacuguauuauguaugaugcugccgucucuggaggccugaauaucccugugcugcgggcgguucucccgagagacaugguguuucgcaccagcucccccaaggucgugcugugaggacuaguuauaagacugacuagcccgaugggccucccaacgggcccuccuccccuccuugcaccgagauuaauaaaaaaaaaaaaaaaaaaaaaaaaaaaaaaaaaaaaaaaaaaaaaaaaaaaaaaaaaaaaaaaaaaaaaaaaaaaaaaaaaaaaaaaaaaaaaaaaaaaa

SEQ ID NO: 19303 - RNA, 1962 nt, Artificial Sequence
  mRNA product Design i-3 (A100) comprising derived and/or modified sequence from LASV(ISTH2010-NIG-2012;Clade II)__AIT17483__SP-HsPLAT_NP(2-569) (opt5)
aggagaaagcuuaccauggacgccaugaagagaggccugugcugugugcuccugcuuugcggggcugucuucguuagccccagcgccuccaaggaggugaaaucuuuccuguggacccagagccucagacgggaacuguccggcuacugcucuaacaucaaacuucaagucguuaaggacgcucaggcccugcuccacgggcuggauuuuagcgagguguccaaugugcagcgccuuaugagaaagcagaaacgggacgauucugaccugaagcgccucagagaucugaaccaagcggucaauaaccugguggaacucaagagcacacagcagaaauccauucugcggguuggaacgcuuaccagcgacgaucugcucacacuggcugccgaccuugagaagcugaaaucuaaggugauccgcaccgaaagaccccucuccagcggcgucuauauggggaaucugucuacacagcaacuggagcagcggcgcgcccuccugaaccuuauuggaauggugggcggggcucagggaacccagccuggcagagauggcguugugcgggucugggacgugaaaaauccggaucugcucaacaaucaauucgggacaaugcccucccugacccuugccugucugacgaagcagggacagguggaccucaacgaugcuguccuggcccugaccgaccucggccugaucuacacagcgaaguauccuaauagcucugaccuugaucgccugucccaaagccaucccauucucaacaugguugacaccaaaaaguccucucugaauaucagcggguuuaacuucucccuuggagccgcugugaaagccggcgcuugcaugcuggaugggggaaauaugcucgagacaaucaaggugaccccucagacgauggacggcauucugaaaagcauccugaaggucaaaaagucucucggcauguuuguguccgauacacccggggaaagaaacccuuacgagaacauucuguauaagaucugucuuagcggagacggcuggccguacauugccucucggaccagcaucguugggcgcgcgugggaaaauacaaccguggaucuggaguccgacggaaaaccccacaaggucggcaccgccgggucuaacaaaagccuccaguccgcuggauucccuacaggccugacguauagccagcugaugacccuuaaggauucuaugaugcaacucgaccccuccgccaaaacauggauugauaucgagggcagaccugaagaccccguggagaucgcucuguaccagccgaugagcgggugcuacauucacuuuuuccgggaaccuaccgaccugaagcaguuuaagcaggaugccaaauauucucauggaaucgacguugccgaucucuuccccgcucaaccuggccugacauccgcggugauugaggcccuucccagaaauaugguccugaccugucaggggagcgacgauaucaagcgccuccuggacucccagggacggagagauauuaaacugaucgacaucgcucuuucuaaggccgauagccgccgguuugaaaacgccgugugggaccagugcaaagaucucugucauaugcacacgggcgucgugguugagaagaagaaaagagggggcaaggaggaaauuacaccccacugcgcucugauggacuguaucauguacgaugccgcgguguccggaggccugaauauuccuguccuccgcgcugugcugccgcgggacaugguuuucagaaccucuagccccaaagugguccuuugaggacuaguuauaagacugacuagcccgaugggccucccaacgggcccuccuccccuccuugcaccgagauuaauaaaaaaaaaaaaaaaaaaaaaaaaaaaaaaaaaaaaaaaaaaaaaaaaaaaaaaaaaaaaaaaaaaaaaaaaaaaaaaaaaaaaaaaaaaaaaaaaaaaa

SEQ ID NO: 19304 - RNA, 1962 nt, Artificial Sequence
  mRNA product Design i-3 (A100) comprising derived and/or modified sequence from LASV(Lassa virus/H.sapiens-wt/NGA/2015/ISTH_0543;Clade II)__AVO03640__SP-HsPLAT_NP(2-569) (opt5)
aggagaaagcuuaccauggacgccaugaagagaggccugugcugugugcuccugcuuugcggggcugucuucguuagccccagcgccuccaaggaggugaaaucuuuccuguggacccagagccucagacgggaacuguccggcuacugcucuaacaucaaacuucaagucguuaaggacgcucaggcccugcuccacgggcuggauuuuagcgagguguccaaugugcagcgccuuaugagaaagcagaaacgggacgauucugaccugaagcgccucagagaucugaaccaagcggucaauaaccugguggaacucaagagcacacagcagaaauccauucugcggguuggaacgcuuaccagcgacgaucugcucacacuggcugccgaccuugagaagcugaaaucuaaggugauccgcaccgaaagaccccucuccagcggcgucuauauggggaaucugucuacacagcaacuggagcagcggcgcgcccuccugaacaugauuggaauggugggcggggcucagggaacccagccuggcagagauggcguugugcgggucugggacgugaaaaauccggaucuucugaacaaucaauucgggacaaugcccucccucacccuggccugucuuacgaagcagggacagguggaccugaacgaugcuguccucgcccugaccgaccugggccucaucuacacagcgaaguauccuaauagcucugaccuggaucgccuuucccaaagccaucccauucugaacaugguugacaccaaaaaguccucucucaauaucagcggguacaacuuuucccugggagccgcugugaaagccggcgcuugcaugcuugaugggggaaauaugcuggagacaaucaaggugaccccucagacgauggacggcauucucaaaagcauccugaaggucaaaaagucucugggcauguucguguccgauacacccggggaaagaaacccuuaugagaacauucucuacaagaucugucugagcggagacggcuggccguauauugccucucggaccagcaucguugggcgcgcgugggaaaauacaaccguggaucuugaguccgacggaaaaccccagaaggucggcucugccgggagcaacaaaucccugcagagcgcuggauuuccuaccggccucacauacucucaacugaugacgcugaaggauuccaugaugcagcuugaccccagcgccaaaaccuggauugauaucgagggcagaccugaagaccccguggagaucgcucucuaccagccgaugucugggugcuauauucacuucuuucgggaaccuacagaccugaagcaguucaagcaagaugccaaauacucccauggaaucgacguugccgaucuguuucccgcucagccuggccucaccagcgcggugauugaggcccugcccagaaauaugguccuuacaugucagggguccgacgauaucaagcgccugcucgacucucagggacggaaagauauuaagcugaucgacaucgcucugagcaaagccgauuccagacgcuucgaaaacgccgugugggaccaaugcaaggaucuuugucacaugcauaccggcgucgugguugagaagaaaaagagagggggcaaagaggaaauuacgccccacugcgcucucauggacuguaucauguaugaugccgcggugucuggaggccugaauauuccuguccugcgggcugugcucccgcgcgacaugguuuuucggacaagcucccccaaggugguccugugaggacuaguuauaagacugacuagcccgaugggccucccaacgggcccuccuccccuccuugcaccgagauuaauaaaaaaaaaaaaaaaaaaaaaaaaaaaaaaaaaaaaaaaaaaaaaaaaaaaaaaaaaaaaaaaaaaaaaaaaaaaaaaaaaaaaaaaaaaaaaaaaaaaa

SEQ ID NO: 19305 - RNA, 1962 nt, Artificial Sequence
  mRNA product Design i-3 (A100) comprising derived and/or modified sequence from LASV(Lassa virus/H.sapiens-wt/NGA/2016/ISTH_0009;Clade II)__AVO03572__SP-HsPLAT_NP(2-569) (opt5)
aggagaaagcuuaccauggacgccaugaagagaggccugugcugugugcuccugcuuugcggggcugucuucguuagccccagcgccuccaaggaggugaaaucuuuccuguggacccagagccucagacgggaacuguccggcuacugcucuaacaucaaacuucaagucguuaaggacgcucaggcccugcuccacgggcuggauuuuagcgagguguccaaugugcagcgccuuaugagaaagcagaaacgggacgauucugaccugaagcgccucagagaucugaaccaagcggucaauaaccugguggaacucaagagcacacagcagaaauccauucugcggguuggaacgcuuaccagcgacgaucugcucacacuggcugccgaccuugagaagcugaaaucuaaggugauccgcaccgaaagaccccucuccagcggcgucuauauggggaaucugucuacacagcaacuggagcagcggcgcgcccuccugaacaugauuggaauggugggcggggcucagggaacccagccuggcagagauggcguugugcgggucugggacgugaaaaauccggaucuucugaacaaucaauucgggacaaugcccucccucacccuggccugucuuacgaagcagggacagguggaccugaacgaugcuguccucgcccugaccgaccugggccucaucuacacagcgaaguauccuaauagcucugaccuggaucgccuuucccaaagccaucccauucugaacaugguugacaccaaaaaguccucucucaauaucagcggguacaacuuuucccugggagccgcugugaaagccggcgcuugcaugcuugaugggggaaauaugcuggagacaaucaaggugaccccucagacgauggacggcauucucaaaagcauccugaaggucaaaaagucucugggcauguucguguccgauacacccggggaaagaaacccuuaugagaacauucucuacaagaucugucugagcggagacggcuggccguauauugccucucggaccagcaucguugggcgcgcgugggaaaauacaaccguggaucuugaguccgacggaaaaccccagaaggucggcucugccgggagcaacaaaucccugcagagcgcuggauuuccuaccggccucacauacucucaacugaugacgcugaaggauuccaugaugcagcuugaccccagcgccaaaaccuggauugauaucgagggcagaccugaagaccccguggagaucgcucucuaccagccgaugucugggugcuauauucacuucuuucgggaaccuacagaccugaagcaguucaagcaagaugccaaauacucccauggaaucgacguugccgaucuguuucccgcucagccuggccucaccagcgcggugauugaggcccugcccagaaauaugguccuuacaugucagggguccgacgauaucaagcgccugcucgacucucagggacggagagauauuaaacugaucgacaucgcucugagcaaggccgauucccgccgguucgaaaacgccgugugggaccaaugcaaagaucuuugucacaugcauaccggcgucgugguugagaagaagaaaagagggggcaaggaggaaauuacgccccacugcgcucucauggacuguaucauguaugaugccgcggugucuggaggccugaauauuccuguccugcgcgcugugcucccgcgggacaugguuuuuagaacaagcucccccaaagugguccugugaggacuaguuauaagacugacuagcccgaugggccucccaacgggcccuccuccccuccuugcaccgagauuaauaaaaaaaaaaaaaaaaaaaaaaaaaaaaaaaaaaaaaaaaaaaaaaaaaaaaaaaaaaaaaaaaaaaaaaaaaaaaaaaaaaaaaaaaaaaaaaaaaaaa

SEQ ID NO: 19306 - RNA, 1962 nt, Artificial Sequence
  mRNA product Design i-3 (A100) comprising derived and/or modified sequence from LASV(Lassa virus/H.sapiens-wt/NGA/2016/ISTH_0017;Clade II)__AVO03568__SP-HsPLAT_NP(2-569) (opt5)
aggagaaagcuuaccauggacgccaugaagagaggccugugcugugugcuccugcuuugcggggcugucuucguuagccccagcgccuccaaggaggugaaaucuuuccuguggacccagagccucagacgggaacuguccggcuacugcucuagcaucaaacuucaagucguuaaggacgcucaggcccugcuccacgggcuggauuuuuccgaggugucuaacgugcagcgccuuaugagaaagcagaaacgggacgauagcgaccugaagcgccucagagaucugaaucaagcggucaacaaucugguggaacucaaguccacacagcagaaaagcauucugcggguuggaacgcuuaccucugacgaucugcucacacuggcugccgaccuugagaagcugaaauccaaggugauccgcaccgaaagaccccucagcucuggcgucuauauggggaaccuguccacacagcaacuggagcagcggcgcgcccuccugaauaugauuggaauggcuggcggggcccagggaacccagccuggcagagauggcgugguucgggugugggacgucaaaaacccggaucuucugaauaaccaauucgggacaaugcccagccucacccuggcuugucuuacgaagcagggacagguggaccugaaugaugccgugcucgcgcugaccgaccugggccucaucuacacagccaaguauccuaacucuuccgaccuggaucgccuuagccaaucccaucccauucugaauauggucgacaccaaaaagucuagccucaacaucuccggguacaauuuuagccugggagcugccguuaaagcuggcgccugcaugcuugaugggggaaacaugcuggagacaaucaaggugaccccucagacgauggacggcauucucaaaucuauccugaaggugaaaagaucccugggcauguucgucagcgaugcgcccggggaacggaauccuuaugagaacauucucuacaagaucugucugucuggagacggcuggccguauauugccagccgcacauccaucguggggagagcuugggaaaacaccacaguugaucuugagucugacggaaagccccagaaagugggcgccaccgggagcaauaagucccugcagagcgcuggauuuccuaccggccucacauacucucaacugaugacgcugaaagauuccaugaugcagcuugaccccagcgccaagaccuggauugauaucgagggccggccugaagaccccgucgagguggcccucuaccagccgguuucugggugcuauauccacuucuuuagagaaccuacagaccugaaacaguucaagcaagaugcuaaguacucccauggaauugacguggcggaucuguuucccgcccagccuggccucaccagcgcugucaucgaggcccugccccgcaacauggugcuuacaugucagggguccgacgauauuaaaaagcugcucgacucucagggacggaaagauaucaagcugauugacaucgcccugagcaaagcugauuccagacgcuucgaaaaugccgucugggaccaaugcaaggaucuuugucacaugcauaccggcgugguuguggagaagaaaaagagagggggcaaagaggaaaucacgccccacugcgcgcucauggacuguauuauguaugaugcugccgucucuggaggccugaacaucccugugcugcgggccguucucccgcgcgacaugguguuucggacaagcucccccaaggucgugcugugaggacuaguuauaagacugacuagcccgaugggccucccaacgggcccuccuccccuccuugcaccgagauuaauaaaaaaaaaaaaaaaaaaaaaaaaaaaaaaaaaaaaaaaaaaaaaaaaaaaaaaaaaaaaaaaaaaaaaaaaaaaaaaaaaaaaaaaaaaaaaaaaaaaa

SEQ ID NO: 19307 - RNA, 1962 nt, Artificial Sequence
  mRNA product Design i-3 (A100) comprising derived and/or modified sequence from LASV(Lassa virus/H.sapiens-wt/NGA/2018/ISTH_0959;Clade II)__AVV65100__SP-HsPLAT_NP(2-569) (opt5)
aggagaaagcuuaccauggacgccaugaagagaggccugugcugugugcuccugcuuugcggggcugucuucguuagccccagcgccuccaaggaggugaaaucuuuccuguggacccagagccucagacgggaacuguccggcuacugcucuaacaucaaacuucaagucguuaaggacgcucaggcccugcuccacgggcuggauuuuagcgagguguccaaugugcagcgccuuaugagaaagcagaaacgggacgauucugaccugaagcgccucagagaucugaaccaagcggucaauaaccugguggaacucaagagcacccagcagaaauccauucugcggguuggaacgcuuaccagcgacgaucugcucacacuggcugccgaccuugagaagcugaaaucuaaggugauccgcaccgaaagaccccucuccagcggcgucuauauggggaaucugucuacacagcaacuggagcagcggcgcgcccuccugaaccuuauuggaauggugggcggggcucagggaacccagccuggcagagauggcguugugcgggucugggacgugaaaaauccggaucugcucaacaaucaauucgggacaaugcccucccugacccuugccugucugacgaagcagggacagguggaccucaacgaugucguucuggcucugaccgaccucggccugaucuacacagccaaguauccuaauagcucugaccuugaucgccugucccaaagccaucccauucucaacaugguggacaccaaaaaguccucucugaauaucagcggguuuaacuucucccuuggagcggccgugaaagcuggcgccugcaugcuggaugggggaaauaugcucgagacaaucaaggucaccccucagacgauggacggcauucugaaaagcauccugaaggugaaaaagucucucggcauguuuguuuccgauacacccggggaaagaaacccuuacgagaacauucuguauaagaucugucuuagcggagacggcuggccguacauugcuucucggaccagcaucguggggcgcgccugggaaaauacaaccgucgaucuggaguccgacggaaaaccccacaaggugggcaccgcggggucuaacaaaagccuccaguccgccggauucccuacaggccugacguauagccagcugaugacccuuaaggauucuaugaugcaacucgaccccuccgcuaaaacauggauugauaucgagggcagaccugaagaccccguugagaucgcccuguaccagccgaugagcgggugcuacauucacuuuuuccgggaaccuaccgaccugaagcaguuuaagcaggaugcuaaauauucucauggaaucgacguggccgaucucuuccccgcccaaccuggccugacauccgcugucauugaggcgcuucccagaaauauggugcugaccugucaggggagcgacgauaucaagcgccuccuggacucccagggacggaaagauauuaagcugaucgacaucgcccuuucuaaaacggauagcagacgcuuugaaaacgcugucugggaccagugcaaggaucucugucauaugcacacaggcgugguuguggagaagaaaaagagagggggcaaagaggaaauuacaccccacugcgcccugauggacuguaucauguacgaugccgcugucuccggaggccugaauauuccugugcuccgggccguucugccgcgcgacaugguguuccggaccucuagccccaaggucgugcuuugaggacuaguuauaagacugacuagcccgaugggccucccaacgggcccuccuccccuccuugcaccgagauuaauaaaaaaaaaaaaaaaaaaaaaaaaaaaaaaaaaaaaaaaaaaaaaaaaaaaaaaaaaaaaaaaaaaaaaaaaaaaaaaaaaaaaaaaaaaaaaaaaaaaa

SEQ ID NO: 19308 - RNA, 1962 nt, Artificial Sequence
  mRNA product Design i-3 (A100) comprising derived and/or modified sequence from LASV(LASV003-NIG-2008;Clade II)__AIT17581__SP-HsPLAT_NP(2-569) (opt5)
aggagaaagcuuaccauggacgccaugaagagaggccugugcugugugcuccugcuuugcggggcugucuucguuagccccagcgccuccaaggaggugaaaucuuuccuguggacccagagccucagacgggaacuguccggcuacugcucuagcaucaaacuucaagucguuaaggacgcucaggcccugcuccacgggcuggauuuuuccgaggugucuaacgugcagcgccuuaugagaaagcagaaacgggacgauagcgaccugaagcgccucagagaucugaaucaagcggucaacaaucugguggaacucaaguccacccagcagaaaagcguucugcgggugggaacgcuuaccucugacgaucugcucacacuggcugccgaccuugagaagcugaaauccaaggucauucgcaccgaaagaccccucagcucuggcguguauauggggaaccuguccgcccagcaacuggagcagcggcgcacacuccugaauaugaucggaaugguuggcggggcucagggaacccagccuggcagagauggcgugguccgggugugggacgugaaaaacccggaucuucugaauaaccaauucgggacaaugcccagccucacccuggccugucuuacgaagcagggacaggucgaccugaaugauguugugcucgcucugaccgaccugggccucauuuacacagccaaguauccuaacucuuccgaccuggaucgccuuagccaaucccaucccauccugucuaugguggacaccaaaaagagcucccucaauauuagcggguacaacuuuucucugggagcggccgucaaagcuggcgccugcaugcuugaugggggaaauaugcuggagacaaucaaggugaccccucagacgauggacggcauccucaaauccauucugaagguuaaaaagagccugggcauguucgugucugauacacccggggaaagaaacccuuaugagaauauccucuacaagauuugucugagcggagacggcuggccguauaucgcuucccggaccucuauugucgggcgcgccugggaaaacacaaccguggaucuugagagcgacggaaaaccccagaagguuggcaccgcgggguccaacaaaagccugcagucugccggauuuccuacaggccucacguacucccaacugaugacccugaaggauagcaugaugcagcuugaccccucugcuaaaacauggaucgauauugagggcagaccugaagaccccguggagaucgcccucuaccagccgauguccgggugcuauauccacuucuuucgggaaccuaccgaccugaagcaguucaagcaagaugcuaaauacagccauggaauugacgucacagaucuguuucccgcccagccuggccucaccuccgccgugaucgaggcucugcccagaaauaugguccuuacgugucaggggucugacgauauuaagcgccugcucgacagccagggacggagagauaucaaacugauugacaucgcgcuguccaaggccgauucucgccgguucgaaaacgcugugugggaccaaugcaaagaucuuugucacaugcauacaggcguuguggucgagaagaagaaaagagggggcaaggaggaaaucacaccccacugcgcccucauggacuguauuauguaugaugccgcugugagcggaggccugaauaucccuguucugcgcgccgugcucccgcgggacauggucuuuagaaccuccagccccaaaguggugcugugaggacuaguuauaagacugacuagcccgaugggccucccaacgggcccuccuccccuccuugcaccgagauuaauaaaaaaaaaaaaaaaaaaaaaaaaaaaaaaaaaaaaaaaaaaaaaaaaaaaaaaaaaaaaaaaaaaaaaaaaaaaaaaaaaaaaaaaaaaaaaaaaaaaa

SEQ ID NO: 19309 - RNA, 1962 nt, Artificial Sequence
  mRNA product Design i-3 (A100) comprising derived and/or modified sequence from LASV(LASV035-NIG-2009;Clade II)__AIT17589__SP-HsPLAT_NP(2-569) (opt5)
aggagaaagcuuaccauggacgccaugaagagaggccugugcugugugcuccugcuuugcggggcugucuucguuagccccagcgccuccaaggaggugaaaucuuuccuguggacccagagccucagacgggaacuguccggcuacugcucuagcaucaaacuucaagucguuaaagacgcucaggcccugcuccacgggcuggauuuuuccgaggugucuaacgugcagcgccuuaugagaaagcagaaacgggacgauagcgaccugaagcgccucagagaucugaaucaagcggucaacaaucugguggaacucaaguccacacagcagaaaagcauucugcggguuggaacgcuuaccucugacgaucugcucacacuggcugccgaccuugagaagcugaaauccaaggugauccgcaccgaaagaccccucagcucuggcgucuauauggggaaccuguccgcccagcaacuggagcagcggcgcgcucuccugaauaugauuggaauggugggcggggcccagggaacacagccuggcagagauggcguugugcgggucugggacgugaaaaacccggaucuucugaauaaccaauucgggaccaugcccagccucacacuggcuugucuuaccaagcagggacagguggaccugaaugaugccguccucgcgcugacggaccugggccucaucuacaccgccaaguauccuaacucuuccgaccuggaucgccuuagccaaucccaucccauucugaauaugguugacacaaagaagucuagccucaacaucuccggguacaauuuuagccugggagcugccgugaaagcuggcgccugcaugcuugaugggggaaacaugcuggagaccaucaaggugacaccucagaccauggacggcauucucaaaucuauccugaaggucaaaagaucccugggcauguucgugagcgauacgcccggggaacggaauccuuaugagaacauucucuacaagaucugucugucuggagacggcuggccguauauugcgagccgcacauccaucguugggagagccugggaaaacaccacaguggaucuugagucugacggaaagccccagaaagucggcaccaccgggagcaauaagucccugcagagcgcuggauuuccuacaggccucacguacucucaacugaugacccugaaagauuccaugaugcagcuugaccccagcgccaagacauggauugauaucgagggccggccugaagaccccguggagaucgcucucuaccagccgaugucugggugcuauauucacuucuuuagagaaccuaccgaccugaaacaguucaagcaagaugccaaguacucccauggaaucgacguugccgaucuguuucccgcucagccuggccucacaagcgcggugauugaggcccugccccgcaacaugguccuuaccugucagggguccgacgauaucaaaaagcugcucgacucucagggacggagagauauuaaacugaucgacaucgcucugagcaaggccgauucccgcaaauucgaaaaugccgugugggaccaaugcaaggaucuuugucacaugcauacgggcgucgugguugagaagaaaaagagagggggcaaagaggaaauuacaccccacugcgcucucauggacuguaucauguaugaugccgcggugucuggaggccugaacauuccuguccugcgggcugugcucccgcgcgacaugguuuuucggaccagcucccccaaggugguccugugaggacuaguuauaagacugacuagcccgaugggccucccaacgggcccuccuccccuccuugcaccgagauuaauaaaaaaaaaaaaaaaaaaaaaaaaaaaaaaaaaaaaaaaaaaaaaaaaaaaaaaaaaaaaaaaaaaaaaaaaaaaaaaaaaaaaaaaaaaaaaaaaaaaa

SEQ ID NO: 19310 - RNA, 1962 nt, Artificial Sequence
  mRNA product Design i-3 (A100) comprising derived and/or modified sequence from LASV(LASV1000-NIG-2009;Clade II)__AIT17783__SP-HsPLAT_NP(2-569) (opt5)
aggagaaagcuuaccauggacgccaugaagagaggccugugcugugugcuccugcuuugcggggcugucuucguuagccccagcgccuccaaggaggugaaaucuuuccuguggacccagagccucagacgggaacuguccggcuacugcucuaacaucaaacuucaagucguuaaggacgcucaggcccugcuccacgggcuggauuuuagcgagguguccaaugugcagcgccuuaugagaaagcagaaacgggacgauucugaccugaagcgccucagagaucugaaccaagcggucaauaaccugguggaacucaagagcacacagcagaaauccauucugcggguuggaacgcuuaccagcgacgaucugcucacacuggcugccgaccuugagaagcugaaaucuaaggugauccgcaccgaaagaccccucuccagcggcgucuauauggggaaucugucuacacagcaacuggagcagcggcgcgcccuccugaacaugauuggaauggugggcggggcucagggaacccagccuggcagagauggcguugugcgggucugggacgugaaaaauccggaucuucugaacaaucaauucgggacaaugcccucccucacccuggccugucuuacgaagcagggacagguggaccugaacgaugucguucucgcucugaccgaccugggccucaucuacacagccaaguauccuaauagcucugaccuggaucgccuuucccaaagccaucccauucugaacaugguggacaccaaaaaguccucucucaauaucagcggguacaacuuuucccugggagcggccgugaaagcuggcgccugcaugcuugaugggggaaauaugcuggagacaaucaaggucaccccucagacgauggacggcauucucaaaagcauccugaaggugaaaaagucucugggcauguucguuuccgauacacccggggaaagaaacccuuaugagaacauucucuacaagaucugucugagcggagacggcuggccguauauugcuucucggaccagcaucguggggcgcgccugggaaaauacaaccgucgaucuugaguccgacggaaaaccccagaaggugggcaccgcggggucuaacaaaagccugcaguccgccggauuuccuacaggccucacguacagccaacugaugacccugaaggauucuaugaugcagcuugaccccuccgcuaaaacauggauugauaucgagggcagaccugaagaccccguugagaucgcccucuaccagccggugagcgggugcuauauucacuucuuucgggaaccuaccgaccugaagcaguucaagcaagaugcuaaauacucucauggaaucgacgucgccgaucuguuucccgcccagccuggccucacauccgcugugauugaggcgcugcccagaaauaugguccuuaccugucaggggagcgacgauaucaagcgccugcucgacucccagggacggagagauauuaaacugaucgacaucgcccugucuaaggcugauagccgccgguucgaaaacgccgugugggaccaaugcaaagaucuuugucacaugcauacgggcguuguggucgagaagaagaaaagagggggcaaggaggaaauuacaccccacugcgcccucauggacuguaucauguaugaugcugccguguccggaggccugaauauuccuguucugcgcgcggugcucccgcgggacauggucuuuagaaccucuagccccaaaguggugcugugaggacuaguuauaagacugacuagcccgaugggccucccaacgggcccuccuccccuccuugcaccgagauuaauaaaaaaaaaaaaaaaaaaaaaaaaaaaaaaaaaaaaaaaaaaaaaaaaaaaaaaaaaaaaaaaaaaaaaaaaaaaaaaaaaaaaaaaaaaaaaaaaaaaa

SEQ ID NO: 19311 - RNA, 1962 nt, Artificial Sequence
  mRNA product Design i-3 (A100) comprising derived and/or modified sequence from LASV(LASV221-NIG-2010;Clade II)__AIT17625__SP-HsPLAT_NP(2-569) (opt5)
aggagaaagcuuaccauggacgccaugaagagaggccugugcugugugcuccugcuuugcggggcugucuucguuagccccagcgccuccaaggaggugaaaucuuuccuguggacccagagccucagacgggaacuguccggcuacugcucuagcaucaaacuucaagucguuaaggacgcucaggcccugcuccacgggcuggauuuuuccgaggugucuaacgugcagcgccuuaugagaaagcagcggcgcgacgauagcgaccugaaaagacuccgggaucugaaucaagcggucaacaaucugguggaacucaaguccacacagcaaaagagcauucugcgcguuggaacgcuuaccucugacgaucugcucacacuggcugccgaccuugagaaacugaaguccaaagugaucagaaccgaacggccccucagcucuggcgucuauauggggaaccuguccacacagcagcuggagcagcgcagagcccuccugaauaugauuggaauggugggcggggcucagggaacccagccuggccgggauggcguugugcgcgucugggacgugaagaacccggaucuucugaauaaccaauucgggacaaugcccagccucacccuggccugucuuacgaaacagggacagguggaccugaaugaugcuguccucgcccugaccgaccugggccucaucuacacagcgaaguauccuaacucuuccgaccuggauagacuuagccaaucccaucccauucugaauaugguugacaccaagaaaucuagccucaacaucuccggguacaauuuuagccugggagccgcugugaaggccggcgcuugcaugcuugaugggggaaacaugcuggagacaaucaaagugaccccucagacggucgacggcauucucaagucuauccugaaagugaagcggucccugggcauguucguuagcgauacacccggggaacgcaauccuuaugagaacauucucuacaaaaucugucugucuggagacggcuggccguauauugccagcagaaccuccaucguggggcgggcgugggaaaacacaaccgucgaucuugagucugacggaaagccccagaaggugggcaccgccgggagcaauaaaucccugcagagcgcuggauuuccuacaggccucacguacucucaacugaugacccugaaggauuccaugaugcagcuugaccccagcgccaaaacauggauugauaucgagggcagaccugaagaccccguugagaucgcucucuaccagccgaugucugggugcuauauucacuucuuucgcgaaccuaccgaccugaagcaguucaaacaagaugccaaguacucccauggaaucgacguggccgaucuguuucccgcucagccuggccucacaagcgcggucauugaggcccugccccggaacauggugcuuaccugucagggguccgacgauaucaagagacugcucgacucucagggacgccgggauauuaaacugaucgacaucgcucugagcaaggccgauuccagaaaauucgaaaaugccgucugggaccaaugcaaggaucuuugucacaugcauacgggcgugguuguggagaaaaagaagcgcgggggcaaagaggaaauuacaccccacugcgcucucauggacuguaucauguaugaugccgcggucucuggaggccugaacauuccugugcugcgggcuguucucccgagagacaugguguuucgcaccagcucccccaaggucgugcugugaggacuaguuauaagacugacuagcccgaugggccucccaacgggcccuccuccccuccuugcaccgagauuaauaaaaaaaaaaaaaaaaaaaaaaaaaaaaaaaaaaaaaaaaaaaaaaaaaaaaaaaaaaaaaaaaaaaaaaaaaaaaaaaaaaaaaaaaaaaaaaaaaaaa

SEQ ID NO: 19312 - RNA, 1962 nt, Artificial Sequence
  mRNA product Design i-3 (A100) comprising derived and/or modified sequence from LASV(LASV237-NIG-2010;Clade II)__AIT17639__SP-HsPLAT_NP(2-569) (opt5)
aggagaaagcuuaccauggacgccaugaagagaggccugugcugugugcuccugcuuugcggggcugucuucguuagccccagcgccuccaaggaggugaaaucuuuccuguggacccagagccucagacgggaacuguccggcuacugcucuaacaucaaacuucaagucguuaaggacgcucaggcccugcuccacgggcuggauuuuagcgagguguccaaugugcagcgccuuaugagaaagcagaaacgggacgauucugaccugaagcgccucagagaucugaaccaagcggucaauaaccugguggaacucaagagcacacagcagaaauccauucugcggguuggaacgcuuaccagcgacgaucugcucacacuggcugccgaccuugagaagcugaaaucuaaggugauccgcaccgaaagaccccucuccagcggcgucuauauggggaaucugucuacacagcaacuggagcagcggcgcgcccuccugaacaugauuggaauggugggcggggcucagggaacccagccuggcagagauggcguugugcgggucugggacgugaaaaauccggaucuucugaacaaucaauucgggacaaugcccucccucacccuggccugucuuacgaagcagggacagguggaccugaacgaugcuguccucgcccugaccgaccugggccucaucuacacagcgaaguauccuaauagcucugaccuggaucgccuuucccaaagccaucccauucugaacaugguugacaucaaaaaguccucucucaauaucagcggguacaacuuuucccugggagccgcugugaaagccggcgcuugcaugcuugaugggggaaauaugcuggagaccauuaaggugacaccucagaccauggacggcauccucaaaagcauucugaaggucaaaagaucucugggcauguucguguccgauacgcccggggaacggaacccuuaugagaacauccucuacaagauuugucugagcggagacggcuggccguauaucgccucucgcacaagcauuguugggagagcgugggaaaauaccacaguggaucuugaguccgacggaaagccccagaaagucggcucugccgggagcaacaagucccugcagagcgcuggauuuccuaccggccucaccuacucucaacugaugacacugaaagauuccaugaugcagcuugaccccagcgccaagacguggaucgauaucgagggccggccugaagaccccguggagauugcucucuaccagccgaugucugggugcuauauccacuucuuuagagaaccuaccgaccugaaacaguucaagcaagaugccaaguacucccauggaauugacguugccgaucuguuucccgcucagccuggccucacaagcgcggugaucgaggcccugccccgcaauaugguccuuaccugucagggguccgacgauauuaaacggcugcucgacucucagggaagacgcgauaucaagcugaucgacauugcucugagcaaagccgauucccggagauucgaaaacgccgugugggaccaaugcaaggaucuuugucacaugcauacaggcgucgugguugagaaaaagaagcgcgggggcaaagaggaaaucacgccccacugcgcucucauggacuguauuauguaugaugccgcggugucuggaggccugaauaucccuguccugcgggcugugcucccgagagacaugguuuuucgcaccagcucccccaaggugguccugugaggacuaguuauaagacugacuagcccgaugggccucccaacgggcccuccuccccuccuugcaccgagauuaauaaaaaaaaaaaaaaaaaaaaaaaaaaaaaaaaaaaaaaaaaaaaaaaaaaaaaaaaaaaaaaaaaaaaaaaaaaaaaaaaaaaaaaaaaaaaaaaaaaaa

SEQ ID NO: 19313 - RNA, 1962 nt, Artificial Sequence
  mRNA product Design i-3 (A100) comprising derived and/or modified sequence from LASV(LASV253-NIG-2011;Clade II)__AIT17671__SP-HsPLAT_NP(2-569) (opt5)
aggagaaagcuuaccauggacgccaugaagagaggccugugcugugugcuccugcuuugcggggcugucuucguuagccccagcgccuccaaggaggugaaaucuuuccuguggacccagagccucagacgggaacuguccggcuacugcucuagcaucaaacuucaagucguuaaggacgcucaggcccugcuccacgggcuggauuuuuccgaggugucuaacgugcagcgccuuaugagaaagcagaaacgggacgauagcgaccugaagcgccucagagaucugaaucaagcggucaacaaucugguggaacucaaguccacccagcagaaaagcguucugcgggugggaacgcuuaccucugacgaucugcucacacuggcugccgaccuugagaagcugaaauccaaggucauucgcaccgaaagaccccucagcucuggcguguauauggggaaccuguccacacagcaacuggagcagcggcgcgcccuccugaauaugaucggaaugguuggcggggcucagggaacccagccuggcagagauggcgugguccgggugugggacgugaaaaacccggaucuucugaauaaccaauucgggacaaugcccagccucacccuggccugucuuacgaagcagggacaggucgaccugaaugauguugugcucgcucugaccgaccugggccucauuuacacagccaaguauccuaacucuuccgaccuggaucgccuuagccaaucccaucccauccugaauaugguggacaccaaaaagucuagccucaacauuuccggguacaauuuuagccugggagcggccgucaaagcuggcgccugcaugcuugaugggggaaacaugcuggagacaaucaaggugaccccucagacgauggacggcauccucaaaucuauucugaagguuaaaaagucccugggcauguucgugagcgauacacccggggaaagaaauccuuaugagaacauccucuacaagauuugucugucuggagacggcuggccguauaucgcuagccggaccuccauugucgggcgcgccugggaaaacacaaccguggaucuugagucugacggaaaaccccagaagguuggcaccgcggggagcaauaaaucccugcagagcgccggauuuccuacaggccucacguacucucaacugaugacccugaaggauuccaugaugcagcuugaccccagcgcuaaaacauggaucgauauugagggcagaccugaagaccccguggagaucgcccucuaccagccgaugucugggugcuauauccacuucuuucgggaaccuaccgaccugaagcaguucaagcaagaugcuaaauacucccauggaauugacgucacagaucuguuucccgcccagccuggccucaccagcgccgugaucgaggcucugcccagaaacaugguccuuacgugucagggguccgacgauauuaagcgccugcucgacucucagggacggagagauaucaaacugauugacaucgcgcugagcaaggccgauucccgccgguucgaaaaugcugugugggaccaaugcaaagaucuuugucacaugcauacaggcguuguggucgagaagaagaaaagagggggcaaggaggaaaucacaccccacugcgcccucauggacuguauuauguaugaugccgcugugucuggaggccugaacaucccuguucugcgcgccgugcucccgcgggacauggucuuuagaaccagcucccccaaaguggugcugugaggacuaguuauaagacugacuagcccgaugggccucccaacgggcccuccuccccuccuugcaccgagauuaauaaaaaaaaaaaaaaaaaaaaaaaaaaaaaaaaaaaaaaaaaaaaaaaaaaaaaaaaaaaaaaaaaaaaaaaaaaaaaaaaaaaaaaaaaaaaaaaaaaaa

SEQ ID NO: 19314 - RNA, 1962 nt, Artificial Sequence
  mRNA product Design i-3 (A100) comprising derived and/or modified sequence from LASV(LASV254-NIG-2011;Clade II)__AIT17675__SP-HsPLAT_NP(2-569) (opt5)
aggagaaagcuuaccauggacgccaugaagagaggccugugcugugugcuccugcuuugcggggcugucuucguuagccccagcgccuccaaggaggugaaaucuuuccuguggacccagagccucagacgggaacuguccggcuacugcucuagcaucaaacuucaagucguuaaggacgcucaggcccugcuccacgggcuggauuuuuccgaggugucuaacgugcagcgccuuaugagaaagcagaaacgggacgauagcgaccugaagcgccucagagaucugaaucaagcggucaacaaucugguggaacucaaguccacacagcagaaaagcguucugcgggugggaacgcuuaccucugacgaucugcucacacuggcugccgaccuugagaagcugaaauccaaggucauucgcaccgaaagaccccucagcucuggcguguauauggggaaccuguccacacagcaacuggagcagcggcgcgcccuccugaauaugaucggaaugguuggcggggcucagggaacccagccuggcagagauggcgugguccgggugugggacgugaaaaacccggaucuucugaauaaccaauucgggacaaugcccagccucacccuggccugucuuacgaagcagggacaggucgaccugaaugaugcuguucucgcccugaccgaccugggccucauuuacacagcgaaguauccuaacucuuccgaccuggaucgccuuagccaaucccaucccauccugaauaugguggacaccaaaaagucuagccucaacauuuccggguacaauuuuagccugggagccgcugugaaagccggcgcuugcaugcuugaugggggaaacaugcuggagacaaucaaggucaccccucagacgauggacggcauccucaaaucuauucugaaggugaaaaagucccugggcauguucguuagcgauacacccggggaaagaaauccuuaugagaacauccucuacaagauuugucugucuggagacggcuggccguauaucgccagccggaccuccauuguggggcgcgcgugggaaaacacaaucgucgaucuugagucugacggaaaaccccagaaggugggcaccgccgggagcaauaaaucccugcagagcgcuggauuuccuaccggccucacauacucucaacugaugacgcugaaggauuccaugaugcagcuugaccccagcgccaaaaccuggauugauaucgagggcagaccugaagaccccguugagaucgcucucuaccagccgaugucugggugcuauauucacuucuuucgggaaccuacagaccugaagcaguucaagcaagaugccaaauacucccauggaaucgacguggccgaucuguuucccgcucagccuggccucaccagcgcggucauugaggcccugcccagaaacauggugcuuacaugucagggguccgacgauaucaagcgccugcucgacucucagggacggagagauauuaaacugaucgacaucgcucugagcaaggccgauucccgccgguucgaaaaugccgucugggaccaaugcaaagaucuuugucacaugcauaccggcgugguuguggagaagaagaaaagagggggcaaggaggaaauuacgccccacugcgcucucauggacuguaucauguaugaugccgcggucucuggaggccugaacauuccugugcugcgcgcuguucucccgcgggacaugguguuuagaacaagcucccccaaagucgugcugugaggacuaguuauaagacugacuagcccgaugggccucccaacgggcccuccuccccuccuugcaccgagauuaauaaaaaaaaaaaaaaaaaaaaaaaaaaaaaaaaaaaaaaaaaaaaaaaaaaaaaaaaaaaaaaaaaaaaaaaaaaaaaaaaaaaaaaaaaaaaaaaaaaaa

SEQ ID NO: 19315 - RNA, 1962 nt, Artificial Sequence
  mRNA product Design i-3 (A100) comprising derived and/or modified sequence from LASV(Nig08-04;Clade II)__ADU56611__SP-HsPLAT_NP(2-569) (opt5)
aggagaaagcuuaccauggacgccaugaagagaggccugugcugugugcuccugcuuugcggggcugucuucguuagccccagcgccuccaaggaggugaaaucuuuccuguggacccagagccucagacgggaacuguccggcuacugcucuaacaucaaacuucaagucguuaaggacgcucaggcccugcuccacgggcuggauuuuagcgagguguccaaugugcagcgccuuaugagaaagcagaaacgggacgauggagaccugaagcgccucagagaucugaaccaagcggucaauaaccugguggaacucaagucuacccagcagaaaagcguucugcgggugggcacgcuuaccuccgacgaucugcucacacuggcugccgaccuugagaagcugaaaagcaaggucauucgcaccgaaagaccccucucuuccgggguguauaugggaaaucugagcacacagcaacuggagcagcggaaagcccuccugucuaugaucggcaugguugggggagcucagggcacccagccuggccgcgaugggguggucagagugugggacgugaagaacccggaucuucugaauaaccaauucggaacaaugcccucccucacccuggccugucuuacgaagcagggccaggucgaccugaaugaugcuguucucgcccugaccgaccuggggcucauuuacacagcgaaauauccuaacagcucugaccuggaucggcuuucccaaagccaucccauccugaauaugguggacaccaagaaauccucucucaacauuagcggauacaauuuuucccugggcgccgcugugaaggccggggcuugcaugcuugauggaggcaacaugcuggagacaaucaaagucaccccucagacgauggacggcauccucaagagcauucugaaagugaagcgcucucuggggauguucguuuccgauacacccggagaaagaaauccuuaugagaacauccucuacaagauuugucugagcggcgacggguggccguauaucgccucucggaccagcauugugggacgcgcgugggaaaacacaaccgucgaucuugaguccgacggcaaaccccagaagguggggaccgccggaucuaauaaaagccugcaguccgcuggcuuuccuacaggccucacguacagccaacugaugacccugaaggauucuaugaugcagcuugaccccuccgccaaaacauggaucgauauugaggggagaccugaagaccccguugagaucgcucucuaccagccgaugagcggaugcuauauccacuucuuucgggaaccuaccgaccugaagcaguucaagcaagaugccaaauacucucauggcauugacgugacagaucuguuuuccgcccagcccgggcucaccagcgcugucaucgaggcgcugccuagaaacauggugcuuacgugucagggauccgacgauauuaagaaacugcucgacucucagggccgccgggauaucaagcugauugacaucagccugaauaaagccgauuccagacgcuucgaaaacgcugucugggaccaaugcaaggaucuuugucacaugcauacaggggugguuguggagaagaaaaagcggggcggaaaagaggaaaucacaccccacugcgcccucauggacuguauuauguuugaugccgcugucucuggcgggcugaauauccccauucugagagccgugcucccucgcgacaugguuuuccggaccagcuccccgaaggugguccugugaggacuaguuauaagacugacuagcccgaugggccucccaacgggcccuccuccccuccuugcaccgagauuaauaaaaaaaaaaaaaaaaaaaaaaaaaaaaaaaaaaaaaaaaaaaaaaaaaaaaaaaaaaaaaaaaaaaaaaaaaaaaaaaaaaaaaaaaaaaaaaaaaaaa

SEQ ID NO: 19316 - RNA, 1965 nt, Artificial Sequence
  mRNA product Design i-3 (A100) comprising derived and/or modified sequence from LASV(GA391;Clade III)__AAA46284__SP-HsPLAT_NP(2-570) (opt5)
aggagaaagcuuaccauggacgccaugaagagaggccugugcugugugcuccugcuuugcggggcugucuucguuagccccagcgccuccaaggaggugagaucuugccuguggacccagagccuccggcgcgaacuguccggcuacuguucuaacaucaaacuucaagucguuaaggacgcucaggcccugcuccacgggcuggauuucagcgagguguccaaugugcagagacuuaugcggaaacagaagcgcgacgauggagaccugaaaagacuccgggaucugaaccaagcggucaauaaccugguggaacucaagucuacacagcagaaaagcguucugcgcgugggcacgcuuuccagcgacgaucugcucauucuggcugccgaccuugagaaacugaagucuaaagucaccagaacagaacggccccucuccagcgggguguauaugggaaaucugucuucccagcaacuggaucagcgcagagcccuccugaacaugaucggcaugaccgggguuagcggaggcggcaagggggcuucuaauggaauugugcgggucugggacgugaaaaacgccgagcuucugaauaaccaguuuggcacaaugccuucccucacccuggcuugccuuacaaagcaggggcaaguggaucugaaugacgccguccaggcgcucaccgaucugggacugaucuacacggccaaguauccgaacagcuccgaccucgaccgccugucucagagccaucccauucuuaauaugaucgauaccaaaaaguccagccugaacaucucuggcuacaauuucucccucggggcugccguuaaagcuggagccuguaugcuggacggcggcaacaugcuugagacaauuaaggugagcccucaaaccauggaugggauccugaaaucuauucucaaggugaaaaagagccugggaauguuugucuccgacacacccggcgaaagaaacccuuaugagaauauccuguacaagauuugccucucuggggauggauggagcuauaucgcgucccggaccagcauugugggccgcgccugggaaaacacgguuguggaccuggagcaggauaauaaaccccagaagaucgggaacggaggcucuaauaaaucccuucagagcgcuggcuucgccgcugggcugaucuacucucaacucaugacacugaaggacuuuaaauguuucaaccugauuccuaaugccaagaccuggauggauaucgagggaagaccggaagaccccgucgagauugcccuuuaccagccuuccagcggcugcuaugugcacuuuuuccgggaacccacagaucucaagcaguuuaaacaggacgcuaaguacucccaugggagagacguuaccgaucuguucgcggcccaaccuggacugaccucugcugugaucgaggcccucccccgcaacauggucauuacaugucagggcagcgaagacauccggaaacugcuugagucccaggggagacgcgauaucaagcugauugacaucacgcucucuaaagccgauagccggaaguuugagaaugcugugugggaccaguucaaggaucugugccacaugcauaccggcgucgugguugaaaagaagaaaagaggaggcaaggaggaaauuacaccgcacugugcccugauggacugcaucauguuugaugcggcuguguccgggggacuugacgccaaaguccuccgcgugguucugccucgggauaugguguucagaaccagcacacccaaggucgugcugugaggacuaguuauaagacugacuagcccgaugggccucccaacgggcccuccuccccuccuugcaccgagauuaauaaaaaaaaaaaaaaaaaaaaaaaaaaaaaaaaaaaaaaaaaaaaaaaaaaaaaaaaaaaaaaaaaaaaaaaaaaaaaaaaaaaaaaaaaaaaaaaaaaaa

SEQ ID NO: 19317 - RNA, 1962 nt, Artificial Sequence
  mRNA product Design i-3 (A100) comprising derived and/or modified sequence from LASV(Nig08-A19;Clade III)__ADU56619__SP-HsPLAT_NP(2-569) (opt5)
aggagaaagcuuaccauggacgccaugaagagaggccugugcugugugcuccugcuuugcggggcugucuucguuagccccagcgccuccaaggaggugaaaucuuuccuguggacccagagccucagacgggaacuguccggcuacugcucuaacaucaaacuucaagucguuaaggacgcucaggcccugcuccacgggcuggauuuuagcgagguguccaaugugcagcgccuuaugagaaagcagaaacgggacgauggagaccugaagcgccucagagaucugaaccaagcggucaauaaccugguggaacucaagucuacacagcagaaaagcguucugcgggugggcacgcuuuccagcgacgaucugcucguccuggcugccgaccuugagaagcugaaaucuaaggugguucgcaccgaaagaccccucuccagcgggauuuauaugggaaaucugucuucccagcaacuggaucagcggaaagcccuccugaacaugaucggcaugacagggggaaauggcggccgcaacaccacaagcgacgggauugugagagucugggaugugaagaaugcugagcuucugaacaaucaguucggaaccaugccuucucucacacuggccugucuuaccaagcagggccaaguggaccugaacgaugcuguccaggcccucacggaccuggggcugaucuacaccgcgaaauaucccaauuccagcgaccucgaucggcuggcccagucccauccgauucuuaacaugaucgacacaaagaaaucuagccugaauaucuccggauacaacuuuagccucggcgcugccguuaaggcuggggccugcaugcuggauggaggcaacaugcuugagaccauuaaagugucuccucaaacaauggacggcauccugaaguccauucucaaagugaagcgcagccuggggauguucaucucugauacccccggagaaagaaauccuuaugagaacauucuguacaagaucugucucagcggcgacggguggcccuauauugcgucccggacgucuaucgucggacgcgccugggaaaauacagugguugaucuggagagcgacaacaaaccucagaagaccggcaaugggggauccaacaaaagccuucagucugcuggcuuugccgcuggccugacauacucccagcucaugacccugaaggauagcaugcugcaacuugacccgaaugccaaaaccuggauggauaucgaggggagacccgaagacccuguggagauugcccucuaccagcccucuuccggaugcuauauccacuucuuucgggaaccuacagaccugaagcaguucaagcaggaugcuaaauacagccauggcauugacgucacggaucuguuugcggcccaacccgggcucaccuccgcugugaucgaggcccugccgagaaacaugguuauuacaugucagggaucugaagacauccgcaaacuucuggagagccagggccggagagauaucaagcucauugacaucucccugucuaagguggauagccgcaaauucgagaaugccgucugggaccaguuuaaggaucugugccacaugcauaccgggauuguggucgaaaagaaaaagcggggcggaaaagaggaaaucacaccucacugugcucuuauggacugcauuauguucgaugccgcgguguccggcgggguugacgcuaaggugcucagagccguccugccccgcgauaugguguuucggaccagcacgccuaaaguugugcugugaggacuaguuauaagacugacuagcccgaugggccucccaacgggcccuccuccccuccuugcaccgagauuaauaaaaaaaaaaaaaaaaaaaaaaaaaaaaaaaaaaaaaaaaaaaaaaaaaaaaaaaaaaaaaaaaaaaaaaaaaaaaaaaaaaaaaaaaaaaaaaaaaaaa

SEQ ID NO: 19318 - RNA, 1962 nt, Artificial Sequence
  mRNA product Design i-3 (A100) comprising derived and/or modified sequence from LASV(G1180-SLE-2010;Clade IV)__AIT17169__SP-HsPLAT_NP(2-569) (opt5)
aggagaaagcuuaccauggacgccaugaagagaggccugugcugugugcuccugcuuugcggggcugucuucguuagccccagcgccuccaaggagaucaaaucuuuccuguggacccagagccucagacgggaacuguccggcuacugcucuaacauuaagcugcaaguggucaaagacgcucaggcccugcuccacgggcuggauuuuagcgagguuuccaaugugcagcgccuuaugagaaaggaacggcgcgacgauaacgaccugaaaagacuccgggaucugaaucaggcggugaacaaucuggucgagcucaagucuacacaacaaaagagcauccugcgcgugggaacgcuuaccuccgacgaucugcucauucuggcugccgaccuugaaaaacuuaagagcaaaguuaucagaacagagcggccccucucugccggcguguauauggggaaccuguccagccagcagcuggaucagcgcagagcucuccugucuaugauuggaauguccagcggcaaucagcgggcccaggcugggcgcgacggagucgugagaguuugggaugugaagaacgucgagcuucugaauaaccaguucggcaccaugccuucucucacacuggccugucuuaccaaacaaggccagguggaccugaaugaugcggugcaggcccucacagaccuggggcugaucuacaccgcuaaguauccgaacacguccgaccucgaucggcugacccaaagccaucccauccuuaauaugauugacacaaagaaauccucucugaacaucagcggauacaauuuuucccucggcgccgcugucaaggccggggcgugcaugcuggauggaggcaacaugcuugaaaccauuaaaguuagcccucagacaauggacgggauccugaagucuauucucaaagugaagaaagcccugggaauguucaucuccgauacccccggcgagcgcaacccuuaugaaaauauucuguacaagaucugucucagcggcgacggguggcccuauaucgcuucuagaacgagcauuacaggacgggccugggagaacaccguggucgaucuggaguccgacggcaagccucagaaagcugggucuaauaacagcaauaagucccuucagagcgugggauuuacagccggccugaccuacucucaacucaugacccugaaagaugccaugcugcagcuugacccgaacgcuaagacauggauggauaucgaagggagacccgaggacccuguugaaauugcgcucuaccagcccuccagcggaugcuauauccacuucuuucgcgagccuacggaccugaaacaguucaagcaagaugccaaguacucucauggcauugacgugaccgaucuguuugcugcccagcccggccucacauccgccgucaucgacgcucugccgcggaauauggugaucaccugucaggggagcgaugacauuagaaaacuucuggaaucccagggacgcaaggauaucaaacucauugacaucgcccugucuaagacagauagccggaaauaugagaacgcgguuugggaccaauacaaggaucugugccacaugcauaccggcguggucguggagaagaaaaagagagggggaaaagaagagauuacgccucacugugcucuuauggacugcaucauguucgaugccgccgucuccggcgggcucaauacaucugugcugcgcgcuguucugccccgggacaugguguuuagaaccagcaccccucgcgucgugcucugaggacuaguuauaagacugacuagcccgaugggccucccaacgggcccuccuccccuccuugcaccgagauuaauaaaaaaaaaaaaaaaaaaaaaaaaaaaaaaaaaaaaaaaaaaaaaaaaaaaaaaaaaaaaaaaaaaaaaaaaaaaaaaaaaaaaaaaaaaaaaaaaaaaa

SEQ ID NO: 19319 - RNA, 1962 nt, Artificial Sequence
  mRNA product Design i-3 (A100) comprising derived and/or modified sequence from LASV(G1442-SLE-2011;Clade IV)__AIT17181__SP-HsPLAT_NP(2-569) (opt5)
aggagaaagcuuaccauggacgccaugaagagaggccugugcugugugcuccugcuuugcggggcugucuucguuagccccagcgccuccaaggaggugaaaucuuuccuguggacccagagccucagacgggaacuguccggcuacugcucuaacaucaaacuucaagucguuaaggacgcucaggcccugcuccacgggcuggauuuuagcgagguguccaaugugcagcgccuuaugagaaagcagcggcgcgacgauaacgaccugaaaagacuccgggaucugaaucaagcggucaacaaucugguggaacucaagucuacacagcaaaagagcguucugcgcgugggaacgcuuaccuccgacgaucugcucguccuggcugccgaccuugagaaacuuaagagcaaagugauuagaacagaacggccccucucugccggcguuuauauggggaaccuguccagccagcagcuggaucagcgcagagcucuccugaauaugaucggaaugucuggcgggauucagggaacccggacaggccgcgacggcguggucagagugugggaugugaagaacgccgaccuucugaauaaccaguucgggaccaugccuucccucacacuggcuugucuuaccaaacaaggacaggucgaucugaaugacguugugcaggcccucacggaccugggccugaucuacaccgcgaaguauccgaacgccagcgaucucgaccggcugacacaaucucaucccauucuuaauaugaucgauaccaagaaauccagccugaacaucuccggguacaauuuuucucucggagcugccgugaaggcuggcgccugcaugcuggacgggggaaacaugcuugagacaauuaaagucagcccucagaccauggauggcauccugaaguccauucucaaagugaagaaaacgcugggcauguucaucagcgacacacccggggagcgcaacccuuaugaaaauauucuguacaagaucugucucucuggagauggcuggcccuauauugcguccagaaccagcaucacagggcgggccugggagaacaccguuguggaccuggaaucugauggaaagccucagaaagcuggcagcaauaacuccaauaagucucuucagagcgccggguuugcugccggacugaccuacucccaacucaugacacugaaagacgccaugcugcagcuugauccgaacgcuaagacguggauggacaucgagggcagacccgaggacccugucgaaauugcgcucuaccagcccagcucuggcugcuauauccacuucuuucgcgagccuaccgaucugaaacaguucaagcaagacgccaaguacucccaugggauugaugugacagaccuguuugcugcccagcccggacucaccagcgccguuaucgaagcucugccgcggaauauggugauuacaugucagggcucugaugacaucaaaaagcugcuggagucccaggggagaaaagauaucaagcucauugacaucgcccugagcaaaaccgauucccgcaaguaugaaaacgcggucugggaccaauacaaggaucugugccacaugcauacgggaguggucguggagaaaaagaaacggggcgggaaggaggaaauuacaccucacugugcucuuauggacugcaucauguucgaugccgccguuucuggcggacucaauacccuggugcugagagcuguccucccccgcgacaugguguuucggaccagcacaccuagaguugugcugugaggacuaguuauaagacugacuagcccgaugggccucccaacgggcccuccuccccuccuugcaccgagauuaauaaaaaaaaaaaaaaaaaaaaaaaaaaaaaaaaaaaaaaaaaaaaaaaaaaaaaaaaaaaaaaaaaaaaaaaaaaaaaaaaaaaaaaaaaaaaaaaaaaaa

SEQ ID NO: 19320 - RNA, 1962 nt, Artificial Sequence
  mRNA product Design i-3 (A100) comprising derived and/or modified sequence from LASV(G3010-SLE-2013;Clade IV)__AIT17345__SP-HsPLAT_NP(2-569) (opt5)
aggagaaagcuuaccauggacgccaugaagagaggccugugcugugugcuccugcuuugcggggcugucuucguuagccccagcgccuccaaggagaucaaaucuuuccuguggacccagagccucagacgggaacuguccggcuacugcucuaacauuaaacuucaaguggucaaagacgcucaggcccugcuccacgggcuggauuuuagcgagguuuccaaugugcagcgccuuaugagaaaggaacggcgcgacgauaacgaccugaaaagacuccgggaucugaaucaggcggugaacaaucuggucgagcucaagucuacacaacaaaagagcauccugcgcgugggaacgcuuaccuccgacgaucugcucauucuggcugccgaccuugaaaaacuuaagagcaaaguuacaagaaccgagcggccccucucugccggcguguauauggggaaccuguccagccagcagcuggaucagcgcagagcucuccugucuaugaucggaauguccagcggcguccagggggcccgggcuggacgcgacggcgugguuagagugugggaugucaagaaugccgagcuucugaacaaucaguucggcacaaugccuucucucacccuggcgugucuuacaaaacaggggcaaguggaccugaacgaugugguccaggcccucaccgaccugggacugauuuacacggcuaaguauccgaauaccuccgaccucgaucggcugacacagagccaucccauccuuaacaugaucgacaccaagaaauccucucugaauauuagcggcuacaacuuuucccucggggccgcuguuaaggccggagcgugcaugcuggauggcgggaauaugcuugaaacaaucaaagugagcccucaaaccauggacggcauucugaagucuauccucaaagugaagaaagcccugggaauguucauuuccgagacgcccggcgaacgcaacccuuaugagaacauccuguacaagauuugucucagcggggauggauggcccuauaucgcuucuagaacaagcaucaccggccgggccugggagaauacagucguggaccuggaauccgaugggaagccucagaaagcuggaucuaacaauagcaacaagucccuucagagcgccggcuuuaccgccgggcugaccuacucucagcucaugacacugaaagacgcuaugcugcaacuugauccgaaugcgaagacguggauggacauugagggaagacccgaagauccuguugagguggcccucuaccagcccuccagcggcugcuauauccacuucuuucgcgaaccuaccgaccugaaacaguucaagcaggacgcuaaguacucucauggcauugaugucacagaccuguuugccgcccaacccgggcucaccuccgcugugaucgaugcccugccgcggaacaugguuauuacaugucagggaagcgacgauaucaaaaagcugcuggagucccagggcagaaaagacaucaagcucauugauaucgcgcugucuaaaaccgacagccgcaaguaugagaaugcugugugggaucaguacaaggaccugugccacaugcauacgggggucguggucgaaaagaagaaacggggaggcaaggaggaaauuacaccucacugugcccuuauggauugcaucauguucgacgccgcuguguccgggggccucaacaccucuguucugagagccgugcugccccgcgauauggucuuucggaccagcacaccuagagugguucucugaggacuaguuauaagacugacuagcccgaugggccucccaacgggcccuccuccccuccuugcaccgagauuaauaaaaaaaaaaaaaaaaaaaaaaaaaaaaaaaaaaaaaaaaaaaaaaaaaaaaaaaaaaaaaaaaaaaaaaaaaaaaaaaaaaaaaaaaaaaaaaaaaaaa

SEQ ID NO: 19321 - RNA, 1962 nt, Artificial Sequence
  mRNA product Design i-3 (A100) comprising derived and/or modified sequence from LASV(G502-SLE-2009;Clade IV)__AIT17127__SP-HsPLAT_NP(2-569) (opt5)
aggagaaagcuuaccauggacgccaugaagagaggccugugcugugugcuccugcuuugcggggcugucuucguuagccccagcgccuccaaggagaucaaaucuuuccuguggacccagagccucagacgggaacuguccggcuacugcucuaacauuaagcugcaaguggucaaagacgcucaggcccugcuccacgggcuggauuuuagcgagguuuccaaugugcagcgccuuaugagaaaggaacggcgcgacgauaacgaccugaaaagacuccgggaucugaaucaggcggugaacaaucuggucgagcucaagucuacacaacaaaagagcauccugcgcgugggaacgcuuaccuccgacgaucugcucauucuggcugccgaccuugaaaaacuuaagagcaaaguuaucagaacagagcggccccucucugccggcguguauauggggaaccuguccagccagcagcuggaucagcgcagagcucuccugucuaugauuggaauguccggcgggaaucagggaguccgggccggcaaggacggcgugguucgcgugugggaugucaaaaacgcugagcuucugaauaaccaguucgggaccaugccuagccucacacuggccugucuuaccaagcagggacaaguggaccugaaugaugcggugcaggcccucacagaccugggccugaucuacaccgcuaaguauccgaacacgucugaccucgauagacugacccagucccaucccauccuuaauaugauugacaccaaaaagagcucccugaacaucucuggguacaauuuuagccucggagccgcugucaaagccggcgcgugcaugcuggaugggggaaacaugcuugaaacaauuaagguuuccccucaaacaauggacggcauccugaaaagcauucucaaggugaaaaaggcccugggcauguucaucucugauacccccggggagcggaacccuuaugaaaauauucuguacaagaucugucucuccggagacggcuggcccuauaucgcuagccgcacgucuauuacagggagagccugggagaacaccguggucgaucuggagagcgacggaaaaccucagaaggcuggcuccaauaacucuaauaaaagccuucaguccgccggguuuacagccggacugaccuacagccagcucaugacccugaaggaugcuaugcugcaacuugacccgaacacaaaaacguggauggauaucgaaggccggcccgaggacccuguggaaauugcgcucuaccagcccucuuccggcugcuauauccacuucuuuagagagccuaccgaccugaagcaguucaagcaggaugccaaauacagccaugggauugacguuacagaucuguuugcugcccaacccggacucaccucugccgugaucgacgcucugccgcgcaauauggucaucacaugucagggcuccgaugacauucggaaacuucuggaaagccaggggagaaaggauaucaagcucauugacaucgcccugaacaaaaccgauucccgcaaguaugagaaugcggugugggaccaguacaaggaucugugccacaugcauacgggaguuguggucgagaaaaagaaacggggcgggaaggaagagauuacaccucacugugcucuuauggacugcaucauguucgaugccgccgugucuggcggacucaacaccagcguccugagagcugugcugccccgcgacaugguuuuucggaccuccacaccuagagugguccucugaggacuaguuauaagacugacuagcccgaugggccucccaacgggcccuccuccccuccuugcaccgagauuaauaaaaaaaaaaaaaaaaaaaaaaaaaaaaaaaaaaaaaaaaaaaaaaaaaaaaaaaaaaaaaaaaaaaaaaaaaaaaaaaaaaaaaaaaaaaaaaaaaaaa

SEQ ID NO: 19322 - RNA, 1962 nt, Artificial Sequence
  mRNA product Design i-3 (A100) comprising derived and/or modified sequence from LASV(G733-SLE-2010;Clade IV)__AIT17155__SP-HsPLAT_NP(2-569) (opt5)
aggagaaagcuuaccauggacgccaugaagagaggccugugcugugugcuccugcuuugcggggcugucuucguuagccccagcgccuccaaggagaucaaaucuuuccuguggacccagagccucagacgggaacuguccggcuacugcucuaacauuaagcugcaaguggucaaagacgcucaggcccugcuccacgggcuggauuuuagcgagguuuccaaugugcagcgccuuaugagaaaggaacggcgcgacgauaacgaccugaaaagacuccgggaucugaaucaggcggugaacaaucuggucgagcucaagucuacacaacaaaagagcgugcugcgcguuggaacgcuuaccuccgacgaacugcucgugcuggcugccgaucuugagaaacuuaagagcaaagucaucagaacagagcggccccucucugccggcguguauauggggaaccuguccagccagcagcuggaccagcgcagagcucuccugucuaugauuggaauguccggcgggaaucagggagcccggaccggccgcgauggcguugugagagucugggacgugaagaacgcugaacuucugaauaaccaguucgggacaaugccuagccucacccuggccugucuuacaaaacagggacaaguggaucugaaugacgcgguccaggcccucaccgaucugggccugaucuacacggcuaaguauccgaacaccucugaccucgaccggcugacacagucccaucccauucuuaauaugaucgauaccaagaaaagcucccugaacaucucuggguacaauuuuagccucggagccgcuguuaaggccggcgcgugcaugcuggacgggggaaacaugcuugagacaauuaaaguguccccucaaaccauggauggcauccucaagagcauucugaaagugaagaaagcccugggcauguucaucucugacacgcccggggaacgcaacccuuaugagaauauucuguacaagaucugucucuccggagauggcuggcccuauauugcuagcagaacaucuaucaccgggcgggccugggagaacacagucguggaccuggaaagcgauggaaagccucagaaagcuggcuccaauaacucuaauaagagccuucaguccgccggguuuaccgccggacugaccuacagccagcucaugacacugaaagacgcuaugcugcaacuugauccgaacgcgaagacguggauggacaucgagggcagacccgaagauccuguugagauugcccucuaccagcccucuuccggcugcuauauccacuucuuucgcgaaccuaccgaccugaaacaguucaagcaggacgcuaaguacagccaugggauugaugugacagaccuguuugccgcccaacccggacucaccucugcugucaucgaugcccugccgcggaauauggugauuacaugucagggcuccgacgauaucagaaaacuucuggagagccaggggcgcaaggacaucaaacucauugauaucgcgcuguccaagauugacucucggaaauaugagaacgcuguuugggaucaguacaaggaccugugccacaugcauaccggaguggucguggaaaagaaaaagagaggcgggaaagaggaaaucacgccucacugugcccuuauggauugcauuauguucgacgccgcugucagcggcggacucaauucccuggugcugcgcgccguucucccccgggauaugguguuuagaacaucuaccccucgcgucgugcugugaggacuaguuauaagacugacuagcccgaugggccucccaacgggcccuccuccccuccuugcaccgagauuaauaaaaaaaaaaaaaaaaaaaaaaaaaaaaaaaaaaaaaaaaaaaaaaaaaaaaaaaaaaaaaaaaaaaaaaaaaaaaaaaaaaaaaaaaaaaaaaaaaaaa

SEQ ID NO: 19323 - RNA, 1962 nt, Artificial Sequence
  mRNA product Design i-3 (A100) comprising derived and/or modified sequence from MOPV/LASV reassortant(IGS-1;Clade IV)__AFY05578__SP-HsPLAT_NP(2-569) (opt5)
aggagaaagcuuaccauggacgccaugaagagaggccugugcugugugcuccugcuuugcggggcugucuucguuagccccagcgccuccaaggagaucaaaucuuuccuguggacccagagccucagacgggaacuguccggcuacugcucuaacauuaaacuucaaguggucaaggacgcucaggcccugcuccacgggcuggauuuuagcgagguuuccaaugugcagcgccuuaugagaaaggaacggcgcgacgauaacgaccugaaaagacuccgggaucugaaucaggcggugaacaaucuggucgagcucaagucuacacaacaaaagagcauccugcgcgugggaacgcuuaccuccgacgaucugcucauucuggcugccgaccuugaaaaacugagaagcaagguuauccggacagagcgcccccucucugccggcguguauauggggaaccuguccagccagcagcuggaucagagacgggcucuccugaauaugauuggaaugucuggcgggaaccagggagcccgcgcuggcagagacggcgucgugcggguuugggaugugaaaaaugccgagcuucuguccaaccaguucgggaccaugccuagccucacacuggcgugucuuaccaagcagggacaagucgaccugaaugaugccgugcaggcucucacagaccugggccugaucuacaccgccaaauauccgaacacgucugaccucgaucgccugacccagucccaucccauccuuaauaugauugacacaaagaaaagcucccugaacaucucuggguacaauuuuagccucggagcugccgugaaggcgggcgccugcaugcuggaugggggaaacaugcuugaaaccauuaaggucuccccucaaacaauggacggcauccugaaaagcauucucaagguuaaaaaggcucugggcauguucaucucugauacccccggggagagaaacccuuaugaaaauauucuguacaaaaucugucucuccggagacggcuggcccuauaucgccagccggacgucuauuacagggagagcuugggagaacaccgugguggaucuggagagcgacggaaagccucagaaggccgauuccaauaacucuagcaaaucccuucagagcgccggcuuuacagcugggcugaccuacucucagcucaugacccugaaggacgcgaugcugcaacuugauccgaaugccaaaacauggauggacaucgaaggacgccccgaggacccugucgaaauugcucucuaccagcccuccagcggcugcuauauccacuucuuucgggagccuacggaucugaagcaguucaaacaggacgccaaguacucucauggcauugaugugaccgaccuguuugccacacaacccgggcucaccuccgcuguuaucgaugcccugccgagaaacauggugaucacaugucagggaagcgacgauauucgcaaacuucuggaaucccagggccggaaggacaucaagcucauugauaucgaccugucuaaaaccgauagcagaaaguaugagaaugcggucugggaccaguacaaagaucugugccacaugcauacgggggugguuguggagaagaagaaacgcggaggcaaggaagagauuacaccucacugugcucuuauggacugcaucauguucgacgccgccgucuccgggggccucaacaccucugugcugcgggcuguccugcccagagauaugguguuucgcaccagcacaccucggguugugcucugaggacuaguuauaagacugacuagcccgaugggccucccaacgggcccuccuccccuccuugcaccgagauuaauaaaaaaaaaaaaaaaaaaaaaaaaaaaaaaaaaaaaaaaaaaaaaaaaaaaaaaaaaaaaaaaaaaaaaaaaaaaaaaaaaaaaaaaaaaaaaaaaaaaa

SEQ ID NO: 19324 - RNA, 1962 nt, Artificial Sequence
  mRNA product Design i-3 (A100) comprising derived and/or modified sequence from LASV(LM765-SLE-2012;Clade IV)__AIT17815__SP-HsPLAT_NP(2-569) (opt5)
aggagaaagcuuaccauggacgccaugaagagaggccugugcugugugcuccugcuuugcggggcugucuucguuagccccagcgccuccaaggagaucaaaucuuuccuguggacccagagccucagacgggaacuguccggcuacugcucuaacauuaagcugcaaguggucaaagacgcucaggcccugcuccacgggcuggauuuuagcgagguuuccaaugugcagcgccuuaugagaaaggaacggcgcgacgauaacgaccugaaaagacuccgggaucugaaucaggcggugaacaaucuggucgagcucaagucuacacaacaaaagagcauccugcgcgugggaacgcuuaccuccgacgaucugcucauucuggcugccgaccuugaaaaacuuaagagcaaaguuacaagaaccgagcggccccucucugccggcguguauauggggaaccuguccagccagcagcuggaucagcgcagagcucuccuggacaugaucggaaugucuggcuccaaucagggggcccgggcuggacgcgauggcgucgugagaguuugggacgugaagaacgccgagcuucugaauaaccaguucggcacaaugccuagccucacccuggcgugucuuacaaaacaggggcaagucgaucugaaugacgccgugcaggcucucaccgaccugggacugauuuacacggccaaguauccgaacaccucugaucucgaccggcugacacagucccaucccauccuuaauaugaucgauaccaagaaaagcucccugaacauuucuggcuacaauuuuagccucggggcugccgugaaggcgggagccugcaugcuggacggcgggaacaugcuugaaacaaucaaagucuccccucaaaccauggauggcauucucaagagcauccugaaaguuaagaaagcucugggaauguucauuucugacgcccccggcgagcgcaacccuuaugaaaauauccuguacaagauuugucucuccggggauggauggcccuauaucgcuagcagaacgucuaucacaggccgggccugggagaacaccgugguggaccuggagagcgaugggaagccucagaaagccggauccaauggcucuaacaagagccuucaguccgcuggguuuacagcgggacugaccuacagccagcucaugacccugaaagacgccaugcugcaacuugauccgaaugcuaagacauggauggacauugaaggcagacccgaggacccugucgaaaucgcccucuaccagcccucuuccggcugcuauauucacuucuuucgcgagccuacggaucugaaacaguucaagcaggacgccaaguacagccaugggaucgaugugaccgaccuguuugcugcccaacccggacucacaucugcgguuauugaugcucugccgcggaacauggugaucaccugucagggcuccgacgauaucagaaaacuuuucgaaagccaggggcgcaaggacauuaaacugaucgauauugcccucuccaagacagacucucggaaauaugagaaugccgucugggaucaguacaaggaccugugccacaugcauaccggaaucgugguugagaagaaaaagagaggcgggaaagaagagauuacgccucacugugcucugauggauugcaucauguuugacgccgcugugagcggcggacuuaacacauccguccuccgcgccgugcugccccgggacauggucuucagaaccucuaccccucgcgugguucugugaggacuaguuauaagacugacuagcccgaugggccucccaacgggcccuccuccccuccuugcaccgagauuaauaaaaaaaaaaaaaaaaaaaaaaaaaaaaaaaaaaaaaaaaaaaaaaaaaaaaaaaaaaaaaaaaaaaaaaaaaaaaaaaaaaaaaaaaaaaaaaaaaaaa

SEQ ID NO: 19325 - RNA, 1962 nt, Artificial Sequence
  mRNA product Design i-3 (A100) comprising derived and/or modified sequence from LASV(LM776-SLE-2012;Clade IV)__AIT17825__SP-HsPLAT_NP(2-569) (opt5)
aggagaaagcuuaccauggacgccaugaagagaggccugugcugugugcuccugcuuugcggggcugucuucguuagccccagcgccuccaaggagaucaaaucuuuccuguggacccagagccucagacgggaacuguccucuuacugcagcaacauuaaacuucaaguggucaaggacgcucaggcccugcuccacggccuggauuuuuccgagguuucuaaugugcagcgccuuaugagaaaggaacggcgcgacgauaacgaccugaaaagacuccgggaucugaaucaggcggugaacaaucuggucgagcucaagagcacacaacagaaguccauccugcgcguggggacgcuuaccagcgacgaucugcucauucuggcugccgaccuugaaaaacugaagucuaaaguuacaagaaccgagcggccccucuccgccggaguguauaugggcaaccugagcucucagcagcuggaucaacgcagagcucuccuguccaugaucgggaugagcggaucuaaucagggcgcccgggcugggcgcgacggagucgugagaguuugggaugugaagaacgccgagcuucugaauaaccaguucggcacaaugccuucccucacccuggcgugucuuacaaaacagggccaagucgaccugaaugaugccgugcaggcucucaccgaccuggggcugauuuacacggccaaguauccgaacaccagcgaccucgaucggcugacacagucccaucccauccuuaauaugaucgacaccaagaaaucuagccugaacauuuccggauacaauuuuagccucggcgcugccgugaaggcgggggccugcaugcuggauggaggcaacaugcuugaaacaaucaaagucucuccucaaaccauggacgggauucugaaguccauccucaaaguuaagaaagcucugggaauguucauuagcgauacgcccggcgagcgcaacccuuaugaaaauauccuguacaagauuugucucucuggcgacggguggcccuauaucgccagcagaacauccaucaccggacgggcuugggagaacacagugguggaucuggagucugacggcaagccucagaaagccgggagcaauaacuccaauaagagccuucagucugccggauuuaccgcuggccugaccuacucccagcucaugacacugaaagaugcgaugcugcaacuugacccgaacgccaagacguggauggauauugaagggagacccgaggacccugucgaaguggcucucuaccagcccagcucuggaugcuauauccacuucuuucgcgagccuaccgaccugaaacaguucaagcaggaugccaaguacucccauggcauugacguuacagaucuguuugccgcucaacccggccucaccagcgccgugaucgacgcgcugccgcggaauauggucauuacaugucagggguccgaugacaucagaaaacuucuggaaucucagggacgcaaggauaucaaacucauugacaucgcucugagcaagaccgauucccggaaauaugagaacgccgugugggaccaguacaaggaucugugccacaugcauacgggcguuguggucgagaagaaaaagagagggggaaaagaagagauuacaccucacugugcccuuauggacugcaucauguucgaugcugccgugucuggcgggcucaauaccagcguccugcgcgcugugcugccccgggacaugguuuuuagaaccuccacaccucgcgugguccucugaggacuaguuauaagacugacuagcccgaugggccucccaacgggcccuccuccccuccuugcaccgagauuaauaaaaaaaaaaaaaaaaaaaaaaaaaaaaaaaaaaaaaaaaaaaaaaaaaaaaaaaaaaaaaaaaaaaaaaaaaaaaaaaaaaaaaaaaaaaaaaaaaaaa

SEQ ID NO: 19326 - RNA, 1962 nt, Artificial Sequence
  mRNA product Design i-3 (A100) comprising derived and/or modified sequence from LASV(Mad39;Clade IV)__ANH09723__SP-HsPLAT_NP(2-569) (opt5)
aggagaaagcuuaccauggacgccaugaagagaggccugugcugugugcuccugcuuugcggggcugucuucguuagccccagcgccuccaaggagaucaaaucuuuccuguggacccagagccucagacgggaacuguccggcuacugcucuaacauuaagcugcaaguggucaaagacgcucaggcccugcuccacgggcuggauuuuagcgagguuuccaaugugcagcgccuuaugagaaagcagcggcgcgacgauaacgaccugaaaagacuccgggaucugaaucaagcggugaacaaucuggucgaacucaagucuacacagcaaaagagcgugcugcgcguuggaacgcuuaccuccgacgaucugcucacacuggcugccgaccuugagaaacuuaagagcaaagugaccagaacagaacggccccucaccgccggcgucuauauggggaaccugucuucccagcagcuggaucagcgcagagcucuccugaauaugaucggaaugagcggcgggaaccagggagcccggacaggccgcgacggcgugguuagagugugggaugucaagaaugcugagcuucugaacaaucaguucgggaccaugccuucucucacgcuggccugucuuaccaaacaaggacagguggaccugaacgaugugguccaggcgcucacagaccugggccugauuuacaccgccaaguauccgaauacauccgaccucgaucggcugacccaaagccaucccauccuuaacaugauugacacgaauaagucuucccugaacaucagcggguacaacuuuucccucggagcugccguuaaagcuggcgccugcaugcuggaugggggaaauaugcuugagacaaucaaggugucuccucagaccauggacggcauucugaaaagcauccucaaggugaaaaagucccugggcauguucauuagcgauacacccggggaacgcaacccuuaugagaauauccuguacaaaauuugucucucuggagacggcuggcccuauaucgcguccagaaccagcauuaccgggcgggccugggaaaacacagucguggaucuggagucuggaggcaagccucagaaggcugggagcaauaacuccaauaaaucucuucagagcgccggauuugcugccggccugacguacucccaacucaugacccugaaggacgccaugcugcagcuugauccgaacgcuaaaacauggauggacaucgagggcagacccgaagauccuguugagaucgcgcucuaccagcccauuagcgggugcuauauccacuucuuucgcgaaccuaccgaccugaagcaguucaaacaagacgccaaguacucucauggaauugaugugacagaccuguuugcugcccagcccggccucaccuccgccgucaucgaggcucugccgcggaauauggugauuacgugucaggggagcgaugacaucagaaaacuuuucgaaucucagggacgcaaggauaucaagcugauugacaucgcccucuccaaaacagauagccggaaguaugagaacgcgguuugggaccaauacaaagaucugugccacaugcauaccggcguggucguggagaagaagaaaaagggcgggaaagaagagauuaccccucacugugcucugauggacugcaucauguuugaugccgccgucuccggaggccuuaauacacucgugcugagagcuguucugccccgcgacaugguguuccggaccucuacaccuaaggucgugcucugaggacuaguuauaagacugacuagcccgaugggccucccaacgggcccuccuccccuccuugcaccgagauuaauaaaaaaaaaaaaaaaaaaaaaaaaaaaaaaaaaaaaaaaaaaaaaaaaaaaaaaaaaaaaaaaaaaaaaaaaaaaaaaaaaaaaaaaaaaaaaaaaaaaa

SEQ ID NO: 19327 - RNA, 1962 nt, Artificial Sequence
  mRNA product Design i-3 (A100) comprising derived and/or modified sequence from LASV(Z0947-SLE-2011;Clade IV)__AIT17841__SP-HsPLAT_NP(2-569) (opt5)
aggagaaagcuuaccauggacgccaugaagagaggccugugcugugugcuccugcuuugcggggcugucuucguuagccccagcgccuccaaggagaucaaaucuuuccuguggacccagagccucagacgggaacuguccggcuacugcucuaacauuaagcugcaaguggucaaagacgcucaggcccugcuccacgggcuggauuuuagcgagguuuccaaugugcagcgccuuaugagaaaggaacggcgcgacgauaacgaccugaaaagacuccgggaucugaaucaggcggugaacaaucuggucgagcucaagucuacacaacaaaagagcauccugcgcgugggaacgcuuaccuccgacgaucugcucauucuggcugccgaccuugaaaaacuuaagagcaaaguuacaagaaccgagcggccccucucugccggcguguauauggggaaccuguccagccagcagcuggaucagcgcagagcucuccugaauaugaucggaaugucuggcuccaaccagggggcccggacaggacgcgacggcgucgugagaguuugggaugugaagaaugcugagcuucugaacaaucaguucggcaccaugccuagccucacacuggccugucuuaccaaacaggggcaagucgaccugaacgaugcggugcaggcccucacggaccugggacugauuuacaccgcuaaguauccgaauacaucugaccucgaucggcugacccagucccaucccauccuuaacaugaucgacacaaagaaaagcucccugaauauuucuggcuacaacuuuagccucggggccgcugugaaggccggagcgugcaugcuggauggcgggaacaugcuugaaaccaucaaagucuccccucaaacgauggacggcauucucaagagcauccugaaaguuaagaaagcccugggaauguucauuucugaugcucccggcgagcgcaauccuuaugaaaacauccuguacaagauuugucucuccggggacggauggcccuauaucgccagcagaacaucuaucaccggccgggcuugggagaauacagugguggaucuggagagcgacgggaagccucagaaagccggauccaacggcucuaauaagagccuucaguccgccggguuuaccgcuggacugaccuacagccagcucaugacacugaaagaugcgaugcugcaacuugacccgaacgccaagacguggauggauauugaaggcagacccgaggacccugucgaaaucgcucucuaccagcccucuuccggcugcuauauucacuucuuucgcgagccuaccgaccugaaacaguucaagcaggaugccaaguacagccaugggaucgacgugacagaucuguuugccgcucaacccggacucaccucugccguuauugacgcgcugccgcggaauauggugaucacaugucagggcuccgaugacaucagaaaacuuuucgaaagccaggggcgcaaggauauuaaacugaucgacauugcucucuccaagaccgauucucggaaauaugagaacgccgucugggaccaguacaaggaucugugccacaugcauacgggaaucgugguugagaagaaaaagagaggcgggaaagaagagauuacaccucacugugcccugauggacugcaucauguuugaugcugccgugagcggcggacuuaauaccuccguccuccgcgcugugcugccccgggacauggucuucagaaccucuacaccucgcgugguucugugaggacuaguuauaagacugacuagcccgaugggccucccaacgggcccuccuccccuccuugcaccgagauuaauaaaaaaaaaaaaaaaaaaaaaaaaaaaaaaaaaaaaaaaaaaaaaaaaaaaaaaaaaaaaaaaaaaaaaaaaaaaaaaaaaaaaaaaaaaaaaaaaaaaa

SEQ ID NO: 19328 - protein, 586 aa, Artificial Sequence
  derived and/or modified protein sequence (wt) from LASV(Josiah;Clade IV)__NP_694869__SP-HsALB_NP(2-569)
MKWVTFISLLFLFSSAYSSASKEIKSFLWTQSLRRELSGYCSNIKLQVVKDAQALLHGLDFSEVSNVQRLMRKERRDDNDLKRLRDLNQAVNNLVELKSTQQKSILRVGTLTSDDLLILAADLEKLKSKVIRTERPLSAGVYMGNLSSQQLDQRRALLNMIGMSGGNQGARAGRDGVVRVWDVKNAELLNNQFGTMPSLTLACLTKQGQVDLNDAVQALTDLGLIYTAKYPNTSDLDRLTQSHPILNMIDTKKSSLNISGYNFSLGAAVKAGACMLDGGNMLETIKVSPQTMDGILKSILKVKKALGMFISDTPGERNPYENILYKICLSGDGWPYIASRTSITGRAWENTVVDLESDGKPQKADSNNSSKSLQSAGFTAGLTYSQLMTLKDAMLQLDPNAKTWMDIEGRPEDPVEIALYQPSSGCYIHFFREPTDLKQFKQDAKYSHGIDVTDLFATQPGLTSAVIDALPRNMVITCQGSDDIRKLLESQGRKDIKLIDIALSKTDSRKYENAVWDQYKDLCHMHTGVVVEKKKRGGKEEITPHCALMDCIMFDAAVSGGLNTSVLRAVLPRDMVFRTSTPRVVL

SEQ ID NO: 19329 - protein, 586 aa, Artificial Sequence
  derived and/or modified protein sequence (wt) from LASV(LP;Clade I)__AAF86702__SP-HsALB_NP(2-569)
MKWVTFISLLFLFSSAYSSNSKEIKSFLWTQSLRRELSGYCSNIKLQVVKDAQALLHGLDFSEVSNVQRLMRKQKRDDADLKRLRDLNQAVNNLVELKSTQQKNVLRVGTLSSDDLITLAADLEKLKSKVIRTERPLSSGVYMGNLSSQQLDQRRALLSMIGMSGGPQGNRTGGDGVVRVWDVKNAELLNNQFGTMPSLTLACLTKQGQVDLNDAVQALTDLGLIYTAKYPNSSDLDMLTQSHPILGMVDTKKSSLNISGYNFSLGAAVKAGACMLDGGNMLETIKVSPQTMDGILKSILKVKRSLGMFISDTPGERNPYENILYKICLSGEGWPYIASRTSITGRAWENTLVDLESDNKPPKLNSAGSNKSLQAAGLNAGLTYSQLMTLKDCMLQLDPSSKTWIDIEGRPEDPVEIALFQPSSGCYIHFFREPTDLKQFKQDAKYSHGIDVTDLFSTQPGLTSAVIEALPRNMVLTCQGSDDIKKLLESQGRRDIKLIDISLSKADSRKFENAVWDQYKDLCHMHTGVVVEKKKRGGKEEITPHCALLDCIMFDAATTGSLNITTLRAVLPRDMVFRTSTPKVVL

SEQ ID NO: 19330 - protein, 586 aa, Artificial Sequence
  derived and/or modified protein sequence (wt) from LASV(803213;Clade II)__AAF86704__SP-HsALB_NP(2-569)
MKWVTFISLLFLFSSAYSSASKEVKSFLWTQSLRRELSGYCSNIKLQVVKDAQALLHGLDFSEVNNVQRLMRKQKRDDGDLKRLRDLNQAVNNLVELKSTQQKSILRVGTLTSDDLLTLAADLEKLKSKVIRTERPLSSGVYMGNLSTQQLEQRRALLNMIGMVGGAQGTQPGRDGVVRVWDVKNPDLLNNQFGTMPSLTLACLTKQGQVDLNDAVLALTDLGLIYTAKYPNSSDLDRLSQSHPILNMVDTKKSSLNISGYNFSLGAAVKAGACMLDGGNMLETIKVTPQTMDGILKSILKVKRSLGMFVSDTPGERNPYENILYKICLSGDGWPYIASRTSIVGRAWENTTVDLESDGKPQKVGTAGSNKSLQSAGFPTGLTYSQLMTLKDSMMQLDPSAKTWIDIEGRPEDPVEIALYQPMSGCYIHFFREPTDLKQFKQDAKYSHGIDVADLFPAQPGLTSAVIEALPRNMVLTCQGSDDIKKLLDSQGRRDIKLIDISLSKVDSRKFENAVWDQCKDLCHMHTGVVVEKKKRGGKEEITPHCALMDCIMFDAAVSGGLNIPVLRAVLPRDMVFRTSSPKVVL

SEQ ID NO: 19331 - protein, 587 aa, Artificial Sequence
  derived and/or modified protein sequence (wt) from LASV(GA391;Clade III)__CAA36646__SP-HsALB_NP(2-570)
MKWVTFISLLFLFSSAYSSASKEVRSFLWTQSLRRELSGYCSNIKLQVVKDAQALLHGLDFSEVSNVQRLMRKQKRDDGDLKRLRDLNQAVNNLVELKSTQQKSVLRVGTLSSDDLLILAADLEKLKSKVTRTERPLSSGVYMGNLSSQQLDQRRALLNMIGMTGVSGGGKGASDGIVRVWDVKNAELLNNQFGTMPSLTLACLTKQGQVDLNDAVQALTDLGLIYTAKYPNSSDLDRLSQSHPILNMIDTKKSSLNISGYNFSLGAAVKAGACMLDGGNMLETIKVSPQTMDGILKSILKVKKSLGMFVSDTPGERNPYENILYKICLSGDGWPYIASRTSIVGRAWENTVVDLEQDNKPQKIGNGGSNKSLQSAGFAAGLTYSQLMTLKDFKCFNLIPNAKTWMDIEGRPEDPVEIALYQPSSGCYVHFFREPTDLKQFKQDAKYSHGIDVTDLFAAQPGLTSAVIEALPRNMVITCQGSEDIRKLLESQGRRDIKLIDITLSKADSRKFENAVWDQFKDLCHMHTGVVVEKKKRGGKEEITPHCALMDCIMFDAAVSGGLDAKVLRVVLPRDMVFRTSTPKVVL

SEQ ID NO: 19332 - protein, 586 aa, Artificial Sequence
  derived and/or modified protein sequence (wt) from LASV(AV;Clade V)__CCA30315__SP-HsALB_NP(2-569)
MKWVTFISLLFLFSSAYSSASKEVKSFLWTQSLRRELSGYCSNIKLQVVKDAQALLHGLDFSEVSNVQRLMRKQRRDDSDLKRLRDLNQAVNNLVELKSTQQKSVLRVGTLSSDDLLTLAADLEKLKSKVTRTERPLSSGVYMGNLSSQQLDQRRALLNLIGMTNGSQGSQAGRDGVVRVWDVKNAELLNNQFGTMPSLTLACLTKQGQVDLNDVVQALTDLGLIYTAKYPNTSDLDRLTQSHPILNMIDTKKSSLNISGYNFSLGAAVKAGACMLDGGNMLETIKVSPQSMDGILKSILKVKRALGMFVSDTPGERNPYENILYKICLSGDGWPYIASRTSIVGRAWENTVVDLETDGKPQKIGSGNSNKSLQSAGFSAGLTYSQLMTLKDAMLQLDPNAKTWMDIEGRPEDPVEVALYQPISGCYIHFFREPTDLKQFKQDAKYSHGIDIADLFAAQPGLTSAVIEALPRNMVITCQGSEDIKKLLESQGRKDIKLIDIALSKIDSRKFENAVWDQYKDLCHMHTGVVVEKKKRGGKEEITPHCALMDCIMFDAAVSGGLNTLVLRAVLPRDMVFRTSTPRVVL

SEQ ID NO: 19333 - protein, 586 aa, Artificial Sequence
  derived and/or modified protein sequence (wt) from LASV(Togo/2016/7082;Clade VI)__AMR44578__SP-HsALB_NP(2-569)
MKWVTFISLLFLFSSAYSSNSKEVKSFLWTQSLRRELSGYCSNIKLQVVKDAQALLHGLDFSEVSNVQRLMRKQKRDDGDLKRLRDLNQAVNNLVELKSVQQKSILRVGTLTSDDLLTLAADLEKLKSKVTRTERPLSSGVYMGNLSSQQLDQRRALLSMIGMSGGNQNSQPKGDGVVRVWDVKNADLLNNQFGTMPSLTLACLTKQGQVDLNDAVQALTDLGLIYTAKYPNSSDLDRLSQSHPILNMIDTKKSSLNISGYNFSLGAAIKTGACMLDGGNMLETIKVTPQTMDGILKSILKVKRSLGMFISDTPGERNPYENILYKICLSGDGWPYIASRTAIIGRAWENTVVDLESDSKPQKIGSNGSNKSLQSAGFAPGLTYSQLMTLKDSMLQLDPNAKTWIDIEGRPEDPVEVALFQPISGCYIHFFREPTDLKQFKQDAKYSHGIDVTDLFAAQPGLTSAVIEALPRNMVLTCQGSDDIKKLLDSQGRRDIKLIDVSLNKIDSRKFENAVWDQYKDLCHMHTGVVVEKKKKGGKEEITPHCALLDCIMFDAAVSGGLNATVLRAVLPRDMVFRTSSPKVVL

SEQ ID NO: 19334 - protein, 586 aa, Artificial Sequence
  derived and/or modified protein sequence (wt) from LASV(KAK-428;Clade n.d. (VII))__ANH09741__SP-HsALB_NP(2-569)
MKWVTFISLLFLFSSAYSSNSKEVKSFLWTQSLRRELSGYCTNIKLQVVKDAQALLHGLDFSEVSNVQRLMRKQKRDDNDLKRLRDLNQAVNNLVELKSVQQKSVLKVGTLNSDDLLTLAADLEKLKSKVVRTERPLSSGVYMGNLSSQQLDQRRALLNMIGMAGGSQGNQPSRDGVVRVWDVKNADLLNNQFGTMPSLTLACLTKQGQVDLNDVVLALTDLGLIYTAKYPNSSDLDRLSQNHPVLNMIDVNKSSLNISGYNFSLGAAVKAGACMLDGGNMLETIKISPQTVDGILKSILKVKRALGMFVSDTPGERNPYENILYKVCLSGNGWPYIASRTSIVGRAWENTVVDLESNKNQPKVGNNGSNKMLQSSGFATGLTYSQLMTLRDSMLQLDPTAKTWIDIEGRPEDPVELALFQPSSGCYIHFFREPTDLKQFKQDAKYSHGIDVNDLFSAQPGLTSAVLEALPRNMVLTCQGSDDIRKLLDSQDRKDIKLIDISLSKADARKFENDVWDQFKDLCHMHTGIVVEKKKKGGKQEMTPHCALLDCIMFDAAVSGGLNVPTLRAVLPTDMVFRTITTKVVL

SEQ ID NO: 19335 - protein, 586 aa, Artificial Sequence; identical to SEQ ID NO: 19329
  derived and/or modified protein sequence (wt) from LASV(Pinneo-NIG-1969;Clade I)__AIT17837__SP-HsALB_NP(2-569)

SEQ ID NO: 19336 - protein, 586 aa, Artificial Sequence
  derived and/or modified protein sequence (wt) from LASV(ISTH0009-NIG-2011;Clade II)__AIT17405__SP-HsALB_NP(2-569)
MKWVTFISLLFLFSSAYSSVSKEVKSFLWTQSLRRELSGYCSNIKLQVVKDAQALLHGLDFSEVSNVQRLMRKQKRDDSDLKRLRDLNQAVNNLVELKSTQQKSILRVGTLTSDDLLTLAADLEKLKSKVIRTERPLSSGVYMGNLSTQQLEQRRALLNMIGMVGGAQGTQPGRDGVVRVWDVKNPDLLNNQFGTMPSLTLACLTKQGQVDLNDAVLALTDLGLIYTAKYPNSSDLDRLSQSHPILNMVDIKKSSLNISGYNFSLGAAVKAGACMLDGGNMLETIKVTPQTMDGILKSILKVKRSLGMFVSDTPGERNPYENILYKICLSGDGWPYIASRTSIVGRAWENTTVDLESDGKPQKVGSAGSNKSLQSAGFPTGLTYSQLMTLKDSMMQLDPSAKTWIDIEGRPEDPVEIALYQPMSGCYIHFFREPTDLKQFKQDAKYSHGIDVADLFPAQPGLTSAVIEALPRNMVLTCQGSDDIKRLLDSQGRRDIKLIDIALSKADSRRFENAVWDQCKDLCHMHTGVVVEKKKRGGKEEITPHCALMDCIMYDAAVSGGLNIPVLRAVLPRDMVFRTSSPKVVL

SEQ ID NO: 19337 - protein, 586 aa, Artificial Sequence
  derived and/or modified protein sequence (wt) from LASV(ISTH2010-NIG-2012;Clade II)__AIT17483__SP-HsALB_NP(2-569)
MKWVTFISLLFLFSSAYSSASKEVKSFLWTQSLRRELSGYCSNIKLQVVKDAQALLHGLDFSEVSNVQRLMRKQKRDDSDLKRLRDLNQAVNNLVELKSTQQKSILRVGTLTSDDLLTLAADLEKLKSKVIRTERPLSSGVYMGNLSTQQLEQRRALLNLIGMVGGAQGTQPGRDGVVRVWDVKNPDLLNNQFGTMPSLTLACLTKQGQVDLNDAVLALTDLGLIYTAKYPNSSDLDRLSQSHPILNMVDTKKSSLNISGFNFSLGAAVKAGACMLDGGNMLETIKVTPQTMDGILKSILKVKKSLGMFVSDTPGERNPYENILYKICLSGDGWPYIASRTSIVGRAWENTTVDLESDGKPHKVGTAGSNKSLQSAGFPTGLTYSQLMTLKDSMMQLDPSAKTWIDIEGRPEDPVEIALYQPMSGCYIHFFREPTDLKQFKQDAKYSHGIDVADLFPAQPGLTSAVIEALPRNMVLTCQGSDDIKRLLDSQGRRDIKLIDIALSKADSRRFENAVWDQCKDLCHMHTGVVVEKKKRGGKEEITPHCALMDCIMYDAAVSGGLNIPVLRAVLPRDMVFRTSSPKVVL

SEQ ID NO: 19338 - protein, 586 aa, Artificial Sequence
  derived and/or modified protein sequence (wt) from LASV(Lassa virus/H.sapiens-wt/NGA/2015/ISTH_0543;Clade II)__AVO03640__SP-HsALB_NP(2-569)
MKWVTFISLLFLFSSAYSSASKEVKSFLWTQSLRRELSGYCSNIKLQVVKDAQALLHGLDFSEVSNVQRLMRKQKRDDSDLKRLRDLNQAVNNLVELKSTQQKSILRVGTLTSDDLLTLAADLEKLKSKVIRTERPLSSGVYMGNLSTQQLEQRRALLNMIGMVGGAQGTQPGRDGVVRVWDVKNPDLLNNQFGTMPSLTLACLTKQGQVDLNDAVLALTDLGLIYTAKYPNSSDLDRLSQSHPILNMVDTKKSSLNISGYNFSLGAAVKAGACMLDGGNMLETIKVTPQTMDGILKSILKVKKSLGMFVSDTPGERNPYENILYKICLSGDGWPYIASRTSIVGRAWENTTVDLESDGKPQKVGSAGSNKSLQSAGFPTGLTYSQLMTLKDSMMQLDPSAKTWIDIEGRPEDPVEIALYQPMSGCYIHFFREPTDLKQFKQDAKYSHGIDVADLFPAQPGLTSAVIEALPRNMVLTCQGSDDIKRLLDSQGRKDIKLIDIALSKADSRRFENAVWDQCKDLCHMHTGVVVEKKKRGGKEEITPHCALMDCIMYDAAVSGGLNIPVLRAVLPRDMVFRTSSPKVVL

SEQ ID NO: 19339 - protein, 586 aa, Artificial Sequence
  derived and/or modified protein sequence (wt) from LASV(Lassa virus/H.sapiens-wt/NGA/2016/ISTH_0009;Clade II)__AVO03572__SP-HsALB_NP(2-569)
MKWVTFISLLFLFSSAYSSASKEVKSFLWTQSLRRELSGYCSNIKLQVVKDAQALLHGLDFSEVSNVQRLMRKQKRDDSDLKRLRDLNQAVNNLVELKSTQQKSILRVGTLTSDDLLTLAADLEKLKSKVIRTERPLSSGVYMGNLSTQQLEQRRALLNMIGMVGGAQGTQPGRDGVVRVWDVKNPDLLNNQFGTMPSLTLACLTKQGQVDLNDAVLALTDLGLIYTAKYPNSSDLDRLSQSHPILNMVDTKKSSLNISGYNFSLGAAVKAGACMLDGGNMLETIKVTPQTMDGILKSILKVKKSLGMFVSDTPGERNPYENILYKICLSGDGWPYIASRTSIVGRAWENTTVDLESDGKPQKVGSAGSNKSLQSAGFPTGLTYSQLMTLKDSMMQLDPSAKTWIDIEGRPEDPVEIALYQPMSGCYIHFFREPTDLKQFKQDAKYSHGIDVADLFPAQPGLTSAVIEALPRNMVLTCQGSDDIKRLLDSQGRRDIKLIDIALSKADSRRFENAVWDQCKDLCHMHTGVVVEKKKRGGKEEITPHCALMDCIMYDAAVSGGLNIPVLRAVLPRDMVFRTSSPKVVL

SEQ ID NO: 19340 - protein, 586 aa, Artificial Sequence
  derived and/or modified protein sequence (wt) from LASV(Lassa virus/H.sapiens-wt/NGA/2016/ISTH_0017;Clade II)__AVO03568__SP-HsALB_NP(2-569)
MKWVTFISLLFLFSSAYSSASKEVKSFLWTQSLRRELSGYCSSIKLQVVKDAQALLHGLDFSEVSNVQRLMRKQKRDDSDLKRLRDLNQAVNNLVELKSTQQKSILRVGTLTSDDLLTLAADLEKLKSKVIRTERPLSSGVYMGNLSTQQLEQRRALLNMIGMAGGAQGTQPGRDGVVRVWDVKNPDLLNNQFGTMPSLTLACLTKQGQVDLNDAVLALTDLGLIYTAKYPNSSDLDRLSQSHPILNMVDTKKSSLNISGYNFSLGAAVKAGACMLDGGNMLETIKVTPQTMDGILKSILKVKRSLGMFVSDAPGERNPYENILYKICLSGDGWPYIASRTSIVGRAWENTTVDLESDGKPQKVGATGSNKSLQSAGFPTGLTYSQLMTLKDSMMQLDPSAKTWIDIEGRPEDPVEVALYQPVSGCYIHFFREPTDLKQFKQDAKYSHGIDVADLFPAQPGLTSAVIEALPRNMVLTCQGSDDIKKLLDSQGRKDIKLIDIALSKADSRRFENAVWDQCKDLCHMHTGVVVEKKKRGGKEEITPHCALMDCIMYDAAVSGGLNIPVLRAVLPRDMVFRTSSPKVVL

SEQ ID NO: 19341 - protein, 586 aa, Artificial Sequence
  derived and/or modified protein sequence (wt) from LASV(Lassa virus/H.sapiens-wt/NGA/2018/ISTH_0959;Clade II)__AVV65100__SP-HsALB_NP(2-569)
MKWVTFISLLFLFSSAYSSASKEVKSFLWTQSLRRELSGYCSNIKLQVVKDAQALLHGLDFSEVSNVQRLMRKQKRDDSDLKRLRDLNQAVNNLVELKSTQQKSILRVGTLTSDDLLTLAADLEKLKSKVIRTERPLSSGVYMGNLSTQQLEQRRALLNLIGMVGGAQGTQPGRDGVVRVWDVKNPDLLNNQFGTMPSLTLACLTKQGQVDLNDVVLALTDLGLIYTAKYPNSSDLDRLSQSHPILNMVDTKKSSLNISGFNFSLGAAVKAGACMLDGGNMLETIKVTPQTMDGILKSILKVKKSLGMFVSDTPGERNPYENILYKICLSGDGWPYIASRTSIVGRAWENTTVDLESDGKPHKVGTAGSNKSLQSAGFPTGLTYSQLMTLKDSMMQLDPSAKTWIDIEGRPEDPVEIALYQPMSGCYIHFFREPTDLKQFKQDAKYSHGIDVADLFPAQPGLTSAVIEALPRNMVLTCQGSDDIKRLLDSQGRKDIKLIDIALSKTDSRRFENAVWDQCKDLCHMHTGVVVEKKKRGGKEEITPHCALMDCIMYDAAVSGGLNIPVLRAVLPRDMVFRTSSPKVVL

SEQ ID NO: 19342 - protein, 586 aa, Artificial Sequence
  derived and/or modified protein sequence (wt) from LASV(LASV003-NIG-2008;Clade II)__AIT17581__SP-HsALB_NP(2-569)
MKWVTFISLLFLFSSAYSSASKEVKSFLWTQSLRRELSGYCSSIKLQVVKDAQALLHGLDFSEVSNVQRLMRKQKRDDSDLKRLRDLNQAVNNLVELKSTQQKSVLRVGTLTSDDLLTLAADLEKLKSKVIRTERPLSSGVYMGNLSAQQLEQRRTLLNMIGMVGGAQGTQPGRDGVVRVWDVKNPDLLNNQFGTMPSLTLACLTKQGQVDLNDVVLALTDLGLIYTAKYPNSSDLDRLSQSHPILSMVDTKKSSLNISGYNFSLGAAVKAGACMLDGGNMLETIKVTPQTMDGILKSILKVKKSLGMFVSDTPGERNPYENILYKICLSGDGWPYIASRTSIVGRAWENTTVDLESDGKPQKVGTAGSNKSLQSAGFPTGLTYSQLMTLKDSMMQLDPSAKTWIDIEGRPEDPVEIALYQPMSGCYIHFFREPTDLKQFKQDAKYSHGIDVTDLFPAQPGLTSAVIEALPRNMVLTCQGSDDIKRLLDSQGRRDIKLIDIALSKADSRRFENAVWDQCKDLCHMHTGVVVEKKKRGGKEEITPHCALMDCIMYDAAVSGGLNIPVLRAVLPRDMVFRTSSPKVVL

SEQ ID NO: 19343 - protein, 586 aa, Artificial Sequence
  derived and/or modified protein sequence (wt) from LASV(LASV035-NIG-2009;Clade II)__AIT17589__SP-HsALB_NP(2-569)
MKWVTFISLLFLFSSAYSSASKEVKSFLWTQSLRRELSGYCSSIKLQVVKDAQALLHGLDFSEVSNVQRLMRKQKRDDSDLKRLRDLNQAVNNLVELKSTQQKSILRVGTLTSDDLLTLAADLEKLKSKVIRTERPLSSGVYMGNLSAQQLEQRRALLNMIGMVGGAQGTQPGRDGVVRVWDVKNPDLLNNQFGTMPSLTLACLTKQGQVDLNDAVLALTDLGLIYTAKYPNSSDLDRLSQSHPILNMVDTKKSSLNISGYNFSLGAAVKAGACMLDGGNMLETIKVTPQTMDGILKSILKVKRSLGMFVSDTPGERNPYENILYKICLSGDGWPYIASRTSIVGRAWENTTVDLESDGKPQKVGTTGSNKSLQSAGFPTGLTYSQLMTLKDSMMQLDPSAKTWIDIEGRPEDPVEIALYQPMSGCYIHFFREPTDLKQFKQDAKYSHGIDVADLFPAQPGLTSAVIEALPRNMVLTCQGSDDIKKLLDSQGRRDIKLIDIALSKADSRKFENAVWDQCKDLCHMHTGVVVEKKKRGGKEEITPHCALMDCIMYDAAVSGGLNIPVLRAVLPRDMVFRTSSPKVVL

SEQ ID NO: 19344 - protein, 586 aa, Artificial Sequence
  derived and/or modified protein sequence (wt) from LASV(LASV1000-NIG-2009;Clade II)__AIT17783__SP-HsALB_NP(2-569)
MKWVTFISLLFLFSSAYSSASKEVKSFLWTQSLRRELSGYCSNIKLQVVKDAQALLHGLDFSEVSNVQRLMRKQKRDDSDLKRLRDLNQAVNNLVELKSTQQKSILRVGTLTSDDLLTLAADLEKLKSKVIRTERPLSSGVYMGNLSTQQLEQRRALLNMIGMVGGAQGTQPGRDGVVRVWDVKNPDLLNNQFGTMPSLTLACLTKQGQVDLNDVVLALTDLGLIYTAKYPNSSDLDRLSQSHPILNMVDTKKSSLNISGYNFSLGAAVKAGACMLDGGNMLETIKVTPQTMDGILKSILKVKKSLGMFVSDTPGERNPYENILYKICLSGDGWPYIASRTSIVGRAWENTTVDLESDGKPQKVGTAGSNKSLQSAGFPTGLTYSQLMTLKDSMMQLDPSAKTWIDIEGRPEDPVEIALYQPVSGCYIHFFREPTDLKQFKQDAKYSHGIDVADLFPAQPGLTSAVIEALPRNMVLTCQGSDDIKRLLDSQGRRDIKLIDIALSKADSRRFENAVWDQCKDLCHMHTGVVVEKKKRGGKEEITPHCALMDCIMYDAAVSGGLNIPVLRAVLPRDMVFRTSSPKVVL

SEQ ID NO: 19345 - protein, 586 aa, Artificial Sequence
  derived and/or modified protein sequence (wt) from LASV(LASV221-NIG-2010;Clade II)__AIT17625__SP-HsALB_NP(2-569)
MKWVTFISLLFLFSSAYSSASKEVKSFLWTQSLRRELSGYCSSIKLQVVKDAQALLHGLDFSEVSNVQRLMRKQRRDDSDLKRLRDLNQAVNNLVELKSTQQKSILRVGTLTSDDLLTLAADLEKLKSKVIRTERPLSSGVYMGNLSTQQLEQRRALLNMIGMVGGAQGTQPGRDGVVRVWDVKNPDLLNNQFGTMPSLTLACLTKQGQVDLNDAVLALTDLGLIYTAKYPNSSDLDRLSQSHPILNMVDTKKSSLNISGYNFSLGAAVKAGACMLDGGNMLETIKVTPQTVDGILKSILKVKRSLGMFVSDTPGERNPYENILYKICLSGDGWPYIASRTSIVGRAWENTTVDLESDGKPQKVGTAGSNKSLQSAGFPTGLTYSQLMTLKDSMMQLDPSAKTWIDIEGRPEDPVEIALYQPMSGCYIHFFREPTDLKQFKQDAKYSHGIDVADLFPAQPGLTSAVIEALPRNMVLTCQGSDDIKRLLDSQGRRDIKLIDIALSKADSRKFENAVWDQCKDLCHMHTGVVVEKKKRGGKEEITPHCALMDCIMYDAAVSGGLNIPVLRAVLPRDMVFRTSSPKVVL

SEQ ID NO: 19346 - protein, 586 aa, Artificial Sequence
  derived and/or modified protein sequence (wt) from LASV(LASV237-NIG-2010;Clade II)__AIT17639__SP-HsALB_NP(2-569)
MKWVTFISLLFLFSSAYSSASKEVKSFLWTQSLRRELSGYCSNIKLQVVKDAQALLHGLDFSEVSNVQRLMRKQKRDDSDLKRLRDLNQAVNNLVELKSTQQKSILRVGTLTSDDLLTLAADLEKLKSKVIRTERPLSSGVYMGNLSTQQLEQRRALLNMIGMVGGAQGTQPGRDGVVRVWDVKNPDLLNNQFGTMPSLTLACLTKQGQVDLNDAVLALTDLGLIYTAKYPNSSDLDRLSQSHPILNMVDIKKSSLNISGYNFSLGAAVKAGACMLDGGNMLETIKVTPQTMDGILKSILKVKRSLGMFVSDTPGERNPYENILYKICLSGDGWPYIASRTSIVGRAWENTTVDLESDGKPQKVGSAGSNKSLQSAGFPTGLTYSQLMTLKDSMMQLDPSAKTWIDIEGRPEDPVEIALYQPMSGCYIHFFREPTDLKQFKQDAKYSHGIDVADLFPAQPGLTSAVIEALPRNMVLTCQGSDDIKRLLDSQGRRDIKLIDIALSKADSRRFENAVWDQCKDLCHMHTGVVVEKKKRGGKEEITPHCALMDCIMYDAAVSGGLNIPVLRAVLPRDMVFRTSSPKVVL

SEQ ID NO: 19347 - protein, 586 aa, Artificial Sequence
  derived and/or modified protein sequence (wt) from LASV(LASV253-NIG-2011;Clade II)__AIT17671__SP-HsALB_NP(2-569)
MKWVTFISLLFLFSSAYSSASKEVKSFLWTQSLRRELSGYCSSIKLQVVKDAQALLHGLDFSEVSNVQRLMRKQKRDDSDLKRLRDLNQAVNNLVELKSTQQKSVLRVGTLTSDDLLTLAADLEKLKSKVIRTERPLSSGVYMGNLSTQQLEQRRALLNMIGMVGGAQGTQPGRDGVVRVWDVKNPDLLNNQFGTMPSLTLACLTKQGQVDLNDVVLALTDLGLIYTAKYPNSSDLDRLSQSHPILNMVDTKKSSLNISGYNFSLGAAVKAGACMLDGGNMLETIKVTPQTMDGILKSILKVKKSLGMFVSDTPGERNPYENILYKICLSGDGWPYIASRTSIVGRAWENTTVDLESDGKPQKVGTAGSNKSLQSAGFPTGLTYSQLMTLKDSMMQLDPSAKTWIDIEGRPEDPVEIALYQPMSGCYIHFFREPTDLKQFKQDAKYSHGIDVTDLFPAQPGLTSAVIEALPRNMVLTCQGSDDIKRLLDSQGRRDIKLIDIALSKADSRRFENAVWDQCKDLCHMHTGVVVEKKKRGGKEEITPHCALMDCIMYDAAVSGGLNIPVLRAVLPRDMVFRTSSPKVVL

SEQ ID NO: 19348 - protein, 586 aa, Artificial Sequence
  derived and/or modified protein sequence (wt) from LASV(LASV254-NIG-2011;Clade II)__AIT17675__SP-HsALB_NP(2-569)
MKWVTFISLLFLFSSAYSSASKEVKSFLWTQSLRRELSGYCSSIKLQVVKDAQALLHGLDFSEVSNVQRLMRKQKRDDSDLKRLRDLNQAVNNLVELKSTQQKSVLRVGTLTSDDLLTLAADLEKLKSKVIRTERPLSSGVYMGNLSTQQLEQRRALLNMIGMVGGAQGTQPGRDGVVRVWDVKNPDLLNNQFGTMPSLTLACLTKQGQVDLNDAVLALTDLGLIYTAKYPNSSDLDRLSQSHPILNMVDTKKSSLNISGYNFSLGAAVKAGACMLDGGNMLETIKVTPQTMDGILKSILKVKKSLGMFVSDTPGERNPYENILYKICLSGDGWPYIASRTSIVGRAWENTIVDLESDGKPQKVGTAGSNKSLQSAGFPTGLTYSQLMTLKDSMMQLDPSAKTWIDIEGRPEDPVEIALYQPMSGCYIHFFREPTDLKQFKQDAKYSHGIDVADLFPAQPGLTSAVIEALPRNMVLTCQGSDDIKRLLDSQGRRDIKLIDIALSKADSRRFENAVWDQCKDLCHMHTGVVVEKKKRGGKEEITPHCALMDCIMYDAAVSGGLNIPVLRAVLPRDMVFRTSSPKVVL

SEQ ID NO: 19349 - protein, 586 aa, Artificial Sequence
  derived and/or modified protein sequence (wt) from LASV(Nig08-04;Clade II)__ADU56611__SP-HsALB_NP(2-569)
MKWVTFISLLFLFSSAYSSASKEVKSFLWTQSLRRELSGYCSNIKLQVVKDAQALLHGLDFSEVSNVQRLMRKQKRDDGDLKRLRDLNQAVNNLVELKSTQQKSVLRVGTLTSDDLLTLAADLEKLKSKVIRTERPLSSGVYMGNLSTQQLEQRKALLSMIGMVGGAQGTQPGRDGVVRVWDVKNPDLLNNQFGTMPSLTLACLTKQGQVDLNDAVLALTDLGLIYTAKYPNSSDLDRLSQSHPILNMVDTKKSSLNISGYNFSLGAAVKAGACMLDGGNMLETIKVTPQTMDGILKSILKVKRSLGMFVSDTPGERNPYENILYKICLSGDGWPYIASRTSIVGRAWENTTVDLESDGKPQKVGTAGSNKSLQSAGFPTGLTYSQLMTLKDSMMQLDPSAKTWIDIEGRPEDPVEIALYQPMSGCYIHFFREPTDLKQFKQDAKYSHGIDVTDLFSAQPGLTSAVIEALPRNMVLTCQGSDDIKKLLDSQGRRDIKLIDISLNKADSRRFENAVWDQCKDLCHMHTGVVVEKKKRGGKEEITPHCALMDCIMFDAAVSGGLNIPILRAVLPRDMVFRTSSPKVVL

SEQ ID NO: 19350 - protein, 587 aa, Artificial Sequence
  derived and/or modified protein sequence (wt) from LASV(GA391;Clade III)__AAA46284__SP-HsALB_NP(2-570)
MKWVTFISLLFLFSSAYSSASKEVRSCLWTQSLRRELSGYCSNIKLQVVKDAQALLHGLDFSEVSNVQRLMRKQKRDDGDLKRLRDLNQAVNNLVELKSTQQKSVLRVGTLSSDDLLILAADLEKLKSKVTRTERPLSSGVYMGNLSSQQLDQRRALLNMIGMTGVSGGGKGASNGIVRVWDVKNAELLNNQFGTMPSLTLACLTKQGQVDLNDAVQALTDLGLIYTAKYPNSSDLDRLSQSHPILNMIDTKKSSLNISGYNFSLGAAVKAGACMLDGGNMLETIKVSPQTMDGILKSILKVKKSLGMFVSDTPGERNPYENILYKICLSGDGWSYIASRTSIVGRAWENTVVDLEQDNKPQKIGNGGSNKSLQSAGFAAGLIYSQLMTLKDFKCFNLIPNAKTWMDIEGRPEDPVEIALYQPSSGCYVHFFREPTDLKQFKQDAKYSHGRDVTDLFAAQPGLTSAVIEALPRNMVITCQGSEDIRKLLESQGRRDIKLIDITLSKADSRKFENAVWDQFKDLCHMHTGVVVEKKKRGGKEEITPHCALMDCIMFDAAVSGGLDAKVLRVVLPRDMVFRTSTPKVVL

SEQ ID NO: 19351 - protein, 586 aa, Artificial Sequence
  derived and/or modified protein sequence (wt) from LASV(Nig08-A19;Clade III)__ADU56619__SP-HsALB_NP(2-569)
MKWVTFISLLFLFSSAYSSASKEVKSFLWTQSLRRELSGYCSNIKLQVVKDAQALLHGLDFSEVSNVQRLMRKQKRDDGDLKRLRDLNQAVNNLVELKSTQQKSVLRVGTLSSDDLLVLAADLEKLKSKVVRTERPLSSGIYMGNLSSQQLDQRKALLNMIGMTGGNGGRNTTSDGIVRVWDVKNAELLNNQFGTMPSLTLACLTKQGQVDLNDAVQALTDLGLIYTAKYPNSSDLDRLAQSHPILNMIDTKKSSLNISGYNFSLGAAVKAGACMLDGGNMLETIKVSPQTMDGILKSILKVKRSLGMFISDTPGERNPYENILYKICLSGDGWPYIASRTSIVGRAWENTVVDLESDNKPQKTGNGGSNKSLQSAGFAAGLTYSQLMTLKDSMLQLDPNAKTWMDIEGRPEDPVEIALYQPSSGCYIHFFREPTDLKQFKQDAKYSHGIDVTDLFAAQPGLTSAVIEALPRNMVITCQGSEDIRKLLESQGRRDIKLIDISLSKVDSRKFENAVWDQFKDLCHMHTGIVVEKKKRGGKEEITPHCALMDCIMFDAAVSGGVDAKVLRAVLPRDMVFRTSTPKVVL

SEQ ID NO: 19352 - protein, 586 aa, Artificial Sequence
  derived and/or modified protein sequence (wt) from LASV(G1180-SLE-2010;Clade IV)__AIT17169__SP-HsALB_NP(2-569)
MKWVTFISLLFLFSSAYSSASKEIKSFLWTQSLRRELSGYCSNIKLQVVKDAQALLHGLDFSEVSNVQRLMRKERRDDNDLKRLRDLNQAVNNLVELKSTQQKSILRVGTLTSDDLLILAADLEKLKSKVIRTERPLSAGVYMGNLSSQQLDQRRALLSMIGMSSGNQRAQAGRDGVVRVWDVKNVELLNNQFGTMPSLTLACLTKQGQVDLNDAVQALTDLGLIYTAKYPNTSDLDRLTQSHPILNMIDTKKSSLNISGYNFSLGAAVKAGACMLDGGNMLETIKVSPQTMDGILKSILKVKKALGMFISDTPGERNPYENILYKICLSGDGWPYIASRTSITGRAWENTVVDLESDGKPQKAGSNNSNKSLQSVGFTAGLTYSQLMTLKDAMLQLDPNAKTWMDIEGRPEDPVEIALYQPSSGCYIHFFREPTDLKQFKQDAKYSHGIDVTDLFAAQPGLTSAVIDALPRNMVITCQGSDDIRKLLESQGRKDIKLIDIALSKTDSRKYENAVWDQYKDLCHMHTGVVVEKKKRGGKEEITPHCALMDCIMFDAAVSGGLNTSVLRAVLPRDMVFRTSTPRVVL

SEQ ID NO: 19353 - protein, 586 aa, Artificial Sequence
  derived and/or modified protein sequence (wt) from LASV(G1442-SLE-2011;Clade IV)__AIT17181__SP-HsALB_NP(2-569)
MKWVTFISLLFLFSSAYSSASKEVKSFLWTQSLRRELSGYCSNIKLQVVKDAQALLHGLDFSEVSNVQRLMRKQRRDDNDLKRLRDLNQAVNNLVELKSTQQKSVLRVGTLTSDDLLVLAADLEKLKSKVIRTERPLSAGVYMGNLSSQQLDQRRALLNMIGMSGGIQGTRTGRDGVVRVWDVKNADLLNNQFGTMPSLTLACLTKQGQVDLNDVVQALTDLGLIYTAKYPNASDLDRLTQSHPILNMIDTKKSSLNISGYNFSLGAAVKAGACMLDGGNMLETIKVSPQTMDGILKSILKVKKTLGMFISDTPGERNPYENILYKICLSGDGWPYIASRTSITGRAWENTVVDLESDGKPQKAGSNNSNKSLQSAGFAAGLTYSQLMTLKDAMLQLDPNAKTWMDIEGRPEDPVEIALYQPSSGCYIHFFREPTDLKQFKQDAKYSHGIDVTDLFAAQPGLTSAVIEALPRNMVITCQGSDDIKKLLESQGRKDIKLIDIALSKTDSRKYENAVWDQYKDLCHMHTGVVVEKKKRGGKEEITPHCALMDCIMFDAAVSGGLNTLVLRAVLPRDMVFRTSTPRVVL

SEQ ID NO: 19354 - protein, 586 aa, Artificial Sequence
  derived and/or modified protein sequence (wt) from LASV(G3010-SLE-2013;Clade IV)__AIT17345__SP-HsALB_NP(2-569)
MKWVTFISLLFLFSSAYSSASKEIKSFLWTQSLRRELSGYCSNIKLQVVKDAQALLHGLDFSEVSNVQRLMRKERRDDNDLKRLRDLNQAVNNLVELKSTQQKSILRVGTLTSDDLLILAADLEKLKSKVTRTERPLSAGVYMGNLSSQQLDQRRALLSMIGMSSGVQGARAGRDGVVRVWDVKNAELLNNQFGTMPSLTLACLTKQGQVDLNDVVQALTDLGLIYTAKYPNTSDLDRLTQSHPILNMIDTKKSSLNISGYNFSLGAAVKAGACMLDGGNMLETIKVSPQTMDGILKSILKVKKALGMFISETPGERNPYENILYKICLSGDGWPYIASRTSITGRAWENTVVDLESDGKPQKAGSNNSNKSLQSAGFTAGLTYSQLMTLKDAMLQLDPNAKTWMDIEGRPEDPVEVALYQPSSGCYIHFFREPTDLKQFKQDAKYSHGIDVTDLFAAQPGLTSAVIDALPRNMVITCQGSDDIKKLLESQGRKDIKLIDIALSKTDSRKYENAVWDQYKDLCHMHTGVVVEKKKRGGKEEITPHCALMDCIMFDAAVSGGLNTSVLRAVLPRDMVFRTSTPRVVL

SEQ ID NO: 19355 - protein, 586 aa, Artificial Sequence
  derived and/or modified protein sequence (wt) from LASV(G502-SLE-2009;Clade IV)__AIT17127__SP-HsALB_NP(2-569)
MKWVTFISLLFLFSSAYSSASKEIKSFLWTQSLRRELSGYCSNIKLQVVKDAQALLHGLDFSEVSNVQRLMRKERRDDNDLKRLRDLNQAVNNLVELKSTQQKSILRVGTLTSDDLLILAADLEKLKSKVIRTERPLSAGVYMGNLSSQQLDQRRALLSMIGMSGGNQGVRAGKDGVVRVWDVKNAELLNNQFGTMPSLTLACLTKQGQVDLNDAVQALTDLGLIYTAKYPNTSDLDRLTQSHPILNMIDTKKSSLNISGYNFSLGAAVKAGACMLDGGNMLETIKVSPQTMDGILKSILKVKKALGMFISDTPGERNPYENILYKICLSGDGWPYIASRTSITGRAWENTVVDLESDGKPQKAGSNNSNKSLQSAGFTAGLTYSQLMTLKDAMLQLDPNTKTWMDIEGRPEDPVEIALYQPSSGCYIHFFREPTDLKQFKQDAKYSHGIDVTDLFAAQPGLTSAVIDALPRNMVITCQGSDDIRKLLESQGRKDIKLIDIALNKTDSRKYENAVWDQYKDLCHMHTGVVVEKKKRGGKEEITPHCALMDCIMFDAAVSGGLNTSVLRAVLPRDMVFRTSTPRVVL

SEQ ID NO: 19356 - protein, 586 aa, Artificial Sequence
  derived and/or modified protein sequence (wt) from LASV(G733-SLE-2010;Clade IV)__AIT17155__SP-HsALB_NP(2-569)
MKWVTFISLLFLFSSAYSSASKEIKSFLWTQSLRRELSGYCSNIKLQVVKDAQALLHGLDFSEVSNVQRLMRKERRDDNDLKRLRDLNQAVNNLVELKSTQQKSVLRVGTLTSDELLVLAADLEKLKSKVIRTERPLSAGVYMGNLSSQQLDQRRALLSMIGMSGGNQGARTGRDGVVRVWDVKNAELLNNQFGTMPSLTLACLTKQGQVDLNDAVQALTDLGLIYTAKYPNTSDLDRLTQSHPILNMIDTKKSSLNISGYNFSLGAAVKAGACMLDGGNMLETIKVSPQTMDGILKSILKVKKALGMFISDTPGERNPYENILYKICLSGDGWPYIASRTSITGRAWENTVVDLESDGKPQKAGSNNSNKSLQSAGFTAGLTYSQLMTLKDAMLQLDPNAKTWMDIEGRPEDPVEIALYQPSSGCYIHFFREPTDLKQFKQDAKYSHGIDVTDLFAAQPGLTSAVIDALPRNMVITCQGSDDIRKLLESQGRKDIKLIDIALSKIDSRKYENAVWDQYKDLCHMHTGVVVEKKKRGGKEEITPHCALMDCIMFDAAVSGGLNSLVLRAVLPRDMVFRTSTPRVVL

SEQ ID NO: 19357 - protein, 586 aa, Artificial Sequence
  derived and/or modified protein sequence (wt) from MOPV/LASV reassortant(IGS-1;Clade IV)__AFY05578__SP-HsALB_NP(2-569)
MKWVTFISLLFLFSSAYSSASKEIKSFLWTQSLRRELSGYCSNIKLQVVKDAQALLHGLDFSEVSNVQRLMRKERRDDNDLKRLRDLNQAVNNLVELKSTQQKSILRVGTLTSDDLLILAADLEKLRSKVIRTERPLSAGVYMGNLSSQQLDQRRALLNMIGMSGGNQGARAGRDGVVRVWDVKNAELLSNQFGTMPSLTLACLTKQGQVDLNDAVQALTDLGLIYTAKYPNTSDLDRLTQSHPILNMIDTKKSSLNISGYNFSLGAAVKAGACMLDGGNMLETIKVSPQTMDGILKSILKVKKALGMFISDTPGERNPYENILYKICLSGDGWPYIASRTSITGRAWENTVVDLESDGKPQKADSNNSSKSLQSAGFTAGLTYSQLMTLKDAMLQLDPNAKTWMDIEGRPEDPVEIALYQPSSGCYIHFFREPTDLKQFKQDAKYSHGIDVTDLFATQPGLTSAVIDALPRNMVITCQGSDDIRKLLESQGRKDIKLIDIDLSKTDSRKYENAVWDQYKDLCHMHTGVVVEKKKRGGKEEITPHCALMDCIMFDAAVSGGLNTSVLRAVLPRDMVFRTSTPRVVL

SEQ ID NO: 19358 - protein, 586 aa, Artificial Sequence
  derived and/or modified protein sequence (wt) from LASV(LM765-SLE-2012;Clade IV)__AIT17815__SP-HsALB_NP(2-569)
MKWVTFISLLFLFSSAYSSASKEIKSFLWTQSLRRELSGYCSNIKLQVVKDAQALLHGLDFSEVSNVQRLMRKERRDDNDLKRLRDLNQAVNNLVELKSTQQKSILRVGTLTSDDLLILAADLEKLKSKVTRTERPLSAGVYMGNLSSQQLDQRRALLDMIGMSGSNQGARAGRDGVVRVWDVKNAELLNNQFGTMPSLTLACLTKQGQVDLNDAVQALTDLGLIYTAKYPNTSDLDRLTQSHPILNMIDTKKSSLNISGYNFSLGAAVKAGACMLDGGNMLETIKVSPQTMDGILKSILKVKKALGMFISDAPGERNPYENILYKICLSGDGWPYIASRTSITGRAWENTVVDLESDGKPQKAGSNGSNKSLQSAGFTAGLTYSQLMTLKDAMLQLDPNAKTWMDIEGRPEDPVEIALYQPSSGCYIHFFREPTDLKQFKQDAKYSHGIDVTDLFAAQPGLTSAVIDALPRNMVITCQGSDDIRKLFESQGRKDIKLIDIALSKTDSRKYENAVWDQYKDLCHMHTGIVVEKKKRGGKEEITPHCALMDCIMFDAAVSGGLNTSVLRAVLPRDMVFRTSTPRVVL

SEQ ID NO: 19359 - protein, 586 aa, Artificial Sequence
  derived and/or modified protein sequence (wt) from LASV(LM776-SLE-2012;Clade IV)__AIT17825__SP-HsALB_NP(2-569)
MKWVTFISLLFLFSSAYSSASKEIKSFLWTQSLRRELSSYCSNIKLQVVKDAQALLHGLDFSEVSNVQRLMRKERRDDNDLKRLRDLNQAVNNLVELKSTQQKSILRVGTLTSDDLLILAADLEKLKSKVTRTERPLSAGVYMGNLSSQQLDQRRALLSMIGMSGSNQGARAGRDGVVRVWDVKNAELLNNQFGTMPSLTLACLTKQGQVDLNDAVQALTDLGLIYTAKYPNTSDLDRLTQSHPILNMIDTKKSSLNISGYNFSLGAAVKAGACMLDGGNMLETIKVSPQTMDGILKSILKVKKALGMFISDTPGERNPYENILYKICLSGDGWPYIASRTSITGRAWENTVVDLESDGKPQKAGSNNSNKSLQSAGFTAGLTYSQLMTLKDAMLQLDPNAKTWMDIEGRPEDPVEVALYQPSSGCYIHFFREPTDLKQFKQDAKYSHGIDVTDLFAAQPGLTSAVIDALPRNMVITCQGSDDIRKLLESQGRKDIKLIDIALSKTDSRKYENAVWDQYKDLCHMHTGVVVEKKKRGGKEEITPHCALMDCIMFDAAVSGGLNTSVLRAVLPRDMVFRTSTPRVVL

SEQ ID NO: 19360 - protein, 586 aa, Artificial Sequence
  derived and/or modified protein sequence (wt) from LASV(Mad39;Clade IV)__ANH09723__SP-HsALB_NP(2-569)
MKWVTFISLLFLFSSAYSSASKEIKSFLWTQSLRRELSGYCSNIKLQVVKDAQALLHGLDFSEVSNVQRLMRKQRRDDNDLKRLRDLNQAVNNLVELKSTQQKSVLRVGTLTSDDLLTLAADLEKLKSKVTRTERPLTAGVYMGNLSSQQLDQRRALLNMIGMSGGNQGARTGRDGVVRVWDVKNAELLNNQFGTMPSLTLACLTKQGQVDLNDVVQALTDLGLIYTAKYPNTSDLDRLTQSHPILNMIDTNKSSLNISGYNFSLGAAVKAGACMLDGGNMLETIKVSPQTMDGILKSILKVKKSLGMFISDTPGERNPYENILYKICLSGDGWPYIASRTSITGRAWENTVVDLESGGKPQKAGSNNSNKSLQSAGFAAGLTYSQLMTLKDAMLQLDPNAKTWMDIEGRPEDPVEIALYQPISGCYIHFFREPTDLKQFKQDAKYSHGIDVTDLFAAQPGLTSAVIEALPRNMVITCQGSDDIRKLFESQGRKDIKLIDIALSKTDSRKYENAVWDQYKDLCHMHTGVVVEKKKKGGKEEITPHCALMDCIMFDAAVSGGLNTLVLRAVLPRDMVFRTSTPKVVL

SEQ ID NO: 19361 - protein, 586 aa, Artificial Sequence
  derived and/or modified protein sequence (wt) from LASV(Z0947-SLE-2011;Clade IV)__AIT17841__SP-HsALB_NP(2-569)
MKWVTFISLLFLFSSAYSSASKEIKSFLWTQSLRRELSGYCSNIKLQVVKDAQALLHGLDFSEVSNVQRLMRKERRDDNDLKRLRDLNQAVNNLVELKSTQQKSILRVGTLTSDDLLILAADLEKLKSKVTRTERPLSAGVYMGNLSSQQLDQRRALLNMIGMSGSNQGARTGRDGVVRVWDVKNAELLNNQFGTMPSLTLACLTKQGQVDLNDAVQALTDLGLIYTAKYPNTSDLDRLTQSHPILNMIDTKKSSLNISGYNFSLGAAVKAGACMLDGGNMLETIKVSPQTMDGILKSILKVKKALGMFISDAPGERNPYENILYKICLSGDGWPYIASRTSITGRAWENTVVDLESDGKPQKAGSNGSNKSLQSAGFTAGLTYSQLMTLKDAMLQLDPNAKTWMDIEGRPEDPVEIALYQPSSGCYIHFFREPTDLKQFKQDAKYSHGIDVTDLFAAQPGLTSAVIDALPRNMVITCQGSDDIRKLFESQGRKDIKLIDIALSKTDSRKYENAVWDQYKDLCHMHTGIVVEKKKRGGKEEITPHCALMDCIMFDAAVSGGLNTSVLRAVLPRDMVFRTSTPRVVL

SEQ ID NO: 19362 - RNA, 1761 nt, Artificial Sequence
  derived and/or modified CDS sequence (opt1) from LASV(Josiah;Clade IV)__NP_694869__SP-HsALB_NP(2-569)
augaagugggugaccuucaucagccugcucuuccuguucuccagcgccuacuccagcgccuccaaggagaucaagagcuuccuguggacccagucccuccgccgggagcugagcggcuacugcuccaacaucaagcuccagguggucaaggacgcccaggcgcugcugcacgggcuggacuucagcgagguguccaacgugcagcgccucaugcggaaggagcgccgggacgacaacgaccugaagcgccugcgggaccucaaccaggccgucaacaaccugguggagcucaagagcacccagcagaaguccauccugcgcgugggcacccugaccagcgacgaccugcucauccuggccgccgaccuggagaagcucaaguccaaggucauccggaccgagcgcccccugagcgccgggguguacaugggcaaccuguccagccagcagcucgaccagcggcgcgcgcugcugaacaugaucgggauguccggcggcaaccagggggcccgggccggccgcgacggggugguccgggugugggacgugaagaacgccgagcuccugaacaaccaguucggcaccaugccgagccugacgcucgcgugccugaccaagcaggggcaggucgaccugaacgacgccgugcaggcccucaccgaccugggccugaucuacaccgccaaguaccccaacacguccgaccucgaccgccugacccagagccaccccauccugaacaugaucgacaccaagaaguccagccucaacaucagcggcuacaacuucucccugggggccgcggugaaggccggcgccugcaugcuggacgggggcaacaugcucgagaccaucaaggucagcccccagacgauggacggcauccugaaguccauccugaaggugaagaaggcccucgggauguucaucagcgacaccccgggcgagcggaaccccuacgagaacauccuguacaagaucugccuguccggggacggcuggcccuacaucgccagccgcaccuccaucaccgggcgggcgugggagaacacgguggucgaccucgagagcgacggcaagccccagaaggccgacuccaacaacagcuccaagagccugcaguccgccggcuucaccgccgggcugaccuacagccagcucaugacccugaaggacgccaugcugcagcuggacccgaacgcgaagacguggauggacaucgagggccgccccgaggaccccguggagaucgcccucuaccagcccuccagcgggugcuacauccacuucuuccgggagccgaccgaccugaagcaguucaagcaggacgccaaguacucccacggcaucgacgugaccgaccuguucgccacccagcccgggcucacgagcgccgucaucgacgcgcugccccgcaacauggugaucacgugccagggcuccgacgacauccgcaagcugcucgagagccagggccggaaggacaucaagcugaucgacaucgcccugagcaagaccgacucccgcaaguacgagaacgccgugugggaccaguacaaggaccucugccacaugcacaccggggucguggucgagaagaagaagcggggcgggaaggaggagaucaccccgcacugcgcccugauggacugcaucauguucgacgcggccgugagcggcgggcugaacaccuccgugcuccgcgccguccugccccgggacaugguguuccgcaccagcacgccccgggugguccuguga

SEQ ID NO: 19363 - RNA, 1761 nt, Artificial Sequence
  derived and/or modified CDS sequence (opt1) from LASV(LP;Clade I)__AAF86702__SP-HsALB_NP(2-569)
augaagugggugaccuucaucagccugcucuuccuguucuccagcgccuacuccagcaacuccaaggagaucaagagcuuccuguggacccagucccuccgccgggagcugagcggcuacugcuccaacaucaagcuccagguggucaaggacgcccaggcccugcugcacgggcuggacuucagcgagguguccaacgugcagcgccucaugcggaagcagaagcgcgacgacgcggaccugaagcggcugcgcgaccucaaccaggccgucaacaaccugguggagcucaagagcacccagcagaagaacgugcugcgggucggcacgcuguccagcgacgaccugaucacccucgccgccgaccuggagaagcugaaguccaaggugauccgcaccgagcggccccucagcuccgggguguacaugggcaaccugagcucccagcagcuggaccagcgccgggcccuccugagcaugaucgggauguccggcggcccgcaggggaaccgcaccggcggggacggcgucgugcgggugugggacgucaagaacgcggagcugcucaacaaccaguucgggacgaugcccagccugacccuggccugccucaccaagcagggccagguggaccugaacgacgccgugcaggcccugaccgaccucggccugaucuacacggcgaaguaccccaacuccagcgaccuggacaugcucacccagagccaccccauccuggggauggucgacaccaagaaguccagccugaacaucuccggcuacaacuucagccucggggccgccgugaaggccggcgccugcaugcuggacggcgggaacaugcuggagaccaucaagguguccccgcagacgauggacggcauccucaagagcauccugaaggucaagcgcucccuggggauguucaucagcgacacccccggcgagcggaaccccuacgagaacauccucuacaagaucugccuguccggggagggcuggcccuacaucgcgagccgcaccuccaucaccggccgggccugggagaacacgcugguggaccucgagagcgacaacaagccgcccaagcugaacuccgccgggagcaacaagucccugcaggccgccggccucaacgcggggcugaccuacagccagcugaugacccugaaggacugcaugcuccagcuggaccccuccagcaagaccuggaucgacaucgagggccgccccgaggacccgguggagaucgcccuguuccagcccuccagcgggugcuacauccacuucuuccgggagcccacggaccucaagcaguucaagcaggacgccaaguacagccacggcaucgacgucaccgaccuguucuccacccagcccggccugaccagcgccgugaucgaggcccucccgcgcaacauggugcugacgugccagggguccgacgacaucaagaagcugcucgagagccagggccggcgcgacaucaagcugaucgacaucucccugagcaaggcggacucccgcaaguucgagaacgccgucugggaccaguacaaggaccucugccacaugcacaccgggguggucguggagaagaagaagcggggcgggaaggaggagaucacgccccacugcgcccugcuggacugcaucauguucgacgccgccaccaccggcagccucaacaucaccacccugcgcgcggugcugccccgggacauggucuuccgcaccuccacgcccaagguggugcucuga

SEQ ID NO: 19364 - RNA, 1761 nt, Artificial Sequence
  derived and/or modified CDS sequence (opt1) from LASV(803213;Clade II)__AAF86704__SP-HsALB_NP(2-569)
augaagugggugaccuucaucagccugcucuuccuguucuccagcgccuacuccagcgccuccaaggaggugaaguccuuccuguggacccagagccuccgccgggagcugagcggcuacugcuccaacaucaagcugcaggucgugaaggacgcccaggcgcuccugcacgggcuggacuucagcgaggugaacaacguccagcgccucaugcggaagcagaagcgcgacgacggcgaccugaagcggcugcgcgaccucaaccaggccgugaacaaccugguggagcugaaguccacccagcagaaguccauccuccgggucgggacgcugaccagcgacgaccugcucacccuggccgccgaccuggagaagcucaagagcaaggugauccgcaccgagcggccccuguccagcggcguguacauggggaaccuguccacgcagcagcucgagcagcgccgggcccugcugaacaugaucggcauggucggcggggcgcagggcacccagccggggcgcgacggcguggugcgggucugggacgugaagaaccccgaccuccugaacaaccaguucgggaccaugcccagccugacccucgccugccugacgaagcagggccagguggaccugaacgacgccguccucgcccugaccgaccugggccucaucuacaccgcgaaguaccccaacuccagcgaccuggaccgccugucccagagccacccgauccucaacaugguggacaccaagaaguccagccugaacaucagcggguacaacuucucccugggcgccgccgugaaggccggggccugcaugcucgacggcggcaacaugcuggagacgaucaaggucacgccccagaccauggacgggauccucaagagcauccugaaggugaagcggucccugggcauguucgugagcgacacccccggggagcgcaaccccuacgagaacauccuguacaagaucugccucuccggcgacggguggccguacaucgcgagccggaccuccaucgucggccgcgccugggagaacaccaccguggaccuggagagcgacggcaagccccagaagguggggaccgccggcuccaacaagagccugcaguccgccggguuccccacgggccucaccuacagccagcugaugacccugaaggacuccaugaugcagcuggaccccagcgccaagaccuggaucgacaucgaggggcggccggaggaccccgucgagaucgcgcucuaccagcccauguccggcugcuacauccacuucuuccgcgagcccacggaccugaagcaguucaagcaggacgccaaguacagccacggcaucgacguggccgaccuguucccggcccagcccgggcucaccuccgccgucaucgaggcgcugccccggaacauggugcugaccugccagggcagcgacgacaucaagaagcuccuggacucccaggggcgccgcgacaucaagcugaucgacaucagccucagcaagguggacucccggaaguucgagaacgccgucugggaccagugcaaggaccugugccacaugcacaccggcgugguggucgagaagaagaagcgcgggggcaaggaggagaucacgccccacugcgcccugauggacugcaucauguucgacgccgccgugagcggcgggcucaacaucccggugcugcgggcgguccugccccgcgacaugguguuccggaccuccagccccaaggugguccucuga

SEQ ID NO: 19365 - RNA, 1764 nt, Artificial Sequence
  derived and/or modified CDS sequence (opt1) from LASV(GA391;Clade III)__CAA36646__SP-HsALB_NP(2-570)
augaagugggugaccuucaucagccugcucuuccuguucuccagcgccuacuccagcgccuccaaggaggugcgcagcuuccuguggacccagucccuccggcgcgagcugagcggcuacugcuccaacaucaagcugcaggucgugaaggacgcccaggcgcuccugcacgggcuggacuucagcgagguguccaacguccagcggcucaugcgcaagcagaagcgggacgacggcgaccugaagcgccugcgggaccucaaccaggccgugaacaaccugguggagcucaagagcacccagcagaaguccguccugcgcguggggacccugagcuccgacgaccugcucauccuggccgccgaccuggagaagcucaagagcaaggugacccggaccgagcgcccccuguccagcggcgucuacauggggaaccuguccagccagcagcucgaccagcggcgcgcccugcugaacaugaucggcaugaccggcguguccgggggcgggaagggcgcgagcgacgggaucgugcgggucugggacgugaagaacgccgagcuccugaacaaccaguucggcacgaugccgucccugacccucgccugccugaccaagcagggccagguggaccugaacgacgccguccaggcgcucaccgaccuggggcugaucuacacggccaaguaccccaacagcagcgaccucgaccgccugucccagagccaccccauccugaacaugaucgacaccaagaaguccagccucaacaucuccggcuacaacuucagccugggggccgccgugaaggccggcgcgugcaugcuggacggcgggaacaugcucgagaccaucaaggugagcccccagaccauggacggcauccucaaguccauccugaaggucaagaagucccuggggauguucgugagcgacacgccgggcgagcggaaccccuacgagaacauccuguacaagaucugccuguccggggacggcuggcccuacaucgccagccgcaccuccaucgugggccgggccugggagaacaccgucguggaccucgagcaggacaacaagccccagaagaucgggaacggcgggagcaacaagucccugcagagcgccggcuucgccgcggggcugaccuacucccagcucaugacgcugaaggacuucaagugcuucaaccugaucccgaacgccaagaccuggauggacaucgagggccgccccgaggaccccguggagaucgcccuguaccagcccagcuccggcugcuacguccacuucuuccgggagccgaccgaccucaagcaguucaagcaggacgccaaguacagccacgggaucgacgugaccgaccuguucgccgcgcagcccggccugacgagcgccgucaucgaggcccucccccgcaacauggugaucacgugccagggguccgaggacauccggaagcugcuggagagccagggccgccgcgacaucaagcucaucgacaucacccuguccaaggccgacagccggaaguucgagaacgccgugugggaccaguucaaggaccugugccacaugcacaccggggucgugguggagaagaagaagcgcggcggcaaggaggagaucacgccccacugcgcgcucauggacugcaucauguucgacgccgccgucuccgggggccuggacgccaaggugcugcgggugguccucccgcgcgacaugguguuccggaccagcacccccaaggugguccuguga

SEQ ID NO: 19366 - RNA, 1761 nt, Artificial Sequence
  derived and/or modified CDS sequence (opt1) from LASV(AV;Clade V)__CCA30315__SP-HsALB_NP(2-569)
augaagugggugaccuucaucagccugcucuuccuguucuccagcgccuacuccagcgccuccaaggaggugaaguccuuccuguggacccagagccuccgccgggagcugagcggcuacugcuccaacaucaagcugcaggucgugaaggacgcccaggcgcuccugcacgggcuggacuucagcgagguguccaacguccagcgccucaugcggaagcagcgccgggacgacagcgaccugaagcgccugcgggaccucaaccaggccgugaacaaccugguggagcugaaguccacccagcagaaguccguccuccgcgugggcacgcugagcagcgacgaccugcucacccuggccgccgaccuggagaagcucaaguccaaggugacccggaccgagcgcccccugagcuccggggucuacaugggcaaccugagcucccagcagcucgaccagcggcgcgcccugcugaaccucaucgggaugacgaacggcagccagggcucccaggcggggcgggacggcguggugcgcgucugggacgugaagaacgccgagcugcugaacaaccaguucgggaccaugccgagccucacccuggccugccugaccaagcagggccagguggaccucaacgacgucgugcaggcccugacggaccuggggcucaucuacaccgcgaaguaccccaacaccagcgaccuggaccggcugacccagucccaccccauccucaacaugaucgacacgaagaaguccagccugaacaucagcggcuacaacuucucccugggcgccgccgugaaggccggggccugcaugcucgacggcgggaacaugcuggagaccaucaaggucagcccccaguccauggacggcauccucaagagcauccugaaggugaagcgcgcgcugggcauguucguguccgacaccccgggggagcggaaccccuacgagaacauccuguacaagaucugccucagcggcgacggguggcccuacaucgccucccgcaccagcaucgucggccgggccugggagaacacggugguggaccuggagaccgacgggaagccccagaagaucggcuccggcaacagcaacaagucccugcagagcgccggguucuccgccggccucaccuacagccagcugaugacccugaaggacgcgaugcugcagcucgacccgaacgccaagacguggauggacaucgaggggcgccccgaggaccccgucgagguggcccuguaccagcccaucuccggcugcuacauccacuucuuccgggagccgaccgaccugaagcaguucaagcaggacgccaaguacagccacgggaucgacaucgccgaccucuucgcggcccagcccggccugaccagcgccgucaucgaggcccugccccgcaacauggugaucacgugccagggcuccgaggacaucaagaagcuccuggagagccaggggcgcaaggacaucaagcugaucgacaucgcccucuccaagaucgacagccggaaguucgagaacgcggugugggaccaguacaaggaccugugccacaugcacaccggcgucgugguggagaagaagaagcgcgggggcaaggaggagaucaccccgcacugcgcccugauggacugcaucauguucgacgccgccgucuccgggggccucaacacccuggugcugcgggcggugcucccccgcgacauggucuuccggaccagcacgccccgcguggugcuguga

SEQ ID NO: 19367 - RNA, 1761 nt, Artificial Sequence
  derived and/or modified CDS sequence (opt1) from LASV(Togo/2016/7082;Clade VI)__AMR44578__SP-HsALB_NP(2-569)
augaagugggugaccuucaucagccugcucuuccuguucuccagcgccuacuccagcaacuccaaggaggugaaguccuuccuguggacccagagccuccgccgggagcugagcggcuacugcuccaacaucaagcugcaggucgugaaggacgcccaggcccuccugcacgggcuggacuucagcgagguguccaacguccagcgccucaugcggaagcagaagcgcgacgacggcgaccugaagcggcugcgcgaccucaaccaggcggugaacaaccugguggagcucaagagcguccagcagaaguccauccugcggguggggacccugaccagcgacgaccugcucacccuggccgccgaccuggagaagcucaaguccaaggugacccgcaccgagcggccccugagcuccggcgucuacauggggaaccugagcucccagcagcucgaccagcgccgggcccugcugagcaugaucggcauguccggcgggaaccagaacagccagccgaagggcgacgggguggugcgcgucugggacgugaagaacgccgaccuccugaacaaccaguucggcacgaugcccucccugacccucgcgugccugaccaagcagggccagguggaccugaacgacgccguccaggcccucaccgaccuggggcugaucuacacggccaaguaccccaacagcagcgaccucgaccggcugucccagagccaccccauccugaacaugaucgacaccaagaaguccagccucaacaucuccggcuacaacuucagccugggggcggccaucaagaccggcgccugcaugcuggacgggggcaacaugcucgagaccaucaaggugacgccgcagaccauggacggcauccugaaguccauccugaaggugaagcgcagccucgggauguucaucuccgacacccccggcgagcggaaccccuacgagaacauccuguacaagaucugccugagcggggacggcuggcccuacaucgccucccgcaccgccaucaucgggcgggcgugggagaacacggucguggaccucgagagcgacuccaagccgcagaagaucggcagcaacggcuccaacaagagccugcaguccgccggguucgcccccggccugaccuacagccagcucaugacccugaaggacuccaugcugcagcuggaccccaacgccaagaccuggaucgacaucgaggggcgccccgaggacccgguggaggucgcccucuuccagcccaucagcggcugcuacauccacuucuuccgggagcccacggaccugaagcaguucaagcaggacgcgaaguacagccacgggaucgacgugaccgaccuguucgccgcccagcccggccucaccuccgccgugaucgaggcccugccgcgcaacaugguccugaccugccagggcagcgacgacaucaagaagcuccuggacucccaggggcggcgcgacaucaagcugaucgacgugagccucaacaagaucgacucccgcaaguucgagaacgcggucugggaccaguacaaggaccugugccacaugcacacgggcgugguggucgagaagaagaagaagggcgggaaggaggagaucacgccccacugcgcccugcucgacugcaucauguucgacgccgccgugagcgggggccugaacgccaccgugcugcgggcgguccucccccgcgacaugguguuccggaccuccagccccaaggugguccuguga

SEQ ID NO: 19368 - RNA, 1761 nt, Artificial Sequence
  derived and/or modified CDS sequence (opt1) from LASV(KAK-428;Clade n.d. (VII))__ANH09741__SP-HsALB_NP(2-569)
augaagugggugaccuucaucagccugcucuuccuguucuccagcgccuacuccagcaacuccaaggaggugaaguccuuccuguggacccagagccuccgccgggagcugagcggcuacugcaccaacaucaagcugcaggucgugaaggacgcccaggcccuccugcacgggcuggacuucuccgaggugagcaacguccagcgccucaugcggaagcagaagcgcgacgacaacgaccugaagcggcugcgcgaccucaaccaggcggugaacaaccugguggagcugaaguccguccagcagaaguccgugcucaaggugggcacgcugaacagcgacgaccugcucacccuggccgccgaccuggagaagcucaagagcaaggucgugcggaccgagcgcccccuguccagcgggguguacaugggcaaccuguccagccagcagcucgaccagcggcgcgcccugcugaacaugaucgggauggccggcggcucccaggggaaccagccgagccgggacggcgucgugcgcgugugggacgucaagaacgcggaccuccugaacaaccaguucgggaccaugcccucccugacgcucgccugccugaccaagcagggccagguggaccugaacgacgugguccucgcccugaccgaccuggggcucaucuacaccgccaaguaccccaacagcuccgaccuggaccggcugagccagaaccaccccgugcucaacaugaucgacgugaacaagagcucccugaacaucagcggcuacaacuucucccugggcgcggccgucaaggccggggccugcaugcucgacggcgggaacaugcuggagacgaucaagaucagcccgcagaccguggacggcauccugaaguccauccucaaggugaagcgcgcccugggcauguucgucagcgacacccccggggagcggaaccccuacgagaacauccuguacaaggugugccucuccggcaacggguggcccuacaucgcgagccgcaccuccaucgucggccgggccugggagaacacggugguggaccuggagagcaacaagaaccagccgaaggucgggaacaacggcuccaacaagaugcugcagagcuccggcuucgccaccgggcucaccuacagccagcugaugacccugcgcgacuccaugcugcagcucgaccccacggccaagaccuggaucgacaucgagggccggcccgaggaccccguggagcuggcccuguuccagccgagcuccgggugcuacauccacuucuuccgcgagcccaccgaccucaagcaguucaagcaggacgcgaaguacagccacggcaucgacgugaacgaccuguucuccgcccagcccgggcugaccagcgccguccucgaggcccugccccggaacauggugcugacgugccagggcagcgacgacauccgcaagcuccuggacucccaggaccgcaaggacaucaagcugaucgacaucagccucuccaaggccgacgcgcggaaguucgagaacgacgugugggaccaguucaaggaccugugccacaugcacaccggcaucgucguggagaagaagaagaagggcgggaagcaggagaugaccccgcacugcgcccugcucgacugcaucauguucgacgccgccgugagcgggggccugaacguccccacccugcgcgccgugcuccccacggacaugguguuccggaccaucaccaccaaggucgugcuguga

SEQ ID NO: 19369 - RNA, 1761 nt, Artificial Sequence; identical to SEQ ID NO: 19363
  derived and/or modified CDS sequence (opt1) from LASV(Pinneo-NIG-1969;Clade I)__AIT17837__SP-HsALB_NP(2-569)

SEQ ID NO: 19370 - RNA, 1761 nt, Artificial Sequence
  derived and/or modified CDS sequence (opt1) from LASV(ISTH0009-NIG-2011;Clade II)__AIT17405__SP-HsALB_NP(2-569)
augaagugggugaccuucaucagccugcucuuccuguucuccagcgccuacuccagcguguccaaggaggucaagagcuuccuguggacccagucccuccgccgggagcugagcggcuacugcuccaacaucaagcuccagguggugaaggacgcccaggcccugcugcacgggcuggacuucagcgaggucuccaacgugcagcgccucaugcggaagcagaagcgcgacgacagcgaccugaagcggcugcgcgaccucaaccaggcggugaacaaccuggucgagcugaaguccacccagcagaaguccauccuccgggugggcacccugaccagcgacgaccugcucacccuggccgccgaccuggagaagcucaagagcaaggugauccgcaccgagcggccccuguccagcggggucuacaugggcaaccuguccacgcagcagcucgagcagcgccgggcccugcugaacaugaucgggauggugggcggcgcccaggggacccagccgggccgcgacggggugguccgggugugggacgugaagaaccccgaccuccugaacaaccaguucggcaccaugcccagccugacccucgcgugccugacgaagcaggggcaggucgaccugaacgacgccgugcucgcccugaccgaccugggccucaucuacaccgccaaguaccccaacuccagcgaccuggaccgccugucccagagccacccgauccucaacaugguggacaucaagaaguccagccugaacaucagcggcuacaacuucucccugggggcggccgucaaggccggcgccugcaugcucgacgggggcaacaugcuggagaccaucaaggugacgccccagaccauggacggcauccucaagagcauccugaaggugaagcggucccuggggauguucgucagcgacacccccggcgagcgcaaccccuacgagaacauccuguacaagaucugccucuccggggacggcuggccguacaucgccagccggaccuccaucguggggcgcgcgugggagaacacgaccguggaccuggagagcgacggcaagccccagaaggucggcuccgccgggagcaacaagucccugcagagcgccggcuuccccaccgggcucaccuacucccagcugaugacgcugaaggacagcaugaugcagcuggaccccuccgccaagaccuggaucgacaucgagggccggccggaggaccccguggagaucgcccucuaccagcccaugagcgggugcuacauccacuucuuccgcgagcccaccgaccugaagcaguucaagcaggacgcgaaguacucccacggcaucgacgucgccgaccuguucccggcccagcccggccucaccagcgccgugaucgaggcccugccccggaacauggugcugacgugccaggggagcgacgacaucaagcgccuccuggacucccagggccgccgggacaucaagcugaucgacaucgcgcucagcaaggccgacucccgccgguucgagaacgccgucugggaccagugcaaggaccugugccacaugcacaccggggugguggucgagaagaagaagcgcggcgggaaggaggagaucacgccccacugcgcccugauggacugcaucauguacgacgccgcggugagcggcggccucaacaucccggugcugcgggccguccugccccgcgacaugguguuccggaccuccagccccaaggugguccucuga

SEQ ID NO: 19371 - RNA, 1761 nt, Artificial Sequence
  derived and/or modified CDS sequence (opt1) from LASV(ISTH2010-NIG-2012;Clade II)__AIT17483__SP-HsALB_NP(2-569)
augaagugggugaccuucaucagccugcucuuccuguucuccagcgccuacuccagcgccuccaaggaggugaaguccuuccuguggacccagagccuccgccgggagcugagcggcuacugcuccaacaucaagcugcaggucgugaaggacgcccaggcgcuccugcacgggcuggacuucagcgagguguccaacguccagcgccucaugcggaagcagaagcgcgacgacagcgaccugaagcggcugcgcgaccucaaccaggccgugaacaaccugguggagcugaaguccacccagcagaaguccauccuccgggucggcacgcugaccagcgacgaccugcucacccuggccgccgaccuggagaagcucaagagcaaggugauccgcaccgagcggccccuguccagcgggguguacaugggcaaccuguccacgcagcagcucgagcagcgccgggcccugcugaaccucaucgggauggucggcggcgcgcaggggacccagccgggccgcgacgggguggugcgggucugggacgugaagaaccccgaccugcugaacaaccaguucggcaccaugcccagccucacccuggccugccugacgaagcagggccagguggaccucaacgacgccguccuggcccugaccgaccucgggcugaucuacaccgcgaaguaccccaacuccagcgaccuggaccgccucucccagagccacccgauccugaacaugguggacaccaagaaguccagccugaacaucagcggcuucaacuucucccucggggccgccgugaaggccggcgccugcaugcuggacgggggcaacaugcuggagacgaucaaggucacgccccagaccauggacggcauccucaagagcauccugaaggugaagaagucccuggggauguucgugagcgacacccccggcgagcggaaccccuacgagaacauccucuacaagaucugccuguccggggacggcuggccguacaucgcgagccgcaccuccaucgucgggcgggccugggagaacaccaccguggaccuggagagcgacggcaagccccacaaggugggcaccgccggguccaacaagagccuccaguccgccggcuuccccacggggcugaccuacagccagcugaugacccugaaggacuccaugaugcagcucgaccccagcgccaagaccuggaucgacaucgagggccgcccggaggaccccgucgagaucgcgcuguaccagcccauguccgggugcuacauccacuucuuccgggagcccacggaccugaagcaguucaagcaggacgccaaguacagccacggcaucgacguggccgaccucuucccggcccagcccggccugaccuccgccgucaucgaggcgcugccccgcaacauggugcugaccugccaggggagcgacgacaucaagcggcuccuggacagccagggccgccgcgacaucaagcucaucgacaucgcccuguccaaggccgacagccggcgcuucgagaacgccgugugggaccagugcaaggaccugugccacaugcacaccggggucgugguggagaagaagaagcggggcgggaaggaggagaucacgccccacugcgcccucauggacugcaucauguacgacgcggccgucuccggcggccugaacaucccggugcugcgcgccgugcucccccgggacauggucuuccgcaccagcucccccaagguggugcuguga

SEQ ID NO: 19372 - RNA, 1761 nt, Artificial Sequence
  derived and/or modified CDS sequence (opt1) from LASV(Lassa virus/H.sapiens-wt/NGA/2015/ISTH_0543;Clade II)__AVO03640__SP-HsALB_NP(2-569)
augaagugggugaccuucaucagccugcucuuccuguucuccagcgccuacuccagcgccuccaaggaggugaaguccuuccuguggacccagagccuccgccgggagcugagcggcuacugcuccaacaucaagcugcaggucgugaaggacgcccaggcgcuccugcacgggcuggacuucagcgagguguccaacguccagcgccucaugcggaagcagaagcgcgacgacagcgaccugaagcggcugcgcgaccucaaccaggccgugaacaaccugguggagcugaaguccacccagcagaaguccauccuccgggucggcacgcugaccagcgacgaccugcucacccuggccgccgaccuggagaagcucaagagcaaggugauccgcaccgagcggccccuguccagcgggguguacaugggcaaccuguccacgcagcagcucgagcagcgccgggcccugcugaacaugaucgggauggucggcggcgcgcaggggacccagccgggccgcgacgggguggugcgggucugggacgugaagaaccccgaccuccugaacaaccaguucggcaccaugcccagccugacccucgccugccugacgaagcagggccagguggaccugaacgacgccguccucgcccugaccgaccuggggcucaucuacaccgcgaaguaccccaacuccagcgaccuggaccgccugucccagagccacccgauccucaacaugguggacaccaagaaguccagccugaacaucagcggcuacaacuucucccugggggccgccgugaaggccggcgccugcaugcucgacgggggcaacaugcuggagacgaucaaggucacgccccagaccauggacggcauccucaagagcauccugaaggugaagaagucccuggggauguucgugagcgacacccccggcgagcggaaccccuacgagaacauccuguacaagaucugccucuccggggacggcuggccguacaucgcgagccgcaccuccaucgucgggcgggccugggagaacaccaccguggaccuggagagcgacggcaagccccagaaggugggcuccgccgggagcaacaagucccugcagagcgccggcuuccccaccgggcucacguacucccagcugaugacccugaaggacagcaugaugcagcuggaccccuccgccaagaccuggaucgacaucgagggccgcccggaggaccccgucgagaucgcgcucuaccagcccaugagcgggugcuacauccacuucuuccgggagcccaccgaccugaagcaguucaagcaggacgccaaguacucccacggcaucgacguggccgaccuguucccggcccagcccggccucacgagcgccgucaucgaggcgcugccccgcaacauggugcugaccugccaggggagcgacgacaucaagcggcuccuggacucccagggccgcaaggacaucaagcugaucgacaucgcccucagcaaggccgacucccgccgguucgagaacgccgugugggaccagugcaaggaccugugccacaugcacaccggggucgugguggagaagaagaagcgcggcgggaaggaggagaucacgccccacugcgcccugauggacugcaucauguacgacgcggccgucagcggcggccucaacaucccggugcugcgggccgugcugccccgcgacauggucuuccggaccuccagccccaagguggugcucuga

SEQ ID NO: 19373 - RNA, 1761 nt, Artificial Sequence
  derived and/or modified CDS sequence (opt1) from LASV(Lassa virus/H.sapiens-wt/NGA/2016/ISTH_0009;Clade II)__AVO03572__SP-HsALB_NP(2-569)
augaagugggugaccuucaucagccugcucuuccuguucuccagcgccuacuccagcgccuccaaggaggugaaguccuuccuguggacccagagccuccgccgggagcugagcggcuacugcuccaacaucaagcugcaggucgugaaggacgcccaggcgcuccugcacgggcuggacuucagcgagguguccaacguccagcgccucaugcggaagcagaagcgcgacgacagcgaccugaagcggcugcgcgaccucaaccaggccgugaacaaccugguggagcugaaguccacccagcagaaguccauccuccgggucggcacgcugaccagcgacgaccugcucacccuggccgccgaccuggagaagcucaagagcaaggugauccgcaccgagcggccccuguccagcgggguguacaugggcaaccuguccacgcagcagcucgagcagcgccgggcccugcugaacaugaucgggauggucggcggcgcgcaggggacccagccgggccgcgacgggguggugcgggucugggacgugaagaaccccgaccuccugaacaaccaguucggcaccaugcccagccugacccucgccugccugacgaagcagggccagguggaccugaacgacgccguccucgcccugaccgaccuggggcucaucuacaccgcgaaguaccccaacuccagcgaccuggaccgccugucccagagccacccgauccucaacaugguggacaccaagaaguccagccugaacaucagcggcuacaacuucucccugggggccgccgugaaggccggcgccugcaugcucgacgggggcaacaugcuggagacgaucaaggucacgccccagaccauggacggcauccucaagagcauccugaaggugaagaagucccuggggauguucgugagcgacacccccggcgagcggaaccccuacgagaacauccuguacaagaucugccucuccggggacggcuggccguacaucgcgagccgcaccuccaucgucgggcgggccugggagaacaccaccguggaccuggagagcgacggcaagccccagaaggugggcuccgccgggagcaacaagucccugcagagcgccggcuuccccaccgggcucacguacucccagcugaugacccugaaggacagcaugaugcagcuggaccccuccgccaagaccuggaucgacaucgagggccgcccggaggaccccgucgagaucgcgcucuaccagcccaugagcgggugcuacauccacuucuuccgggagcccaccgaccugaagcaguucaagcaggacgccaaguacucccacggcaucgacguggccgaccuguucccggcccagcccggccucacgagcgccgucaucgaggcgcugccccgcaacauggugcugaccugccaggggagcgacgacaucaagcggcuccuggacucccagggccgccgcgacaucaagcugaucgacaucgcccucagcaaggccgacucccggcgcuucgagaacgccgugugggaccagugcaaggaccugugccacaugcacaccggggucgugguggagaagaagaagcggggcgggaaggaggagaucacgccccacugcgcccugauggacugcaucauguacgacgcggccgucagcggcggccucaacaucccggugcugcgcgccgugcugccccgggacauggucuuccgcaccuccagccccaagguggugcucuga

SEQ ID NO: 19374 - RNA, 1761 nt, Artificial Sequence
  derived and/or modified CDS sequence (opt1) from LASV(Lassa virus/H.sapiens-wt/NGA/2016/ISTH_0017;Clade II)__AVO03568__SP-HsALB_NP(2-569)
augaagugggugaccuucaucagccugcucuuccuguucuccagcgccuacuccagcgccuccaaggaggugaaguccuuccuguggacccagagccuccgccgggagcugagcggcuacugcuccagcaucaagcugcaggucgugaaggacgcccaggcgcuccugcacgggcuggacuucuccgaggugagcaacguccagcgccucaugcggaagcagaagcgcgacgacuccgaccugaagcggcugcgcgaccucaaccaggccgugaacaaccugguggagcucaagagcacccagcagaaguccauccugcgggucggcacgcugaccagcgacgaccugcucacccuggccgccgaccuggagaagcucaaguccaaggugauccgcaccgagcggccccugagcuccgggguguacaugggcaaccugagcacgcagcagcucgagcagcgccgggcccugcugaacaugaucgggauggcgggcggcgcccaggggacccagccgggccgcgacggggucgugcgggugugggacgucaagaaccccgaccuccugaacaaccaguucggcaccaugcccucccugacccucgccugccugacgaagcagggccagguggaccugaacgacgccgugcucgcgcugaccgaccuggggcucaucuacaccgccaaguaccccaacagcuccgaccuggaccgccugagccagagccacccgauccucaacauggucgacaccaagaaguccagccugaacaucuccggcuacaacuucagccugggggccgccgugaaggccggcgcgugcaugcucgacgggggcaacaugcuggagacgaucaaggugacgccccagaccauggacggcauccugaaguccauccucaaggucaagcggagccuggggauguucguguccgacgcccccggcgagcgcaaccccuacgagaacauccuguacaagaucugccucagcggggacggcuggccguacaucgccucccggaccagcaucguggggcgcgccugggagaacaccaccgucgaccuggaguccgacggcaagccccagaaggugggcgccaccgggagcaacaagucccugcagagcgcgggcuuccccaccgggcucacguacucccagcugaugacccugaaggacagcaugaugcagcuggaccccuccgccaagaccuggaucgacaucgagggccggccggaggaccccguggaggucgcccucuaccagcccgugagcgggugcuacauccacuucuuccgcgagcccaccgaccugaagcaguucaagcaggacgccaaguacucccacggcaucgacgucgccgaccuguucccggcgcagcccggccucacgagcgccgugaucgaggcccugccccggaacauggugcugaccugccaggggagcgacgacaucaagaagcuccuggacucccagggccgcaaggacaucaagcugaucgacaucgcccucagcaaggccgacucccgccgguucgagaacgcggucugggaccagugcaaggaccugugccacaugcacaccggggugguggucgagaagaagaagcgcggcgggaaggaggagaucacgccccacugcgcccugauggacugcaucauguacgacgccgccgugagcggcggccucaacaucccggugcugcgggcgguccugccccgcgacaugguguuccggaccuccagccccaaggugguccucuga

SEQ ID NO: 19375 - RNA, 1761 nt, Artificial Sequence
  derived and/or modified CDS sequence (opt1) from LASV(Lassa virus/H.sapiens-wt/NGA/2018/ISTH_0959;Clade II)__AVV65100__SP-HsALB_NP(2-569)
augaagugggugaccuucaucagccugcucuuccuguucuccagcgccuacuccagcgccuccaaggaggugaaguccuuccuguggacccagagccuccgccgggagcugagcggcuacugcuccaacaucaagcugcaggucgugaaggacgcccaggcgcuccugcacgggcuggacuucagcgagguguccaacguccagcgccucaugcggaagcagaagcgcgacgacagcgaccugaagcggcugcgcgaccucaaccaggccgugaacaaccugguggagcugaaguccacccagcagaaguccauccuccgggucggcacccugaccagcgacgaccugcucacccuggccgccgaccuggagaagcucaagagcaaggugauccgcaccgagcggccccuguccagcgggguguacaugggcaaccuguccacgcagcagcucgagcagcgccgggcccugcugaaccucaucgggauggucggcggcgcgcaggggacccagccgggccgcgacgggguggugcgggucugggacgugaagaaccccgaccugcugaacaaccaguucggcaccaugcccagccucacccuggccugccugacgaagcagggccagguggaccucaacgacgucgugcuggcccugaccgaccucgggcugaucuacaccgccaaguaccccaacuccagcgaccuggaccgccucucccagagccacccgauccugaacaugguggacaccaagaaguccagccugaacaucagcggcuucaacuucucccucggggcggccgucaaggccggcgccugcaugcuggacgggggcaacaugcuggagacgaucaaggugacgccccagaccauggacggcauccucaagagcauccugaaggugaagaagucccuggggauguucgucagcgacacccccggcgagcggaaccccuacgagaacauccucuacaagaucugccuguccggggacggcuggccguacaucgccagccgcaccuccaucguggggcgggcgugggagaacaccaccguggaccuggagagcgacggcaagccccacaaggucggcaccgccggguccaacaagagccuccaguccgccggcuuccccacggggcugaccuacagccagcugaugacccugaaggacuccaugaugcagcucgaccccagcgccaagaccuggaucgacaucgagggccgcccggaggaccccguggagaucgcccuguaccagcccauguccgggugcuacauccacuucuuccgggagcccacggaccugaagcaguucaagcaggacgcgaaguacagccacggcaucgacgucgccgaccucuucccggcccagcccggccugaccuccgccgugaucgaggcccugccccgcaacauggugcugaccugccaggggagcgacgacaucaagcggcuccuggacagccagggccgcaaggacaucaagcucaucgacaucgcgcuguccaagaccgacagccgccgguucgagaacgccgucugggaccagugcaaggaccugugccacaugcacacgggggugguggucgagaagaagaagcgcggcgggaaggaggagaucacgccccacugcgcccucauggacugcaucauguacgacgccgccguguccggcggccugaacaucccggugcugcgggcgguccucccccgcgacaugguguuccggaccagcucccccaaggugguccuguga

SEQ ID NO: 19376 - RNA, 1761 nt, Artificial Sequence
  derived and/or modified CDS sequence (opt1) from LASV(LASV003-NIG-2008;Clade II)__AIT17581__SP-HsALB_NP(2-569)
augaagugggugaccuucaucagccugcucuuccuguucuccagcgccuacuccagcgccuccaaggaggugaaguccuuccuguggacccagagccuccgccgggagcugagcggcuacugcuccagcaucaagcugcaggucgugaaggacgcccaggcgcuccugcacgggcuggacuucuccgaggugagcaacguccagcgccucaugcggaagcagaagcgcgacgacuccgaccugaagcggcugcgcgaccucaaccaggccgugaacaaccugguggagcucaagagcacccagcagaaguccguccugcgggugggcacccugaccagcgacgaccugcucacccuggccgccgaccuggagaagcucaaguccaaggugauccgcaccgagcggccccugagcuccggggucuacaugggcaaccugagcgcccagcagcucgagcagcgccggacgcugcugaacaugaucgggauggugggcggcgcgcaggggacccagccgggccgcgacggggugguccgggugugggacgugaagaaccccgaccuccugaacaaccaguucggcaccaugcccucccugacccucgccugccugacgaagcaggggcaggucgaccugaacgacguggugcucgcccugaccgaccugggccucaucuacaccgccaaguaccccaacagcuccgaccuggaccgccugagccagagccacccgauccucuccauggucgacaccaagaaguccagccugaacaucagcggcuacaacuucucccugggggcggccgugaaggccggcgccugcaugcucgacgggggcaacaugcuggagacgaucaaggugacgccccagaccauggacggcauccucaagagcauccugaaggucaagaagucccuggggauguucgugagcgacacccccggcgagcggaaccccuacgagaacauccuguacaagaucugccucuccggggacggcuggccguacaucgccagccgcaccuccaucguggggcgggcgugggagaacaccaccgucgaccuggagagcgacggcaagccccagaaggugggcaccgccggguccaacaagagccugcaguccgccggcuuccccacggggcucaccuacagccagcugaugacccugaaggacuccaugaugcagcuggaccccagcgccaagaccuggaucgacaucgagggccgcccggaggaccccgucgagaucgcccucuaccagcccauguccgggugcuacauccacuucuuccgggagcccacggaccugaagcaguucaagcaggacgcgaaguacagccacggcaucgacgugaccgaccuguucccggcccagcccggccucaccagcgccgugaucgaggcccugccccgcaacaugguccugaccugccagggguccgacgacaucaagcggcuccuggacagccagggccgccgcgacaucaagcugaucgacaucgcccucuccaaggcggacagccggcgcuucgagaacgccgugugggaccagugcaaggaccugugccacaugcacacggggguggucguggagaagaagaagcggggcgggaaggaggagaucacgccccacugcgcccugauggacugcaucauguacgacgccgccguguccggcggccucaacaucccgguccugcgcgcggugcugccccgggacaugguguuccgcaccagcucccccaaggucgugcucuga

SEQ ID NO: 19377 - RNA, 1761 nt, Artificial Sequence
  derived and/or modified CDS sequence (opt1) from LASV(LASV035-NIG-2009;Clade II)__AIT17589__SP-HsALB_NP(2-569)
augaagugggugaccuucaucagccugcucuuccuguucuccagcgccuacuccagcgccuccaaggaggugaaguccuuccuguggacccagagccuccgccgggagcugagcggcuacugcuccagcaucaagcugcaggucgugaaggacgcccaggcgcuccugcacgggcuggacuucuccgaggugagcaacguccagcgccucaugcggaagcagaagcgcgacgacuccgaccugaagcggcugcgcgaccucaaccaggccgugaacaaccugguggagcucaagagcacccagcagaaguccauccugcgggucggcacgcugaccagcgacgaccugcucacccuggccgccgaccuggagaagcucaaguccaaggugauccgcaccgagcggccccugagcuccgggguguacaugggcaaccugagcgcccagcagcucgagcagcgccgggcgcugcugaacaugaucgggauggucggcggcgcccaggggacgcagccgggccgcgacgggguggugcgggucugggacgugaagaaccccgaccuccugaacaaccaguucggcaccaugcccucccugacccucgccugccugaccaagcagggccagguggaccugaacgacgccguccucgcgcugacggaccuggggcucaucuacaccgccaaguaccccaacagcuccgaccuggaccgccugagccagagccacccgauccucaacaugguggacaccaagaaguccagccugaacaucuccggcuacaacuucagccugggggccgccgugaaggccggcgcgugcaugcucgacgggggcaacaugcuggagaccaucaaggucacgccccagaccauggacggcauccugaaguccauccucaaggugaagcggagccuggggauguucguguccgacacccccggcgagcgcaaccccuacgagaacauccuguacaagaucugccucagcggggacggcuggccguacaucgccucccggaccagcaucgucgggcgcgccugggagaacacgaccguggaccuggaguccgacggcaagccccagaaggugggcaccaccgggagcaacaagucccugcagagcgccggcuuccccacggggcucaccuacucccagcugaugacccugaaggacagcaugaugcagcuggaccccuccgccaagaccuggaucgacaucgagggccggccggaggaccccgucgagaucgcgcucuaccagcccaugagcgggugcuacauccacuucuuccgcgagcccacggaccugaagcaguucaagcaggacgccaaguacucccacggcaucgacguggccgaccuguucccggcccagcccggccucaccagcgccgucaucgaggcgcugccccggaacauggugcugaccugccaggggagcgacgacaucaagaagcuccuggacucccagggccgccgcgacaucaagcugaucgacaucgcccucagcaaggccgacucccggaaguucgagaacgccgugugggaccagugcaaggaccugugccacaugcacaccggggucgugguggagaagaagaagcgcggcgggaaggaggagaucacgccccacugcgcccugauggacugcaucauguacgacgcggccgucagcggcggccucaacaucccggugcugcgggccgugcugccccgcgacauggucuuccggaccuccagccccaagguggugcucuga

SEQ ID NO: 19378 - RNA, 1761 nt, Artificial Sequence
  derived and/or modified CDS sequence (opt1) from LASV(LASV1000-NIG-2009;Clade II)__AIT17783__SP-HsALB_NP(2-569)
augaagugggugaccuucaucagccugcucuuccuguucuccagcgccuacuccagcgccuccaaggaggugaaguccuuccuguggacccagagccuccgccgggagcugagcggcuacugcuccaacaucaagcugcaggucgugaaggacgcccaggcgcuccugcacgggcuggacuucagcgagguguccaacguccagcgccucaugcggaagcagaagcgcgacgacagcgaccugaagcggcugcgcgaccucaaccaggccgugaacaaccugguggagcugaaguccacccagcagaaguccauccuccgggucggcacgcugaccagcgacgaccugcucacccuggccgccgaccuggagaagcucaagagcaaggugauccgcaccgagcggccccuguccagcgggguguacaugggcaaccuguccacgcagcagcucgagcagcgccgggcccugcugaacaugaucgggauggucggcggcgcgcaggggacccagccgggccgcgacgggguggugcgggucugggacgugaagaaccccgaccuccugaacaaccaguucggcaccaugcccagccugacccucgccugccugacgaagcagggccagguggaccugaacgacgucgugcucgcccugaccgaccuggggcucaucuacaccgccaaguaccccaacuccagcgaccuggaccgccugucccagagccacccgauccucaacaugguggacaccaagaaguccagccugaacaucagcggcuacaacuucucccugggggcggccgucaaggccggcgccugcaugcucgacgggggcaacaugcuggagacgaucaaggugacgccccagaccauggacggcauccucaagagcauccugaaggugaagaagucccuggggauguucgucagcgacacccccggcgagcggaaccccuacgagaacauccuguacaagaucugccucuccggggacggcuggccguacaucgccagccgcaccuccaucguggggcgggcgugggagaacaccaccguggaccuggagagcgacggcaagccccagaaggucggcaccgccggguccaacaagagccugcaguccgccggcuuccccacggggcucaccuacagccagcugaugacccugaaggacuccaugaugcagcuggaccccagcgccaagaccuggaucgacaucgagggccgcccggaggaccccguggagaucgcccucuaccagcccgucuccgggugcuacauccacuucuuccgggagcccacggaccugaagcaguucaagcaggacgcgaaguacagccacggcaucgacguggccgaccuguucccggcccagcccggccucaccuccgccgugaucgaggcccugccccgcaacaugguccugaccugccaggggagcgacgacaucaagcggcuccuggacagccagggccgccgcgacaucaagcugaucgacaucgcgcucuccaaggccgacagccggcgcuucgagaacgccgugugggaccagugcaaggaccugugccacaugcacaccgggguggucguggagaagaagaagcggggcgggaaggaggagaucacgccccacugcgcccugauggacugcaucauguacgacgccgcgguguccggcggccucaacaucccgguccugcgcgccgugcugccccgggacaugguguuccgcaccagcucccccaaggucgugcucuga

SEQ ID NO: 19379 - RNA, 1761 nt, Artificial Sequence
  derived and/or modified CDS sequence (opt1) from LASV(LASV221-NIG-2010;Clade II)__AIT17625__SP-HsALB_NP(2-569)
augaagugggugaccuucaucagccugcucuuccuguucuccagcgccuacuccagcgccuccaaggaggugaaguccuuccuguggacccagagccuccgccgggagcugagcggcuacugcuccagcaucaagcugcaggucgugaaggacgcccaggcgcuccugcacgggcuggacuucuccgaggugagcaacguccagcgccucaugcggaagcagcgccgggacgacuccgaccugaagcgccugcgggaccucaaccaggccgugaacaaccugguggagcucaagagcacccagcagaaguccauccugcgcgucggcacgcugaccagcgacgaccugcucacccuggccgccgaccuggagaagcucaaguccaaggugauccggaccgagcgcccccugagcuccgggguguacaugggcaaccugagcacgcagcagcucgagcagcggcgcgcccugcugaacaugaucgggauggucggcggcgcgcaggggacccagccgggccgggacgggguggugcgcgucugggacgugaagaaccccgaccuccugaacaaccaguucggcaccaugcccucccugacccucgccugccugacgaagcagggccagguggaccugaacgacgccguccucgcccugaccgaccuggggcucaucuacaccgcgaaguaccccaacagcuccgaccuggaccggcugagccagagccacccgauccucaacaugguggacaccaagaaguccagccugaacaucuccggcuacaacuucagccugggggccgccgugaaggccggcgccugcaugcucgacgggggcaacaugcuggagacgaucaaggucacgccccagaccguggacggcauccugaaguccauccucaaggugaagcgcagccuggggauguucgucuccgacacccccggcgagcggaaccccuacgagaacauccuguacaagaucugccucagcggggacggcuggccguacaucgcgucccgcaccagcaucguggggcgggccugggagaacaccaccguggaccuggaguccgacggcaagccccagaaggucggcaccgccgggagcaacaagucccugcagagcgccggcuuccccacggggcucaccuacucccagcugaugacccugaaggacagcaugaugcagcuggaccccuccgccaagaccuggaucgacaucgagggccgcccggaggaccccguggagaucgcgcucuaccagcccaugagcgggugcuacauccacuucuuccgggagcccacggaccugaagcaguucaagcaggacgccaaguacucccacggcaucgacgucgccgaccuguucccggcccagcccggccucaccagcgccgugaucgaggcgcugccccgcaacauggugcugaccugccaggggagcgacgacaucaagcgccuccuggacucccagggccggcgcgacaucaagcugaucgacaucgcccucagcaaggccgacucccggaaguucgagaacgccgucugggaccagugcaaggaccugugccacaugcacaccggggugguggucgagaagaagaagcgcggcgggaaggaggagaucacgccccacugcgcccugauggacugcaucauguacgacgcggccgugagcggcggccucaacaucccggugcugcgggccguccugccccgcgacaugguguuccggaccuccagccccaaggugguccucuga

SEQ ID NO: 19380 - RNA, 1761 nt, Artificial Sequence
  derived and/or modified CDS sequence (opt1) from LASV(LASV237-NIG-2010;Clade II)__AIT17639__SP-HsALB_NP(2-569)
augaagugggugaccuucaucagccugcucuuccuguucuccagcgccuacuccagcgccuccaaggaggugaaguccuuccuguggacccagagccuccgccgggagcugagcggcuacugcuccaacaucaagcugcaggucgugaaggacgcccaggcgcuccugcacgggcuggacuucagcgagguguccaacguccagcgccucaugcggaagcagaagcgcgacgacagcgaccugaagcggcugcgcgaccucaaccaggccgugaacaaccugguggagcugaaguccacccagcagaaguccauccuccgggucggcacccugaccagcgacgaccugcucacccuggccgccgaccuggagaagcucaagagcaaggugauccgcaccgagcggccccuguccagcgggguguacaugggcaaccuguccacgcagcagcucgagcagcgccgggcccugcugaacaugaucgggauggucggcggcgcgcaggggacccagccgggccgcgacgggguggugcgggucugggacgugaagaaccccgaccuccugaacaaccaguucggcaccaugcccagccugacccucgccugccugacgaagcagggccagguggaccugaacgacgccguccucgcccugaccgaccuggggcucaucuacaccgcgaaguaccccaacuccagcgaccuggaccgccugucccagagccacccgauccucaacaugguggacaucaagaaguccagccugaacaucagcggcuacaacuucucccugggggccgccgugaaggccggcgccugcaugcucgacgggggcaacaugcuggagaccaucaaggucacgccccagaccauggacggcauccucaagagcauccugaaggugaagcggucccuggggauguucgugagcgacacccccggcgagcgcaaccccuacgagaacauccuguacaagaucugccucuccggggacggcuggccguacaucgcgagccggaccuccaucgucgggcgcgccugggagaacacgaccguggaccuggagagcgacggcaagccccagaaggugggcuccgccgggagcaacaagucccugcagagcgccggcuuccccaccgggcucaccuacucccagcugaugacgcugaaggacagcaugaugcagcuggaccccuccgccaagaccuggaucgacaucgagggccggccggaggaccccgucgagaucgcgcucuaccagcccaugagcgggugcuacauccacuucuuccgcgagcccaccgaccugaagcaguucaagcaggacgccaaguacucccacggcaucgacguggccgaccuguucccggcccagcccggccucaccagcgccgucaucgaggcgcugccccggaacauggugcugacgugccaggggagcgacgacaucaagcgccuccuggacucccagggccgccgggacaucaagcugaucgacaucgcccucagcaaggccgacucccgccgguucgagaacgccgugugggaccagugcaaggaccugugccacaugcacaccggggucgugguggagaagaagaagcgcggcgggaaggaggagaucacgccccacugcgcccugauggacugcaucauguacgacgcggccgucagcggcggccucaacaucccggugcugcgggccgugcugccccgcgacauggucuuccggaccuccagccccaagguggugcucuga

SEQ ID NO: 19381 - RNA, 1761 nt, Artificial Sequence
  derived and/or modified CDS sequence (opt1) from LASV(LASV253-NIG-2011;Clade II)__AIT17671__SP-HsALB_NP(2-569)
augaagugggugaccuucaucagccugcucuuccuguucuccagcgccuacuccagcgccuccaaggaggugaaguccuuccuguggacccagagccuccgccgggagcugagcggcuacugcuccagcaucaagcugcaggucgugaaggacgcccaggcgcuccugcacgggcuggacuucuccgaggugagcaacguccagcgccucaugcggaagcagaagcgcgacgacuccgaccugaagcggcugcgcgaccucaaccaggccgugaacaaccugguggagcucaagagcacccagcagaaguccguccugcgggugggcacccugaccagcgacgaccugcucacccuggccgccgaccuggagaagcucaaguccaaggugauccgcaccgagcggccccugagcuccggggucuacaugggcaaccugagcacgcagcagcucgagcagcgccgggcccugcugaacaugaucgggauggugggcggcgcgcaggggacccagccgggccgcgacggggugguccgggugugggacgugaagaaccccgaccuccugaacaaccaguucggcaccaugcccucccugacccucgccugccugacgaagcaggggcaggucgaccugaacgacguggugcucgcccugaccgaccugggccucaucuacaccgccaaguaccccaacagcuccgaccuggaccgccugagccagagccacccgauccucaacauggucgacaccaagaaguccagccugaacaucuccggcuacaacuucagccugggggcggccgugaaggccggcgccugcaugcucgacgggggcaacaugcuggagacgaucaaggugacgccccagaccauggacggcauccugaaguccauccucaaggucaagaagucccuggggauguucgugagcgacacccccggcgagcggaaccccuacgagaacauccuguacaagaucugccucagcggggacggcuggccguacaucgccucccgcaccagcaucguggggcgggcgugggagaacaccaccgucgaccuggaguccgacggcaagccccagaaggugggcaccgccgggagcaacaagucccugcagagcgccggcuuccccacggggcucaccuacucccagcugaugacccugaaggacagcaugaugcagcuggaccccuccgccaagaccuggaucgacaucgagggccgcccggaggaccccgucgagaucgcccucuaccagcccaugagcgggugcuacauccacuucuuccgggagcccacggaccugaagcaguucaagcaggacgcgaaguacucccacggcaucgacgugaccgaccuguucccggcccagcccggccucaccagcgccgugaucgaggcccugccccgcaacaugguccugaccugccaggggagcgacgacaucaagcggcuccuggacucccagggccgccgcgacaucaagcugaucgacaucgcccucagcaaggcggacucccggcgcuucgagaacgccgugugggaccagugcaaggaccugugccacaugcacacggggguggucguggagaagaagaagcggggcgggaaggaggagaucacgccccacugcgcccugauggacugcaucauguacgacgccgccgugagcggcggccucaacaucccgguccugcgcgcggugcugccccgggacaugguguuccgcaccuccagccccaaggucgugcucuga

SEQ ID NO: 19382 - RNA, 1761 nt, Artificial Sequence
  derived and/or modified CDS sequence (opt1) from LASV(LASV254-NIG-2011;Clade II)__AIT17675__SP-HsALB_NP(2-569)
augaagugggugaccuucaucagccugcucuuccuguucuccagcgccuacuccagcgccuccaaggaggugaaguccuuccuguggacccagagccuccgccgggagcugagcggcuacugcuccagcaucaagcugcaggucgugaaggacgcccaggcgcuccugcacgggcuggacuucuccgaggugagcaacguccagcgccucaugcggaagcagaagcgcgacgacuccgaccugaagcggcugcgcgaccucaaccaggccgugaacaaccugguggagcucaagagcacccagcagaaguccguccugcgggugggcacgcugaccagcgacgaccugcucacccuggccgccgaccuggagaagcucaaguccaaggugauccgcaccgagcggccccugagcuccggggucuacaugggcaaccugagcacgcagcagcucgagcagcgccgggcccugcugaacaugaucgggauggugggcggcgcgcaggggacccagccgggccgcgacggggugguccgggugugggacgugaagaaccccgaccuccugaacaaccaguucggcaccaugcccucccugacccucgccugccugacgaagcaggggcaggucgaccugaacgacgccgugcucgcccugaccgaccugggccucaucuacaccgcgaaguaccccaacagcuccgaccuggaccgccugagccagagccacccgauccucaacaugguggacaccaagaaguccagccugaacaucuccggcuacaacuucagccugggggccgccgucaaggccggcgccugcaugcucgacgggggcaacaugcuggagacgaucaaggugacgccccagaccauggacggcauccugaaguccauccucaaggugaagaagucccuggggauguucgucagcgacacccccggcgagcggaaccccuacgagaacauccuguacaagaucugccucagcggggacggcuggccguacaucgcgucccgcaccagcaucguggggcgggccugggagaacaccaucguggaccuggaguccgacggcaagccccagaaggucggcaccgccgggagcaacaagucccugcagagcgccggcuuccccaccgggcucacguacucccagcugaugacccugaaggacagcaugaugcagcuggaccccuccgccaagaccuggaucgacaucgagggccgcccggaggaccccguggagaucgcgcucuaccagcccaugagcgggugcuacauccacuucuuccgggagcccaccgaccugaagcaguucaagcaggacgccaaguacucccacggcaucgacgucgccgaccuguucccggcccagcccggccucacgagcgccgugaucgaggcgcugccccgcaacauggugcugaccugccaggggagcgacgacaucaagcggcuccuggacucccagggccgccgcgacaucaagcugaucgacaucgcccucagcaaggccgacucccggcgcuucgagaacgccgucugggaccagugcaaggaccugugccacaugcacaccggggugguggucgagaagaagaagcggggcgggaaggaggagaucacgccccacugcgcccugauggacugcaucauguacgacgcggccgugagcggcggccucaacaucccggugcugcgcgccguccugccccgggacaugguguuccgcaccuccagccccaaggugguccucuga

SEQ ID NO: 19383 - RNA, 1761 nt, Artificial Sequence
  derived and/or modified CDS sequence (opt1) from LASV(Nig08-04;Clade II)__ADU56611__SP-HsALB_NP(2-569)
augaagugggugaccuucaucagccugcucuuccuguucuccagcgccuacuccagcgccuccaaggaggugaaguccuuccuguggacccagagccuccgccgggagcugagcggcuacugcuccaacaucaagcugcaggucgugaaggacgcccaggcgcuccugcacgggcuggacuucagcgagguguccaacguccagcgccucaugcggaagcagaagcgcgacgacggcgaccugaagcggcugcgcgaccucaaccaggccgugaacaaccugguggagcucaagagcacccagcagaaguccguccugcggguggggacccugaccagcgacgaccugcucacccuggccgccgaccuggagaagcucaaguccaaggugauccgcaccgagcggccccugagcuccggcgucuacauggggaaccugagcacgcagcagcucgagcagcgcaaggcccugcuguccaugaucggcauggugggcggggcgcagggcacccagccggggcgggacggcgugguccgcgugugggacgugaagaaccccgaccuccugaacaaccaguucgggaccaugcccagccugacccucgccugccugacgaagcagggccaggucgaccugaacgacgccgugcucgcccugaccgaccugggccucaucuacaccgcgaaguaccccaacuccagcgaccuggaccggcugucccagagccacccgauccucaacaugguggacaccaagaaguccagccugaacaucagcggguacaacuucucccugggcgccgccgucaaggccggggccugcaugcucgacggcggcaacaugcuggagacgaucaaggugacgccccagaccauggacgggauccucaagagcauccugaaggugaagcgcucccugggcauguucgucagcgacacccccggggagcggaaccccuacgagaacauccuguacaagaucugccucuccggcgacggguggccguacaucgcgagccgcaccuccaucgugggccgggccugggagaacaccaccguggaccuggagagcgacggcaagccccagaaggucgggaccgccggcuccaacaagagccugcaguccgccggguuccccacgggccucaccuacagccagcugaugacccugaaggacuccaugaugcagcuggaccccagcgccaagaccuggaucgacaucgaggggcgcccggaggaccccguggagaucgcgcucuaccagcccauguccggcugcuacauccacuucuuccgggagcccacggaccugaagcaguucaagcaggacgccaaguacagccacggcaucgacgucaccgaccuguucuccgcccagccggggcucaccagcgccgugaucgaggcccugccccgcaacauggugcugaccugccagggcagcgacgacaucaagaagcuccuggacucccaggggcggcgcgacaucaagcugaucgacaucagccucaacaaggcggacucccgccgguucgagaacgccgucugggaccagugcaaggaccugugccacaugcacacgggcgugguggucgagaagaagaagcgcgggggcaaggaggagaucacgccccacugcgcccugauggacugcaucauguucgacgccgccgugagcggcgggcucaacauccccauccugcgggcggugcugccgcgcgacauggucuuccggaccuccagccccaagguggugcucuga

SEQ ID NO: 19384 - RNA, 1764 nt, Artificial Sequence
  derived and/or modified CDS sequence (opt1) from LASV(GA391;Clade III)__AAA46284__SP-HsALB_NP(2-570)
augaagugggugaccuucaucagccugcucuuccuguucuccagcgccuacuccagcgccuccaaggaggugcgcagcugccuguggacccagucccuccggcgcgagcugagcggcuacugcuccaacaucaagcugcaggucgugaaggacgcccaggcgcuccugcacgggcuggacuucagcgagguguccaacguccagcggcucaugcgcaagcagaagcgggacgacggcgaccugaagcgccugcgggaccucaaccaggccgugaacaaccugguggagcugaaguccacccagcagaaguccguccuccgcguggggacgcugagcuccgacgaccugcucauccuggccgccgaccuggagaagcucaagagcaaggugacccggaccgagcgcccccuguccagcggcgucuacauggggaaccuguccagccagcagcucgaccagcggcgcgcccugcugaacaugaucggcaugaccggcguguccgggggcgggaagggcgcgagcaacgggaucgugcgggucugggacgugaagaacgccgagcuccugaacaaccaguucggcacgaugccgucccugacccucgccugccugaccaagcagggccagguggaccugaacgacgccguccaggcgcucaccgaccuggggcugaucuacacggccaaguaccccaacagcagcgaccucgaccgccugucccagagccaccccauccugaacaugaucgacaccaagaaguccagccucaacaucuccggcuacaacuucagccugggggccgccgugaaggccggcgcgugcaugcuggacggcgggaacaugcucgagaccaucaaggugagcccccagaccauggacggcauccucaagagcauccugaaggucaagaagucccuggggauguucgugagcgacacgccgggcgagcggaaccccuacgagaacauccuguacaagaucugccuguccggggacggcuggagcuacaucgccucccgcaccagcaucgugggccgggccugggagaacaccgucguggaccucgagcaggacaacaagccccagaagaucgggaacggcggguccaacaagagccugcaguccgccggcuucgccgcggggcugaucuacagccagcucaugacccugaaggacuucaagugcuucaaccugauccccaacgccaagacguggauggacaucgagggccgcccggaggaccccguggagaucgcccuguaccagcccuccagcggcugcuacguccacuucuuccgggagcccaccgaccucaagcaguucaagcaggacgccaaguacagccacgggcgcgacgugaccgaccuguucgccgcgcagccgggccugaccuccgccgucaucgaggcccucccccggaacauggugaucacgugccaggggagcgaggacauccgcaagcugcuggagucccagggccgccgggacaucaagcucaucgacaucacccugagcaaggccgacucccgcaaguucgagaacgccgugugggaccaguucaaggaccugugccacaugcacaccggggucgugguggagaagaagaagcggggcggcaaggaggagaucacgccccacugcgcgcucauggacugcaucauguucgacgccgccgucagcgggggccuggacgccaaggugcugcgcgugguccucccccgggacaugguguuccgcaccuccaccccgaaggugguccuguga

SEQ ID NO: 19385 - RNA, 1761 nt, Artificial Sequence
  derived and/or modified CDS sequence (opt1) from LASV(Nig08-A19;Clade III)__ADU56619__SP-HsALB_NP(2-569)
augaagugggugaccuucaucagccugcucuuccuguucuccagcgccuacuccagcgccuccaaggaggugaaguccuuccuguggacccagucccuccgccgggagcugagcggcuacugcuccaacaucaagcugcaggucgugaaggacgcccaggcgcuccugcacgggcuggacuucagcgagguguccaacguccagcgccucaugcggaagcagaagcgcgacgacggcgaccugaagcggcugcgcgaccucaaccaggccgugaacaaccugguggagcucaagagcacccagcagaaguccguccugcggguggggacccugagcuccgacgaccugcucgugcuggccgccgaccuggagaagcucaagagcaaggucgugcgcaccgagcggccccuguccagcggcaucuacauggggaaccuguccagccagcagcucgaccagcgcaaggcccugcugaacaugaucggcaugaccggcgggaacggcgggcggaacaccacguccgacggcaucgugcgcgucugggacgugaagaacgcggagcuccugaacaaccaguucgggaccaugccgagccugacccucgccugccugaccaagcagggccagguggaccugaacgacgccguccaggcccucacggaccugggccugaucuacaccgcgaaguaccccaacuccagcgaccucgaccggcuggcccagagccaccccauccugaacaugaucgacaccaagaaguccagccucaacaucuccggguacaacuucagccugggcgccgccgugaaggccggggcgugcaugcuggacggcggcaacaugcucgagaccaucaaggugagcccccagacgauggacgggauccucaagagcauccugaaggucaagcgcucccugggcauguucaucagcgacaccccgggggagcggaaccccuacgagaacauccuguacaagaucugccuguccggcgacggguggcccuacaucgccagccgcaccuccaucgugggccgggccugggagaacaccguggucgaccucgagagcgacaacaagccccagaagacgggcaacgggggcuccaacaagagccugcaguccgccggguucgccgcgggccugaccuacagccagcucaugacccugaaggacuccaugcugcagcuggacccgaacgccaagaccuggauggacaucgaggggcgccccgaggaccccguggagaucgcccucuaccagcccagcuccggcugcuacauccacuucuuccgggagccgacggaccugaagcaguucaagcaggacgccaaguacagccacggcaucgacgugaccgaccuguucgccgcgcagcccgggcucaccagcgccgucaucgaggcccugccccgcaacauggugaucacgugccagggcuccgaggacauccggaagcugcucgagagccaggggcgccgcgacaucaagcugaucgacaucucccugagcaaggucgacucccggaaguucgagaacgccgugugggaccaguucaaggaccucugccacaugcacaccggcaucguggucgagaagaagaagcgcgggggcaaggaggagaucacgccccacugcgcccugauggacugcaucauguucgacgcggccgugagcggcgggguggacgccaagguccugcgggccgugcucccgcgcgacaugguguuccggaccuccacccccaaggucgugcuguga

SEQ ID NO: 19386 - RNA, 1761 nt, Artificial Sequence
  derived and/or modified CDS sequence (opt1) from LASV(G1180-SLE-2010;Clade IV)__AIT17169__SP-HsALB_NP(2-569)
augaagugggugaccuucaucagccugcucuuccuguucuccagcgccuacuccagcgccuccaaggagaucaagagcuuccuguggacccagucccuccgccgggagcugagcggcuacugcuccaacaucaagcuccagguggucaaggacgcccaggcgcugcugcacgggcuggacuucagcgagguguccaacgugcagcgccucaugcggaaggagcgccgggacgacaacgaccugaagcgccugcgggaccucaaccaggccgucaacaaccugguggagcucaagagcacccagcagaaguccauccugcgcgugggcacccugaccagcgacgaccugcucauccuggccgccgaccuggagaagcucaaguccaaggucauccggaccgagcgcccccugagcgccgggguguacaugggcaaccuguccagccagcagcucgaccagcggcgcgcgcugcuguccaugaucgggaugagcuccggcaaccagcgggcccaggccggccgcgacggggugguccgggugugggacgugaagaacgucgagcuccugaacaaccaguucggcaccaugccgagccugacgcucgccugccugaccaagcagggccagguggaccugaacgacgcggugcaggcccucaccgaccuggggcugaucuacaccgccaaguaccccaacacguccgaccucgaccgccugacccagagccaccccauccugaacaugaucgacaccaagaaguccagccucaacaucagcggguacaacuucucccugggcgccgccgucaaggcgggcgccugcaugcuggacgggggcaacaugcucgagaccaucaaggugagcccccagacgauggacgggauccugaaguccauccugaaggugaagaaggcccucggcauguucaucagcgacaccccgggcgagcggaaccccuacgagaacauccuguacaagaucugccuguccggggacggcuggcccuacaucgccagccgcaccuccaucaccgggcgggccugggagaacacggucguggaccucgagagcgacggcaagccccagaaggcgggguccaacaacagcaacaagucccugcagagcgugggcuucaccgccggccugaccuacucccagcucaugacccugaaggacgccaugcugcagcuggacccgaacgccaagacguggauggacaucgaggggcgccccgaggaccccgucgagaucgcccucuaccagcccagcuccggcugcuacauccacuucuuccgggagccgaccgaccugaagcaguucaagcaggacgcgaaguacagccacgggaucgacgugaccgaccuguucgccgcccagcccggccucaccuccgccgugaucgacgcccugccccgcaacauggucaucacgugccaggggagcgacgacauccgcaagcugcucgagagccagggccggaaggacaucaagcugaucgacaucgcgcuguccaagaccgacagccgcaaguacgagaacgccgugugggaccaguacaaggaccucugccacaugcacaccggcgucgugguggagaagaagaagcgcgggggcaaggaggagaucacgccccacugcgcccugauggacugcaucauguucgacgccgcggucuccgggggccugaacaccagcgugcuccgggccgugcugccgcgggacauggucuuccgcaccuccacgccccggguggugcuguga

SEQ ID NO: 19387 - RNA, 1761 nt, Artificial Sequence
  derived and/or modified CDS sequence (opt1) from LASV(G1442-SLE-2011;Clade IV)__AIT17181__SP-HsALB_NP(2-569)
augaagugggugaccuucaucagccugcucuuccuguucuccagcgccuacuccagcgccuccaaggaggugaaguccuuccuguggacccagagccuccgccgggagcugagcggcuacugcuccaacaucaagcugcaggucgugaaggacgcccaggcgcuccugcacgggcuggacuucagcgagguguccaacguccagcgccucaugcggaagcagcgccgggacgacaacgaccugaagcgccugcgggaccucaaccaggccgugaacaaccugguggagcucaagagcacccagcagaaguccguccugcgcgugggcacccugaccagcgacgaccugcucgugcuggccgccgaccuggagaagcucaaguccaaggucauccggaccgagcgcccccugagcgccgggguguacaugggcaaccuguccagccagcagcucgaccagcggcgcgcgcugcugaacaugaucgggauguccggcggcauccaggggacccggacgggccgcgacggggugguccgggugugggacgugaagaacgccgaccuccugaacaaccaguucggcaccaugccgagccugacccucgccugccugaccaagcaggggcaggucgaccugaacgacguggugcaggcccucacggaccugggccugaucuacaccgcgaaguaccccaacgccuccgaccucgaccgccugacccagagccaccccauccugaacaugaucgacaccaagaaguccagccucaacaucagcggcuacaacuucucccugggggccgccgucaaggccggcgcgugcaugcuggacgggggcaacaugcucgagacgaucaaggugagcccccagaccauggacggcauccugaaguccauccugaaggugaagaagacccucgggauguucaucagcgacaccccgggcgagcggaaccccuacgagaacauccuguacaagaucugccuguccggggacggcuggcccuacaucgccagccgcacguccaucaccgggcgggccugggagaacaccgucguggaccucgagagcgacggcaagccccagaaggccggcuccaacaacagcaacaagucccugcagagcgccggguucgcggccggccugaccuacucccagcucaugacgcugaaggacgccaugcugcagcuggacccgaacgccaagaccuggauggacaucgaggggcgccccgaggaccccguggagaucgcccucuaccagcccagcuccggcugcuacauccacuucuuccgggagccgaccgaccugaagcaguucaagcaggacgcgaaguacagccacgggaucgacgucaccgaccuguucgccgcccagcccggccucacguccgccgugaucgaggcccugccccgcaacauggucaucacgugccagggcagcgacgacaucaagaagcugcucgagucccaggggcgcaaggacaucaagcugaucgacaucgcgcugagcaagaccgacagccggaaguacgagaacgccgugugggaccaguacaaggaccucugccacaugcacaccggcguggucguggagaagaagaagcgcgggggcaaggaggagaucaccccgcacugcgcccugauggacugcaucauguucgacgccgcgguguccgggggccugaacacccucguccugcgggccgugcugccccgcgacaugguguuccggaccagcacgccccgcgucgugcucuga

SEQ ID NO: 19388 - RNA, 1761 nt, Artificial Sequence
  derived and/or modified CDS sequence (opt1) from LASV(G3010-SLE-2013;Clade IV)__AIT17345__SP-HsALB_NP(2-569)
augaagugggugaccuucaucagccugcucuuccuguucuccagcgccuacuccagcgccuccaaggagaucaagagcuuccuguggacccagucccuccgccgggagcugagcggcuacugcuccaacaucaagcuccagguggucaaggacgcccaggcgcugcugcacgggcuggacuucagcgagguguccaacgugcagcgccucaugcggaaggagcgccgggacgacaacgaccugaagcgccugcgggaccucaaccaggccgucaacaaccugguggagcucaagagcacccagcagaaguccauccugcgcgugggcacccugaccagcgacgaccugcucauccuggccgccgaccuggagaagcucaaguccaaggucacccggaccgagcgcccccugagcgccgggguguacaugggcaaccuguccagccagcagcucgaccagcggcgcgcgcugcuguccaugaucgggaugagcuccggcgugcagggcgcccgggccgggcgcgacggcgucgugcgggugugggacgucaagaacgccgagcuccugaacaaccaguucgggacgaugccgagccugacccucgcgugccugaccaagcagggccagguggaccugaacgacgugguccaggcccucaccgaccuggggcugaucuacacggccaaguaccccaacaccuccgaccucgaccgccugacccagagccaccccauccugaacaugaucgacaccaagaaguccagccucaacaucagcggcuacaacuucucccugggcgccgccgugaaggcgggggccugcaugcuggacggcgggaacaugcucgagacgaucaaggugagcccccagaccauggacggcauccugaaguccauccugaaggucaagaaggcccucggcauguucaucagcgagaccccgggggagcggaaccccuacgagaacauccuguacaagaucugccuguccggcgacggguggcccuacaucgccagccgcaccuccaucacgggccgggccugggagaacaccgugguggaccucgagagcgacgggaagccccagaaggcgggcuccaacaacagcaacaagucccugcagagcgccggcuucaccgccgggcugaccuacucccagcucaugacgcugaaggacgccaugcugcagcuggacccgaacgccaagaccuggauggacaucgagggccgccccgaggaccccgucgagguggcgcucuaccagcccagcuccgggugcuacauccacuucuuccgggagccgaccgaccugaagcaguucaagcaggacgccaaguacagccacggcaucgacgugaccgaccuguucgccgcccagcccgggcucacguccgccgucaucgacgcgcugccccgcaacauggugaucacgugccagggcagcgacgacaucaagaagcugcucgagagccagggccgcaaggacaucaagcugaucgacaucgcccuguccaagaccgacagccggaaguacgagaacgccgucugggaccaguacaaggaccucugccacaugcacaccggggugguggucgagaagaagaagcgcggcgggaaggaggagaucaccccgcacugcgcccugauggacugcaucauguucgacgcggccguguccggcgggcugaacaccagcgugcuccgggccguccugccccgcgacaugguguuccggaccuccacgccccgcgugguccuguga

SEQ ID NO: 19389 - RNA, 1761 nt, Artificial Sequence
  derived and/or modified CDS sequence (opt1) from LASV(G502-SLE-2009;Clade IV)__AIT17127__SP-HsALB_NP(2-569)
augaagugggugaccuucaucagccugcucuuccuguucuccagcgccuacuccagcgccuccaaggagaucaagagcuuccuguggacccagucccuccgccgggagcugagcggcuacugcuccaacaucaagcuccagguggucaaggacgcccaggcgcugcugcacgggcuggacuucagcgagguguccaacgugcagcgccucaugcggaaggagcgccgggacgacaacgaccugaagcgccugcgggaccucaaccaggccgucaacaaccugguggagcucaagagcacccagcagaaguccauccugcgcgugggcacccugaccagcgacgaccugcucauccuggccgccgaccuggagaagcucaaguccaaggucauccggaccgagcgcccccugagcgccgggguguacaugggcaaccuguccagccagcagcucgaccagcggcgcgcgcugcuguccaugaucgggaugagcggcggcaaccagggggugcgggccggcaaggacggggucgugcgcgugugggacgucaagaacgccgagcuccugaacaaccaguucggcaccaugccgucccugacgcucgccugccugaccaagcagggccagguggaccugaacgacgcggugcaggcccucaccgaccuggggcugaucuacaccgccaaguaccccaacacgagcgaccucgaccggcugacccagucccaccccauccugaacaugaucgacaccaagaaguccagccucaacaucuccggcuacaacuucagccugggggccgccgucaaggcgggcgccugcaugcuggacgggggcaacaugcucgagaccaucaaggugagcccccagacgauggacggcauccucaagagcauccugaaggugaagaaggcccuggggauguucaucuccgacaccccgggcgagcgcaaccccuacgagaacauccuguacaagaucugccugagcggggacggcuggcccuacaucgccucccggaccagcaucaccgggcgcgccugggagaacacggucguggaccucgaguccgacggcaagccccagaaggcgggcagcaacaacuccaacaagagccugcaguccgccggguucaccgccggccugaccuacagccagcucaugacccugaaggacgccaugcugcagcuggacccgaacacgaagaccuggauggacaucgaggggcggcccgaggaccccguggagaucgcccucuaccagcccuccagcggcugcuacauccacuucuuccgcgagccgaccgaccugaagcaguucaagcaggacgcgaaguacucccacgggaucgacgucaccgaccuguucgccgcccagcccggccucacgagcgccgugaucgacgcccugccccggaacauggugaucacgugccagggcuccgacgacauccgcaagcugcucgagagccaggggcgcaaggacaucaagcugaucgacaucgcgcugaacaagaccgacagccggaaguacgagaacgccgucugggaccaguacaaggaccucugccacaugcacaccggcguggucguggagaagaagaagcgcgggggcaaggaggagaucaccccgcacugcgcccugauggacugcaucauguucgacgccgcgguguccgggggccugaacaccagcguccuccgggccgugcugccccgcgacaugguguuccggaccuccacgccccgcgucgugcuguga

SEQ ID NO: 19390 - RNA, 1761 nt, Artificial Sequence
  derived and/or modified CDS sequence (opt1) from LASV(G733-SLE-2010;Clade IV)__AIT17155__SP-HsALB_NP(2-569)
augaagugggugaccuucaucagccugcucuuccuguucuccagcgccuacuccagcgccuccaaggagaucaagagcuuccuguggacccagucccuccgccgggagcugagcggcuacugcuccaacaucaagcuccagguggucaaggacgcccaggcgcugcugcacgggcuggacuucagcgagguguccaacgugcagcgccucaugcggaaggagcgccgggacgacaacgaccugaagcgccugcgggaccucaaccaggccgucaacaaccugguggagcucaagagcacccagcagaaguccgugcugcgcgucggcacccugaccagcgacgagcugcucgugcuggccgccgaccuggagaagcucaaguccaaggugauccggaccgagcgcccccugagcgccggggucuacaugggcaaccuguccagccagcagcucgaccagcggcgcgcgcugcuguccaugaucgggaugagcggcggcaaccagggggcccggaccggccgcgacgggguggugcgggucugggacgugaagaacgccgagcuccugaacaaccaguucggcaccaugccgucccugacccucgccugccugaccaagcagggccagguggaccugaacgacgcgguccaggcccucaccgaccuggggcugaucuacacggccaaguaccccaacaccagcgaccucgaccgccugacccagucccaccccauccugaacaugaucgacaccaagaaguccagccucaacaucuccggcuacaacuucagccugggggccgccgugaaggcgggcgccugcaugcuggacgggggcaacaugcucgagacgaucaaggugagcccccagaccauggacggcauccucaagagcauccugaaggucaagaaggcccuggggauguucaucuccgacaccccgggcgagcggaaccccuacgagaacauccuguacaagaucugccugagcggggacggcuggcccuacaucgccucccgcaccagcaucacggggcgggccugggagaacaccgugguggaccucgaguccgacggcaagccccagaaggcgggcagcaacaacuccaacaagagccugcaguccgccggguucaccgccggccugaccuacagccagcucaugacgcugaaggacgccaugcugcagcuggacccgaacgccaagaccuggauggacaucgaggggcgccccgaggaccccgucgagaucgcgcucuaccagcccuccagcggcugcuacauccacuucuuccgggagccgaccgaccugaagcaguucaagcaggacgccaaguacucccacgggaucgacgugaccgaccuguucgccgcccagcccggccucacgagcgccgugaucgacgcgcugccccgcaacauggucaucacgugccagggcuccgacgacauccgcaagcugcucgagagccaggggcggaaggacaucaagcugaucgacaucgcccugagcaagaucgacucccgcaaguacgagaacgccgugugggaccaguacaaggaccucugccacaugcacaccggcgucgugguggagaagaagaagcgcgggggcaaggaggagaucacgccccacugcgcccugauggacugcaucauguucgacgcggccgucagcgggggccugaacucccucgugcugcgggccgugcugccgcgggacauggucuuccgcaccagcacgccccggguggugcucuga

SEQ ID NO: 19391 - RNA, 1761 nt, Artificial Sequence
  derived and/or modified CDS sequence (opt1) from MOPV/LASV reassortant(IGS-1;Clade IV)__AFY05578__SP-HsALB_NP(2-569)
augaagugggugaccuucaucagccugcucuuccuguucuccagcgccuacuccagcgccuccaaggagaucaagagcuuccuguggacccagucccuccgccgggagcugagcggcuacugcuccaacaucaagcuccagguggucaaggacgcccaggcgcugcugcacgggcuggacuucagcgagguguccaacgugcagcgccucaugcggaaggagcgccgggacgacaacgaccugaagcgccugcgggaccucaaccaggccgucaacaaccugguggagcucaagagcacccagcagaaguccauccugcgcgugggcacccugaccagcgacgaccugcucauccuggccgccgaccuggagaagcuccgguccaaggucauccgcaccgagcggccccugagcgccgggguguacaugggcaaccuguccagccagcagcucgaccagcgccgggcgcugcugaacaugaucgggauguccggcggcaaccagggggcccgcgccggccgggacggggugguccgcgugugggacgugaagaacgccgagcuccugagcaaccaguucggcaccaugccgucccugacgcucgcgugccugaccaagcaggggcaggucgaccugaacgacgccgugcaggcccucaccgaccugggccugaucuacaccgccaaguaccccaacacgagcgaccucgaccggcugacccagucccaccccauccugaacaugaucgacaccaagaaguccagccucaacaucuccggcuacaacuucagccugggggccgcggugaaggccggcgccugcaugcuggacgggggcaacaugcucgagaccaucaaggucagcccccagacgauggacggcauccucaagagcauccugaaggugaagaaggcccuggggauguucaucuccgacaccccgggcgagcgcaaccccuacgagaacauccuguacaagaucugccugagcggggacggcuggcccuacaucgccucccggaccagcaucaccgggcgcgcgugggagaacacgguggucgaccucgaguccgacggcaagccccagaaggccgacagcaacaacuccagcaagucccugcagagcgccggcuucaccgccgggcugaccuacucccagcucaugacccugaaggacgccaugcugcagcuggacccgaacgcgaagacguggauggacaucgagggccggcccgaggaccccguggagaucgcccucuaccagcccagcuccgggugcuacauccacuucuuccgcgagccgaccgaccugaagcaguucaagcaggacgccaaguacagccacggcaucgacgugaccgaccuguucgccacccagcccgggcucacguccgccgucaucgacgcgcugccccgcaacauggugaucacgugccagggcagcgacgacauccggaagcugcucgagagccagggccgcaaggacaucaagcugaucgacaucgaccuguccaagaccgacagccggaaguacgagaacgccgugugggaccaguacaaggaccucugccacaugcacaccggggucguggucgagaagaagaagcgcggcgggaaggaggagaucaccccgcacugcgcccugauggacugcaucauguucgacgccgcgguguccggcgggcugaacaccagcgugcuccgggccguccugccccgcgacaugguguuccggaccuccacgccccgcgugguccuguga

SEQ ID NO: 19392 - RNA, 1761 nt, Artificial Sequence
  derived and/or modified CDS sequence (opt1) from LASV(LM765-SLE-2012;Clade IV)__AIT17815__SP-HsALB_NP(2-569)
augaagugggugaccuucaucagccugcucuuccuguucuccagcgccuacuccagcgccuccaaggagaucaagagcuuccuguggacccagucccuccgccgggagcugagcggcuacugcuccaacaucaagcuccagguggucaaggacgcccaggcgcugcugcacgggcuggacuucagcgagguguccaacgugcagcgccucaugcggaaggagcgccgggacgacaacgaccugaagcgccugcgggaccucaaccaggccgucaacaaccugguggagcucaagagcacccagcagaaguccauccugcgcgugggcacccugaccagcgacgaccugcucauccuggccgccgaccuggagaagcucaaguccaaggucacccggaccgagcgcccccugagcgccgggguguacaugggcaaccuguccagccagcagcucgaccagcggcgcgcgcugcuggacaugaucgggauguccggcagcaaccagggcgcccgggccgggcgcgacggcgugguccgggugugggacgugaagaacgccgagcuccugaacaaccaguucgggacgaugccgucccugacccucgcgugccugaccaagcagggccaggucgaccugaacgacgccgugcaggcccucaccgaccuggggcugaucuacacggccaaguaccccaacaccagcgaccucgaccgccugacccagucccaccccauccugaacaugaucgacaccaagaaguccagccucaacaucuccggcuacaacuucagccugggcgccgcggugaaggccggggccugcaugcuggacggcgggaacaugcucgagacgaucaaggucagcccccagaccauggacggcauccucaagagcauccugaaggugaagaaggcccugggcauguucaucuccgacgccccgggggagcggaaccccuacgagaacauccuguacaagaucugccugagcggcgacggguggcccuacaucgcgucccgcaccagcaucaccggccgggccugggagaacacgguggucgaccucgaguccgacgggaagccccagaaggccggcagcaacggcuccaacaagagccugcaguccgccggguucaccgccggccugaccuacagccagcucaugacccugaaggacgcgaugcugcagcuggacccgaacgccaagacguggauggacaucgaggggcgccccgaggaccccguggagaucgcccucuaccagcccuccagcggcugcuacauccacuucuuccgggagccgaccgaccugaagcaguucaagcaggacgccaaguacucccacgggaucgacgugaccgaccuguucgccgcgcagcccggccucaccagcgccgucaucgacgcccugccccgcaacauggugaucacgugccagggcuccgacgacauccgcaagcuguucgagagccaggggcggaaggacaucaagcucaucgacaucgcccugagcaagaccgacucccgcaaguacgagaacgcggugugggaccaguacaaggaccugugccacaugcacaccggcaucgucguggagaagaagaagcgcgggggcaaggaggagaucacgccccacugcgcccucauggacugcaucauguucgacgccgccgucagcgggggccugaacaccuccgugcugcgggccgugcucccgcgggacauggucuuccgcaccagcacgccccggguggugcuguga

SEQ ID NO: 19393 - RNA, 1761 nt, Artificial Sequence
  derived and/or modified CDS sequence (opt1) from LASV(LM776-SLE-2012;Clade IV)__AIT17825__SP-HsALB_NP(2-569)
augaagugggugaccuucaucagccugcucuuccuguucuccagcgccuacuccagcgccuccaaggagaucaagagcuuccuguggacccagucccuccgccgggagcugagcuccuacugcagcaacaucaagcuccagguggucaaggacgcccaggcgcugcugcacggccuggacuucuccgaggugagcaacgugcagcgccucaugcggaaggagcgccgggacgacaacgaccugaagcgccugcgggaccucaaccaggccgucaacaaccugguggagcugaaguccacccagcagaaguccauccuccgcguggggacccugaccuccgacgaccugcucauccuggccgccgaccuggagaagcucaagagcaaggucacccggaccgagcgcccccuguccgccggcguguacauggggaaccugagcucccagcagcucgaccagcggcgcgcgcugcugagcaugaucggcauguccgggagcaaccagggcgcccgggccggccgcgacggggugguccgggugugggacgugaagaacgccgagcuccugaacaaccaguucggcacgaugccgucccugacccucgcgugccugaccaagcaggggcaggucgaccugaacgacgccgugcaggcccucaccgaccugggccugaucuacacggccaaguaccccaacaccagcgaccucgaccgccugacccagagccaccccauccugaacaugaucgacaccaagaaguccagccucaacaucuccggguacaacuucagccugggcgccgcggugaaggccggcgccugcaugcuggacgggggcaacaugcucgagacgaucaaggucagcccccagaccauggacgggauccucaagagcauccugaaggugaagaaggcccugggcauguucaucuccgacaccccgggcgagcggaaccccuacgagaacauccuguacaagaucugccugagcggggacggcuggcccuacaucgccucccgcaccagcaucacggggcgggcgugggagaacaccguggucgaccucgaguccgacggcaagccccagaaggccgggagcaacaacuccaacaagagccugcaguccgccggcuucaccgccggccugaccuacagccagcucaugacgcugaaggacgccaugcugcagcuggacccgaacgcgaagaccuggauggacaucgaggggcgccccgaggaccccguggagguggcccucuaccagcccuccagcggcugcuacauccacuucuuccgggagccgaccgaccugaagcaguucaagcaggacgccaaguacucccacgggaucgacgucaccgaccuguucgccgcccagcccggccucacgagcgcggugaucgacgcccugccccgcaacauggugaucacgugccaggggagcgacgacauccgcaagcugcucgagucccagggccggaaggacaucaagcugaucgacaucgcccugagcaagaccgacucccgcaaguacgagaacgccgucugggaccaguacaaggaccucugccacaugcacaccggcguggucguggagaagaagaagcgcgggggcaaggaggagaucaccccgcacugcgcgcugauggacugcaucauguucgacgccgccgugagcgggggccugaacaccuccguccuccgggccgugcugccccgggacaugguguuccgcaccagcacgccccgggucgugcuguga

SEQ ID NO: 19394 - RNA, 1761 nt, Artificial Sequence
  derived and/or modified CDS sequence (opt1) from LASV(Mad39;Clade IV)__ANH09723__SP-HsALB_NP(2-569)
augaagugggugaccuucaucagccugcucuuccuguucuccagcgccuacuccagcgccuccaaggagaucaagagcuuccuguggacccagucccuccgccgggagcugagcggcuacugcuccaacaucaagcuccagguggucaaggacgcccaggcgcugcugcacgggcuggacuucagcgagguguccaacgugcagcgccucaugcggaagcagcgccgggacgacaacgaccugaagcgccugcgggaccucaaccaggccgucaacaaccugguggagcugaaguccacccagcagaaguccgugcuccgcgucggcacgcugaccagcgacgaccugcucacccuggccgccgaccuggagaagcucaaguccaaggugacccggacggagcgcccccugaccgccgggguguacaugggcaaccugagcucccagcagcucgaccagcggcgcgcgcugcugaacaugaucgggaugagcggcggcaaccagggggcccggaccggccgcgacggggucgugcgggugugggacgucaagaacgccgagcuccugaacaaccaguucggcaccaugccgucccugacgcucgccugccugaccaagcagggccagguggaccugaacgacgugguccaggcgcucaccgaccuggggcugaucuacaccgccaaguaccccaacacgagcgaccucgaccgccugacccagucccaccccauccugaacaugaucgacaccaacaagagcucccucaacaucagcggcuacaacuucagccugggggccgccgugaaggccggcgcgugcaugcuggacgggggcaacaugcucgagaccaucaaggugagcccccagacgauggacggcauccucaagagcauccugaaggucaagaagucccuggggauguucaucagcgacaccccgggcgagcggaaccccuacgagaacauccuguacaagaucugccuguccggggacggcuggcccuacaucgccagccgcaccuccaucaccgggcgggccugggagaacacggugguggaccucgagagcggcggcaagccccagaaggccggguccaacaacagcaacaagucccugcagagcgccggcuucgcggccgggcugaccuacucccagcucaugacccugaaggacgccaugcugcagcuggacccgaacgccaagaccuggauggacaucgagggccgccccgaggaccccgucgagaucgcccucuaccagcccaucagcgggugcuacauccacuucuuccgggagccgacggaccugaagcaguucaagcaggacgcgaaguacucccacggcaucgacgugaccgaccuguucgccgcccagcccggccucaccagcgccgugaucgaggcccugccccgcaacauggucaucacgugccagggguccgacgacauccgcaagcuguucgagagccagggccggaaggacaucaagcucaucgacaucgcgcuguccaagaccgacagccgcaaguacgagaacgccgugugggaccaguacaaggaccugugccacaugcacaccggggucgugguggagaagaagaagaagggcgggaaggaggagaucacgccccacugcgcccucauggacugcaucauguucgacgccgcggucagcggcggccugaacacccuggugcuccgggccgugcugccgcgcgacauggucuuccggaccuccacccccaagguggugcuguga

SEQ ID NO: 19395 - RNA, 1761 nt, Artificial Sequence
  derived and/or modified CDS sequence (opt1) from LASV(Z0947-SLE-2011;Clade IV)__AIT17841__SP-HsALB_NP(2-569)
augaagugggugaccuucaucagccugcucuuccuguucuccagcgccuacuccagcgccuccaaggagaucaagagcuuccuguggacccagucccuccgccgggagcugagcggcuacugcuccaacaucaagcuccagguggucaaggacgcccaggcgcugcugcacgggcuggacuucagcgagguguccaacgugcagcgccucaugcggaaggagcgccgggacgacaacgaccugaagcgccugcgggaccucaaccaggccgucaacaaccugguggagcucaagagcacccagcagaaguccauccugcgcgugggcacccugaccagcgacgaccugcucauccuggccgccgaccuggagaagcucaaguccaaggucacccggaccgagcgcccccugagcgccgggguguacaugggcaaccuguccagccagcagcucgaccagcggcgcgcgcugcugaacaugaucgggauguccggcagcaaccagggcgcccggacggggcgcgacggcgugguccgggugugggacgugaagaacgccgagcuccugaacaaccaguucgggaccaugccgucccugacccucgccugccugaccaagcagggccaggucgaccugaacgacgcggugcaggcccucacggaccuggggcugaucuacaccgccaaguaccccaacaccagcgaccucgaccgccugacccagucccaccccauccugaacaugaucgacacgaagaaguccagccucaacaucuccggcuacaacuucagccugggcgccgccgugaaggcgggggccugcaugcuggacggcgggaacaugcucgagaccaucaaggucagcccccagaccauggacggcauccucaagagcauccugaaggugaagaaggcccugggcauguucaucuccgacgccccgggggagcggaaccccuacgagaacauccuguacaagaucugccugagcggcgacggguggcccuacaucgccucccgcaccagcaucacgggccgggcgugggagaacaccguggucgaccucgaguccgacgggaagccccagaaggccggcagcaacggcuccaacaagagccugcaguccgccggguucaccgccggccugaccuacagccagcucaugacgcugaaggacgccaugcugcagcuggacccgaacgcgaagaccuggauggacaucgaggggcgccccgaggaccccguggagaucgcccucuaccagcccuccagcggcugcuacauccacuucuuccgggagccgaccgaccugaagcaguucaagcaggacgccaaguacucccacgggaucgacgugaccgaccuguucgccgcccagcccggccucacgagcgcggucaucgacgcccugccccgcaacauggugaucacgugccagggcuccgacgacauccgcaagcuguucgagagccaggggcggaaggacaucaagcucaucgacaucgcccugagcaagaccgacucccgcaaguacgagaacgccgugugggaccaguacaaggaccugugccacaugcacaccggcaucgucguggagaagaagaagcgcgggggcaaggaggagaucaccccgcacugcgcgcucauggacugcaucauguucgacgccgccgucagcgggggccugaacaccuccgugcugcgggccgugcucccccgggacauggucuuccgcaccagcacgccccggguggugcuguga

SEQ ID NO: 19396 - RNA, 1761 nt, Artificial Sequence
  derived and/or modified CDS sequence (opt4) from LASV(Josiah;Clade IV)__NP_694869__SP-HsALB_NP(2-569)
augaagugggugaccuucaucagccugcuguuccuguucagcagcgccuacagcagcgccagcaaggagaucaagagcuuccuguggacccagagccugagaagagagcugagcggcuacugcagcaacaucaagcugcagguggugaaggacgcccaggcccugcugcacggccuggacuucagcgaggugagcaacgugcagagacugaugagaaaggagagaagagacgacaacgaccugaagagacugagagaccugaaccaggccgugaacaaccugguggagcugaagagcacccagcagaagagcauccugagagugggcacccugaccagcgacgaccugcugauccuggccgccgaccuggagaagcugaagagcaaggugaucagaaccgagagaccccugagcgccggcguguacaugggcaaccugagcagccagcagcuggaccagagaagagcccugcugaacaugaucggcaugagcggcggcaaccagggcgccagagccggcagagacggcguggugagagugugggacgugaagaacgccgagcugcugaacaaccaguucggcaccaugcccagccugacccuggccugccugaccaagcagggccagguggaccugaacgacgccgugcaggcccugaccgaccugggccugaucuacaccgccaaguaccccaacaccagcgaccuggacagacugacccagagccaccccauccugaacaugaucgacaccaagaagagcagccugaacaucagcggcuacaacuucagccugggcgccgccgugaaggccggcgccugcaugcuggacggcggcaacaugcuggagaccaucaaggugagcccccagaccauggacggcauccugaagagcauccugaaggugaagaaggcccugggcauguucaucagcgacacccccggcgagagaaaccccuacgagaacauccuguacaagaucugccugagcggcgacggcuggcccuacaucgccagcagaaccagcaucaccggcagagccugggagaacaccgugguggaccuggagagcgacggcaagccccagaaggccgacagcaacaacagcagcaagagccugcagagcgccggcuucaccgccggccugaccuacagccagcugaugacccugaaggacgccaugcugcagcuggaccccaacgccaagaccuggauggacaucgagggcagacccgaggaccccguggagaucgcccuguaccagcccagcagcggcugcuacauccacuucuucagagagcccaccgaccugaagcaguucaagcaggacgccaaguacagccacggcaucgacgugaccgaccuguucgccacccagcccggccugaccagcgccgugaucgacgcccugcccagaaacauggugaucaccugccagggcagcgacgacaucagaaagcugcuggagagccagggcagaaaggacaucaagcugaucgacaucgcccugagcaagaccgacagcagaaaguacgagaacgccgugugggaccaguacaaggaccugugccacaugcacaccggcguggugguggagaagaagaagagaggcggcaaggaggagaucaccccccacugcgcccugauggacugcaucauguucgacgccgccgugagcggcggccugaacaccagcgugcugagagccgugcugcccagagacaugguguucagaaccagcacccccagaguggugcuguga

SEQ ID NO: 19397 - RNA, 1761 nt, Artificial Sequence
  derived and/or modified CDS sequence (opt4) from LASV(LP;Clade I)__AAF86702__SP-HsALB_NP(2-569)
augaagugggugaccuucaucagccugcuguuccuguucagcagcgccuacagcagcaacagcaaggagaucaagagcuuccuguggacccagagccugagaagagagcugagcggcuacugcagcaacaucaagcugcagguggugaaggacgcccaggcccugcugcacggccuggacuucagcgaggugagcaacgugcagagacugaugagaaagcagaagagagacgacgccgaccugaagagacugagagaccugaaccaggccgugaacaaccugguggagcugaagagcacccagcagaagaacgugcugagagugggcacccugagcagcgacgaccugaucacccuggccgccgaccuggagaagcugaagagcaaggugaucagaaccgagagaccccugagcagcggcguguacaugggcaaccugagcagccagcagcuggaccagagaagagcccugcugagcaugaucggcaugagcggcggcccccagggcaacagaaccggcggcgacggcguggugagagugugggacgugaagaacgccgagcugcugaacaaccaguucggcaccaugcccagccugacccuggccugccugaccaagcagggccagguggaccugaacgacgccgugcaggcccugaccgaccugggccugaucuacaccgccaaguaccccaacagcagcgaccuggacaugcugacccagagccaccccauccugggcaugguggacaccaagaagagcagccugaacaucagcggcuacaacuucagccugggcgccgccgugaaggccggcgccugcaugcuggacggcggcaacaugcuggagaccaucaaggugagcccccagaccauggacggcauccugaagagcauccugaaggugaagagaagccugggcauguucaucagcgacacccccggcgagagaaaccccuacgagaacauccuguacaagaucugccugagcggcgagggcuggcccuacaucgccagcagaaccagcaucaccggcagagccugggagaacacccugguggaccuggagagcgacaacaagccccccaagcugaacagcgccggcagcaacaagagccugcaggccgccggccugaacgccggccugaccuacagccagcugaugacccugaaggacugcaugcugcagcuggaccccagcagcaagaccuggaucgacaucgagggcagacccgaggaccccguggagaucgcccuguuccagcccagcagcggcugcuacauccacuucuucagagagcccaccgaccugaagcaguucaagcaggacgccaaguacagccacggcaucgacgugaccgaccuguucagcacccagcccggccugaccagcgccgugaucgaggcccugcccagaaacauggugcugaccugccagggcagcgacgacaucaagaagcugcuggagagccagggcagaagagacaucaagcugaucgacaucagccugagcaaggccgacagcagaaaguucgagaacgccgugugggaccaguacaaggaccugugccacaugcacaccggcguggugguggagaagaagaagagaggcggcaaggaggagaucaccccccacugcgcccugcuggacugcaucauguucgacgccgccaccaccggcagccugaacaucaccacccugagagccgugcugcccagagacaugguguucagaaccagcacccccaagguggugcuguga

SEQ ID NO: 19398 - RNA, 1761 nt, Artificial Sequence
  derived and/or modified CDS sequence (opt4) from LASV(803213;Clade II)__AAF86704__SP-HsALB_NP(2-569)
augaagugggugaccuucaucagccugcuguuccuguucagcagcgccuacagcagcgccagcaaggaggugaagagcuuccuguggacccagagccugagaagagagcugagcggcuacugcagcaacaucaagcugcagguggugaaggacgcccaggcccugcugcacggccuggacuucagcgaggugaacaacgugcagagacugaugagaaagcagaagagagacgacggcgaccugaagagacugagagaccugaaccaggccgugaacaaccugguggagcugaagagcacccagcagaagagcauccugagagugggcacccugaccagcgacgaccugcugacccuggccgccgaccuggagaagcugaagagcaaggugaucagaaccgagagaccccugagcagcggcguguacaugggcaaccugagcacccagcagcuggagcagagaagagcccugcugaacaugaucggcauggugggcggcgcccagggcacccagcccggcagagacggcguggugagagugugggacgugaagaaccccgaccugcugaacaaccaguucggcaccaugcccagccugacccuggccugccugaccaagcagggccagguggaccugaacgacgccgugcuggcccugaccgaccugggccugaucuacaccgccaaguaccccaacagcagcgaccuggacagacugagccagagccaccccauccugaacaugguggacaccaagaagagcagccugaacaucagcggcuacaacuucagccugggcgccgccgugaaggccggcgccugcaugcuggacggcggcaacaugcuggagaccaucaaggugaccccccagaccauggacggcauccugaagagcauccugaaggugaagagaagccugggcauguucgugagcgacacccccggcgagagaaaccccuacgagaacauccuguacaagaucugccugagcggcgacggcuggcccuacaucgccagcagaaccagcaucgugggcagagccugggagaacaccaccguggaccuggagagcgacggcaagccccagaaggugggcaccgccggcagcaacaagagccugcagagcgccggcuuccccaccggccugaccuacagccagcugaugacccugaaggacagcaugaugcagcuggaccccagcgccaagaccuggaucgacaucgagggcagacccgaggaccccguggagaucgcccuguaccagcccaugagcggcugcuacauccacuucuucagagagcccaccgaccugaagcaguucaagcaggacgccaaguacagccacggcaucgacguggccgaccuguuccccgcccagcccggccugaccagcgccgugaucgaggcccugcccagaaacauggugcugaccugccagggcagcgacgacaucaagaagcugcuggacagccagggcagaagagacaucaagcugaucgacaucagccugagcaagguggacagcagaaaguucgagaacgccgugugggaccagugcaaggaccugugccacaugcacaccggcguggugguggagaagaagaagagaggcggcaaggaggagaucaccccccacugcgcccugauggacugcaucauguucgacgccgccgugagcggcggccugaacauccccgugcugagagccgugcugcccagagacaugguguucagaaccagcagccccaagguggugcuguga

SEQ ID NO: 19399 - RNA, 1764 nt, Artificial Sequence
  derived and/or modified CDS sequence (opt4) from LASV(GA391;Clade III)__CAA36646__SP-HsALB_NP(2-570)
augaagugggugaccuucaucagccugcuguuccuguucagcagcgccuacagcagcgccagcaaggaggugagaagcuuccuguggacccagagccugagaagagagcugagcggcuacugcagcaacaucaagcugcagguggugaaggacgcccaggcccugcugcacggccuggacuucagcgaggugagcaacgugcagagacugaugagaaagcagaagagagacgacggcgaccugaagagacugagagaccugaaccaggccgugaacaaccugguggagcugaagagcacccagcagaagagcgugcugagagugggcacccugagcagcgacgaccugcugauccuggccgccgaccuggagaagcugaagagcaaggugaccagaaccgagagaccccugagcagcggcguguacaugggcaaccugagcagccagcagcuggaccagagaagagcccugcugaacaugaucggcaugaccggcgugagcggcggcggcaagggcgccagcgacggcaucgugagagugugggacgugaagaacgccgagcugcugaacaaccaguucggcaccaugcccagccugacccuggccugccugaccaagcagggccagguggaccugaacgacgccgugcaggcccugaccgaccugggccugaucuacaccgccaaguaccccaacagcagcgaccuggacagacugagccagagccaccccauccugaacaugaucgacaccaagaagagcagccugaacaucagcggcuacaacuucagccugggcgccgccgugaaggccggcgccugcaugcuggacggcggcaacaugcuggagaccaucaaggugagcccccagaccauggacggcauccugaagagcauccugaaggugaagaagagccugggcauguucgugagcgacacccccggcgagagaaaccccuacgagaacauccuguacaagaucugccugagcggcgacggcuggcccuacaucgccagcagaaccagcaucgugggcagagccugggagaacaccgugguggaccuggagcaggacaacaagccccagaagaucggcaacggcggcagcaacaagagccugcagagcgccggcuucgccgccggccugaccuacagccagcugaugacccugaaggacuucaagugcuucaaccugauccccaacgccaagaccuggauggacaucgagggcagacccgaggaccccguggagaucgcccuguaccagcccagcagcggcugcuacgugcacuucuucagagagcccaccgaccugaagcaguucaagcaggacgccaaguacagccacggcaucgacgugaccgaccuguucgccgcccagcccggccugaccagcgccgugaucgaggcccugcccagaaacauggugaucaccugccagggcagcgaggacaucagaaagcugcuggagagccagggcagaagagacaucaagcugaucgacaucacccugagcaaggccgacagcagaaaguucgagaacgccgugugggaccaguucaaggaccugugccacaugcacaccggcguggugguggagaagaagaagagaggcggcaaggaggagaucaccccccacugcgcccugauggacugcaucauguucgacgccgccgugagcggcggccuggacgccaaggugcugagaguggugcugcccagagacaugguguucagaaccagcacccccaagguggugcuguga

SEQ ID NO: 19400 - RNA, 1761 nt, Artificial Sequence
  derived and/or modified CDS sequence (opt4) from LASV(AV;Clade V)__CCA30315__SP-HsALB_NP(2-569)
augaagugggugaccuucaucagccugcuguuccuguucagcagcgccuacagcagcgccagcaaggaggugaagagcuuccuguggacccagagccugagaagagagcugagcggcuacugcagcaacaucaagcugcagguggugaaggacgcccaggcccugcugcacggccuggacuucagcgaggugagcaacgugcagagacugaugagaaagcagagaagagacgacagcgaccugaagagacugagagaccugaaccaggccgugaacaaccugguggagcugaagagcacccagcagaagagcgugcugagagugggcacccugagcagcgacgaccugcugacccuggccgccgaccuggagaagcugaagagcaaggugaccagaaccgagagaccccugagcagcggcguguacaugggcaaccugagcagccagcagcuggaccagagaagagcccugcugaaccugaucggcaugaccaacggcagccagggcagccaggccggcagagacggcguggugagagugugggacgugaagaacgccgagcugcugaacaaccaguucggcaccaugcccagccugacccuggccugccugaccaagcagggccagguggaccugaacgacguggugcaggcccugaccgaccugggccugaucuacaccgccaaguaccccaacaccagcgaccuggacagacugacccagagccaccccauccugaacaugaucgacaccaagaagagcagccugaacaucagcggcuacaacuucagccugggcgccgccgugaaggccggcgccugcaugcuggacggcggcaacaugcuggagaccaucaaggugagcccccagagcauggacggcauccugaagagcauccugaaggugaagagagcccugggcauguucgugagcgacacccccggcgagagaaaccccuacgagaacauccuguacaagaucugccugagcggcgacggcuggcccuacaucgccagcagaaccagcaucgugggcagagccugggagaacaccgugguggaccuggagaccgacggcaagccccagaagaucggcagcggcaacagcaacaagagccugcagagcgccggcuucagcgccggccugaccuacagccagcugaugacccugaaggacgccaugcugcagcuggaccccaacgccaagaccuggauggacaucgagggcagacccgaggaccccguggagguggcccuguaccagcccaucagcggcugcuacauccacuucuucagagagcccaccgaccugaagcaguucaagcaggacgccaaguacagccacggcaucgacaucgccgaccuguucgccgcccagcccggccugaccagcgccgugaucgaggcccugcccagaaacauggugaucaccugccagggcagcgaggacaucaagaagcugcuggagagccagggcagaaaggacaucaagcugaucgacaucgcccugagcaagaucgacagcagaaaguucgagaacgccgugugggaccaguacaaggaccugugccacaugcacaccggcguggugguggagaagaagaagagaggcggcaaggaggagaucaccccccacugcgcccugauggacugcaucauguucgacgccgccgugagcggcggccugaacacccuggugcugagagccgugcugcccagagacaugguguucagaaccagcacccccagaguggugcuguga

SEQ ID NO: 19401 - RNA, 1761 nt, Artificial Sequence
  derived and/or modified CDS sequence (opt4) from LASV(Togo/2016/7082;Clade VI)__AMR44578__SP-HsALB_NP(2-569)
augaagugggugaccuucaucagccugcuguuccuguucagcagcgccuacagcagcaacagcaaggaggugaagagcuuccuguggacccagagccugagaagagagcugagcggcuacugcagcaacaucaagcugcagguggugaaggacgcccaggcccugcugcacggccuggacuucagcgaggugagcaacgugcagagacugaugagaaagcagaagagagacgacggcgaccugaagagacugagagaccugaaccaggccgugaacaaccugguggagcugaagagcgugcagcagaagagcauccugagagugggcacccugaccagcgacgaccugcugacccuggccgccgaccuggagaagcugaagagcaaggugaccagaaccgagagaccccugagcagcggcguguacaugggcaaccugagcagccagcagcuggaccagagaagagcccugcugagcaugaucggcaugagcggcggcaaccagaacagccagcccaagggcgacggcguggugagagugugggacgugaagaacgccgaccugcugaacaaccaguucggcaccaugcccagccugacccuggccugccugaccaagcagggccagguggaccugaacgacgccgugcaggcccugaccgaccugggccugaucuacaccgccaaguaccccaacagcagcgaccuggacagacugagccagagccaccccauccugaacaugaucgacaccaagaagagcagccugaacaucagcggcuacaacuucagccugggcgccgccaucaagaccggcgccugcaugcuggacggcggcaacaugcuggagaccaucaaggugaccccccagaccauggacggcauccugaagagcauccugaaggugaagagaagccugggcauguucaucagcgacacccccggcgagagaaaccccuacgagaacauccuguacaagaucugccugagcggcgacggcuggcccuacaucgccagcagaaccgccaucaucggcagagccugggagaacaccgugguggaccuggagagcgacagcaagccccagaagaucggcagcaacggcagcaacaagagccugcagagcgccggcuucgcccccggccugaccuacagccagcugaugacccugaaggacagcaugcugcagcuggaccccaacgccaagaccuggaucgacaucgagggcagacccgaggaccccguggagguggcccuguuccagcccaucagcggcugcuacauccacuucuucagagagcccaccgaccugaagcaguucaagcaggacgccaaguacagccacggcaucgacgugaccgaccuguucgccgcccagcccggccugaccagcgccgugaucgaggcccugcccagaaacauggugcugaccugccagggcagcgacgacaucaagaagcugcuggacagccagggcagaagagacaucaagcugaucgacgugagccugaacaagaucgacagcagaaaguucgagaacgccgugugggaccaguacaaggaccugugccacaugcacaccggcguggugguggagaagaagaagaagggcggcaaggaggagaucaccccccacugcgcccugcuggacugcaucauguucgacgccgccgugagcggcggccugaacgccaccgugcugagagccgugcugcccagagacaugguguucagaaccagcagccccaagguggugcuguga

SEQ ID NO: 19402 - RNA, 1761 nt, Artificial Sequence
  derived and/or modified CDS sequence (opt4) from LASV(KAK-428;Clade n.d. (VII))__ANH09741__SP-HsALB_NP(2-569)
augaagugggugaccuucaucagccugcuguuccuguucagcagcgccuacagcagcaacagcaaggaggugaagagcuuccuguggacccagagccugagaagagagcugagcggcuacugcaccaacaucaagcugcagguggugaaggacgcccaggcccugcugcacggccuggacuucagcgaggugagcaacgugcagagacugaugagaaagcagaagagagacgacaacgaccugaagagacugagagaccugaaccaggccgugaacaaccugguggagcugaagagcgugcagcagaagagcgugcugaaggugggcacccugaacagcgacgaccugcugacccuggccgccgaccuggagaagcugaagagcaagguggugagaaccgagagaccccugagcagcggcguguacaugggcaaccugagcagccagcagcuggaccagagaagagcccugcugaacaugaucggcauggccggcggcagccagggcaaccagcccagcagagacggcguggugagagugugggacgugaagaacgccgaccugcugaacaaccaguucggcaccaugcccagccugacccuggccugccugaccaagcagggccagguggaccugaacgacguggugcuggcccugaccgaccugggccugaucuacaccgccaaguaccccaacagcagcgaccuggacagacugagccagaaccaccccgugcugaacaugaucgacgugaacaagagcagccugaacaucagcggcuacaacuucagccugggcgccgccgugaaggccggcgccugcaugcuggacggcggcaacaugcuggagaccaucaagaucagcccccagaccguggacggcauccugaagagcauccugaaggugaagagagcccugggcauguucgugagcgacacccccggcgagagaaaccccuacgagaacauccuguacaaggugugccugagcggcaacggcuggcccuacaucgccagcagaaccagcaucgugggcagagccugggagaacaccgugguggaccuggagagcaacaagaaccagcccaaggugggcaacaacggcagcaacaagaugcugcagagcagcggcuucgccaccggccugaccuacagccagcugaugacccugagagacagcaugcugcagcuggaccccaccgccaagaccuggaucgacaucgagggcagacccgaggaccccguggagcuggcccuguuccagcccagcagcggcugcuacauccacuucuucagagagcccaccgaccugaagcaguucaagcaggacgccaaguacagccacggcaucgacgugaacgaccuguucagcgcccagcccggccugaccagcgccgugcuggaggcccugcccagaaacauggugcugaccugccagggcagcgacgacaucagaaagcugcuggacagccaggacagaaaggacaucaagcugaucgacaucagccugagcaaggccgacgccagaaaguucgagaacgacgugugggaccaguucaaggaccugugccacaugcacaccggcaucgugguggagaagaagaagaagggcggcaagcaggagaugaccccccacugcgcccugcuggacugcaucauguucgacgccgccgugagcggcggccugaacgugcccacccugagagccgugcugcccaccgacaugguguucagaaccaucaccaccaagguggugcuguga

SEQ ID NO: 19403 - RNA, 1761 nt, Artificial Sequence; identical to SEQ ID NO: 19397
  derived and/or modified CDS sequence (opt4) from LASV(Pinneo-NIG-1969;Clade I)__AIT17837__SP-HsALB_NP(2-569)

SEQ ID NO: 19404 - RNA, 1761 nt, Artificial Sequence
  derived and/or modified CDS sequence (opt4) from LASV(ISTH0009-NIG-2011;Clade II)__AIT17405__SP-HsALB_NP(2-569)
augaagugggugaccuucaucagccugcuguuccuguucagcagcgccuacagcagcgugagcaaggaggugaagagcuuccuguggacccagagccugagaagagagcugagcggcuacugcagcaacaucaagcugcagguggugaaggacgcccaggcccugcugcacggccuggacuucagcgaggugagcaacgugcagagacugaugagaaagcagaagagagacgacagcgaccugaagagacugagagaccugaaccaggccgugaacaaccugguggagcugaagagcacccagcagaagagcauccugagagugggcacccugaccagcgacgaccugcugacccuggccgccgaccuggagaagcugaagagcaaggugaucagaaccgagagaccccugagcagcggcguguacaugggcaaccugagcacccagcagcuggagcagagaagagcccugcugaacaugaucggcauggugggcggcgcccagggcacccagcccggcagagacggcguggugagagugugggacgugaagaaccccgaccugcugaacaaccaguucggcaccaugcccagccugacccuggccugccugaccaagcagggccagguggaccugaacgacgccgugcuggcccugaccgaccugggccugaucuacaccgccaaguaccccaacagcagcgaccuggacagacugagccagagccaccccauccugaacaugguggacaucaagaagagcagccugaacaucagcggcuacaacuucagccugggcgccgccgugaaggccggcgccugcaugcuggacggcggcaacaugcuggagaccaucaaggugaccccccagaccauggacggcauccugaagagcauccugaaggugaagagaagccugggcauguucgugagcgacacccccggcgagagaaaccccuacgagaacauccuguacaagaucugccugagcggcgacggcuggcccuacaucgccagcagaaccagcaucgugggcagagccugggagaacaccaccguggaccuggagagcgacggcaagccccagaaggugggcagcgccggcagcaacaagagccugcagagcgccggcuuccccaccggccugaccuacagccagcugaugacccugaaggacagcaugaugcagcuggaccccagcgccaagaccuggaucgacaucgagggcagacccgaggaccccguggagaucgcccuguaccagcccaugagcggcugcuacauccacuucuucagagagcccaccgaccugaagcaguucaagcaggacgccaaguacagccacggcaucgacguggccgaccuguuccccgcccagcccggccugaccagcgccgugaucgaggcccugcccagaaacauggugcugaccugccagggcagcgacgacaucaagagacugcuggacagccagggcagaagagacaucaagcugaucgacaucgcccugagcaaggccgacagcagaagauucgagaacgccgugugggaccagugcaaggaccugugccacaugcacaccggcguggugguggagaagaagaagagaggcggcaaggaggagaucaccccccacugcgcccugauggacugcaucauguacgacgccgccgugagcggcggccugaacauccccgugcugagagccgugcugcccagagacaugguguucagaaccagcagccccaagguggugcuguga

SEQ ID NO: 19405 - RNA, 1761 nt, Artificial Sequence
  derived and/or modified CDS sequence (opt4) from LASV(ISTH2010-NIG-2012;Clade II)__AIT17483__SP-HsALB_NP(2-569)
augaagugggugaccuucaucagccugcuguuccuguucagcagcgccuacagcagcgccagcaaggaggugaagagcuuccuguggacccagagccugagaagagagcugagcggcuacugcagcaacaucaagcugcagguggugaaggacgcccaggcccugcugcacggccuggacuucagcgaggugagcaacgugcagagacugaugagaaagcagaagagagacgacagcgaccugaagagacugagagaccugaaccaggccgugaacaaccugguggagcugaagagcacccagcagaagagcauccugagagugggcacccugaccagcgacgaccugcugacccuggccgccgaccuggagaagcugaagagcaaggugaucagaaccgagagaccccugagcagcggcguguacaugggcaaccugagcacccagcagcuggagcagagaagagcccugcugaaccugaucggcauggugggcggcgcccagggcacccagcccggcagagacggcguggugagagugugggacgugaagaaccccgaccugcugaacaaccaguucggcaccaugcccagccugacccuggccugccugaccaagcagggccagguggaccugaacgacgccgugcuggcccugaccgaccugggccugaucuacaccgccaaguaccccaacagcagcgaccuggacagacugagccagagccaccccauccugaacaugguggacaccaagaagagcagccugaacaucagcggcuucaacuucagccugggcgccgccgugaaggccggcgccugcaugcuggacggcggcaacaugcuggagaccaucaaggugaccccccagaccauggacggcauccugaagagcauccugaaggugaagaagagccugggcauguucgugagcgacacccccggcgagagaaaccccuacgagaacauccuguacaagaucugccugagcggcgacggcuggcccuacaucgccagcagaaccagcaucgugggcagagccugggagaacaccaccguggaccuggagagcgacggcaagccccacaaggugggcaccgccggcagcaacaagagccugcagagcgccggcuuccccaccggccugaccuacagccagcugaugacccugaaggacagcaugaugcagcuggaccccagcgccaagaccuggaucgacaucgagggcagacccgaggaccccguggagaucgcccuguaccagcccaugagcggcugcuacauccacuucuucagagagcccaccgaccugaagcaguucaagcaggacgccaaguacagccacggcaucgacguggccgaccuguuccccgcccagcccggccugaccagcgccgugaucgaggcccugcccagaaacauggugcugaccugccagggcagcgacgacaucaagagacugcuggacagccagggcagaagagacaucaagcugaucgacaucgcccugagcaaggccgacagcagaagauucgagaacgccgugugggaccagugcaaggaccugugccacaugcacaccggcguggugguggagaagaagaagagaggcggcaaggaggagaucaccccccacugcgcccugauggacugcaucauguacgacgccgccgugagcggcggccugaacauccccgugcugagagccgugcugcccagagacaugguguucagaaccagcagccccaagguggugcuguga

SEQ ID NO: 19406 - RNA, 1761 nt, Artificial Sequence
  derived and/or modified CDS sequence (opt4) from LASV(Lassa virus/H.sapiens-wt/NGA/2015/ISTH_0543;Clade II)__AVO03640__SP-HsALB_NP(2-569)
augaagugggugaccuucaucagccugcuguuccuguucagcagcgccuacagcagcgccagcaaggaggugaagagcuuccuguggacccagagccugagaagagagcugagcggcuacugcagcaacaucaagcugcagguggugaaggacgcccaggcccugcugcacggccuggacuucagcgaggugagcaacgugcagagacugaugagaaagcagaagagagacgacagcgaccugaagagacugagagaccugaaccaggccgugaacaaccugguggagcugaagagcacccagcagaagagcauccugagagugggcacccugaccagcgacgaccugcugacccuggccgccgaccuggagaagcugaagagcaaggugaucagaaccgagagaccccugagcagcggcguguacaugggcaaccugagcacccagcagcuggagcagagaagagcccugcugaacaugaucggcauggugggcggcgcccagggcacccagcccggcagagacggcguggugagagugugggacgugaagaaccccgaccugcugaacaaccaguucggcaccaugcccagccugacccuggccugccugaccaagcagggccagguggaccugaacgacgccgugcuggcccugaccgaccugggccugaucuacaccgccaaguaccccaacagcagcgaccuggacagacugagccagagccaccccauccugaacaugguggacaccaagaagagcagccugaacaucagcggcuacaacuucagccugggcgccgccgugaaggccggcgccugcaugcuggacggcggcaacaugcuggagaccaucaaggugaccccccagaccauggacggcauccugaagagcauccugaaggugaagaagagccugggcauguucgugagcgacacccccggcgagagaaaccccuacgagaacauccuguacaagaucugccugagcggcgacggcuggcccuacaucgccagcagaaccagcaucgugggcagagccugggagaacaccaccguggaccuggagagcgacggcaagccccagaaggugggcagcgccggcagcaacaagagccugcagagcgccggcuuccccaccggccugaccuacagccagcugaugacccugaaggacagcaugaugcagcuggaccccagcgccaagaccuggaucgacaucgagggcagacccgaggaccccguggagaucgcccuguaccagcccaugagcggcugcuacauccacuucuucagagagcccaccgaccugaagcaguucaagcaggacgccaaguacagccacggcaucgacguggccgaccuguuccccgcccagcccggccugaccagcgccgugaucgaggcccugcccagaaacauggugcugaccugccagggcagcgacgacaucaagagacugcuggacagccagggcagaaaggacaucaagcugaucgacaucgcccugagcaaggccgacagcagaagauucgagaacgccgugugggaccagugcaaggaccugugccacaugcacaccggcguggugguggagaagaagaagagaggcggcaaggaggagaucaccccccacugcgcccugauggacugcaucauguacgacgccgccgugagcggcggccugaacauccccgugcugagagccgugcugcccagagacaugguguucagaaccagcagccccaagguggugcuguga

SEQ ID NO: 19407 - RNA, 1761 nt, Artificial Sequence
  derived and/or modified CDS sequence (opt4) from LASV(Lassa virus/H.sapiens-wt/NGA/2016/ISTH_0009;Clade II)__AVO03572__SP-HsALB_NP(2-569)
augaagugggugaccuucaucagccugcuguuccuguucagcagcgccuacagcagcgccagcaaggaggugaagagcuuccuguggacccagagccugagaagagagcugagcggcuacugcagcaacaucaagcugcagguggugaaggacgcccaggcccugcugcacggccuggacuucagcgaggugagcaacgugcagagacugaugagaaagcagaagagagacgacagcgaccugaagagacugagagaccugaaccaggccgugaacaaccugguggagcugaagagcacccagcagaagagcauccugagagugggcacccugaccagcgacgaccugcugacccuggccgccgaccuggagaagcugaagagcaaggugaucagaaccgagagaccccugagcagcggcguguacaugggcaaccugagcacccagcagcuggagcagagaagagcccugcugaacaugaucggcauggugggcggcgcccagggcacccagcccggcagagacggcguggugagagugugggacgugaagaaccccgaccugcugaacaaccaguucggcaccaugcccagccugacccuggccugccugaccaagcagggccagguggaccugaacgacgccgugcuggcccugaccgaccugggccugaucuacaccgccaaguaccccaacagcagcgaccuggacagacugagccagagccaccccauccugaacaugguggacaccaagaagagcagccugaacaucagcggcuacaacuucagccugggcgccgccgugaaggccggcgccugcaugcuggacggcggcaacaugcuggagaccaucaaggugaccccccagaccauggacggcauccugaagagcauccugaaggugaagaagagccugggcauguucgugagcgacacccccggcgagagaaaccccuacgagaacauccuguacaagaucugccugagcggcgacggcuggcccuacaucgccagcagaaccagcaucgugggcagagccugggagaacaccaccguggaccuggagagcgacggcaagccccagaaggugggcagcgccggcagcaacaagagccugcagagcgccggcuuccccaccggccugaccuacagccagcugaugacccugaaggacagcaugaugcagcuggaccccagcgccaagaccuggaucgacaucgagggcagacccgaggaccccguggagaucgcccuguaccagcccaugagcggcugcuacauccacuucuucagagagcccaccgaccugaagcaguucaagcaggacgccaaguacagccacggcaucgacguggccgaccuguuccccgcccagcccggccugaccagcgccgugaucgaggcccugcccagaaacauggugcugaccugccagggcagcgacgacaucaagagacugcuggacagccagggcagaagagacaucaagcugaucgacaucgcccugagcaaggccgacagcagaagauucgagaacgccgugugggaccagugcaaggaccugugccacaugcacaccggcguggugguggagaagaagaagagaggcggcaaggaggagaucaccccccacugcgcccugauggacugcaucauguacgacgccgccgugagcggcggccugaacauccccgugcugagagccgugcugcccagagacaugguguucagaaccagcagccccaagguggugcuguga

SEQ ID NO: 19408 - RNA, 1761 nt, Artificial Sequence
  derived and/or modified CDS sequence (opt4) from LASV(Lassa virus/H.sapiens-wt/NGA/2016/ISTH_0017;Clade II)__AVO03568__SP-HsALB_NP(2-569)
augaagugggugaccuucaucagccugcuguuccuguucagcagcgccuacagcagcgccagcaaggaggugaagagcuuccuguggacccagagccugagaagagagcugagcggcuacugcagcagcaucaagcugcagguggugaaggacgcccaggcccugcugcacggccuggacuucagcgaggugagcaacgugcagagacugaugagaaagcagaagagagacgacagcgaccugaagagacugagagaccugaaccaggccgugaacaaccugguggagcugaagagcacccagcagaagagcauccugagagugggcacccugaccagcgacgaccugcugacccuggccgccgaccuggagaagcugaagagcaaggugaucagaaccgagagaccccugagcagcggcguguacaugggcaaccugagcacccagcagcuggagcagagaagagcccugcugaacaugaucggcauggccggcggcgcccagggcacccagcccggcagagacggcguggugagagugugggacgugaagaaccccgaccugcugaacaaccaguucggcaccaugcccagccugacccuggccugccugaccaagcagggccagguggaccugaacgacgccgugcuggcccugaccgaccugggccugaucuacaccgccaaguaccccaacagcagcgaccuggacagacugagccagagccaccccauccugaacaugguggacaccaagaagagcagccugaacaucagcggcuacaacuucagccugggcgccgccgugaaggccggcgccugcaugcuggacggcggcaacaugcuggagaccaucaaggugaccccccagaccauggacggcauccugaagagcauccugaaggugaagagaagccugggcauguucgugagcgacgcccccggcgagagaaaccccuacgagaacauccuguacaagaucugccugagcggcgacggcuggcccuacaucgccagcagaaccagcaucgugggcagagccugggagaacaccaccguggaccuggagagcgacggcaagccccagaaggugggcgccaccggcagcaacaagagccugcagagcgccggcuuccccaccggccugaccuacagccagcugaugacccugaaggacagcaugaugcagcuggaccccagcgccaagaccuggaucgacaucgagggcagacccgaggaccccguggagguggcccuguaccagcccgugagcggcugcuacauccacuucuucagagagcccaccgaccugaagcaguucaagcaggacgccaaguacagccacggcaucgacguggccgaccuguuccccgcccagcccggccugaccagcgccgugaucgaggcccugcccagaaacauggugcugaccugccagggcagcgacgacaucaagaagcugcuggacagccagggcagaaaggacaucaagcugaucgacaucgcccugagcaaggccgacagcagaagauucgagaacgccgugugggaccagugcaaggaccugugccacaugcacaccggcguggugguggagaagaagaagagaggcggcaaggaggagaucaccccccacugcgcccugauggacugcaucauguacgacgccgccgugagcggcggccugaacauccccgugcugagagccgugcugcccagagacaugguguucagaaccagcagccccaagguggugcuguga

SEQ ID NO: 19409 - RNA, 1761 nt, Artificial Sequence
  derived and/or modified CDS sequence (opt4) from LASV(Lassa virus/H.sapiens-wt/NGA/2018/ISTH_0959;Clade II)__AVV65100__SP-HsALB_NP(2-569)
augaagugggugaccuucaucagccugcuguuccuguucagcagcgccuacagcagcgccagcaaggaggugaagagcuuccuguggacccagagccugagaagagagcugagcggcuacugcagcaacaucaagcugcagguggugaaggacgcccaggcccugcugcacggccuggacuucagcgaggugagcaacgugcagagacugaugagaaagcagaagagagacgacagcgaccugaagagacugagagaccugaaccaggccgugaacaaccugguggagcugaagagcacccagcagaagagcauccugagagugggcacccugaccagcgacgaccugcugacccuggccgccgaccuggagaagcugaagagcaaggugaucagaaccgagagaccccugagcagcggcguguacaugggcaaccugagcacccagcagcuggagcagagaagagcccugcugaaccugaucggcauggugggcggcgcccagggcacccagcccggcagagacggcguggugagagugugggacgugaagaaccccgaccugcugaacaaccaguucggcaccaugcccagccugacccuggccugccugaccaagcagggccagguggaccugaacgacguggugcuggcccugaccgaccugggccugaucuacaccgccaaguaccccaacagcagcgaccuggacagacugagccagagccaccccauccugaacaugguggacaccaagaagagcagccugaacaucagcggcuucaacuucagccugggcgccgccgugaaggccggcgccugcaugcuggacggcggcaacaugcuggagaccaucaaggugaccccccagaccauggacggcauccugaagagcauccugaaggugaagaagagccugggcauguucgugagcgacacccccggcgagagaaaccccuacgagaacauccuguacaagaucugccugagcggcgacggcuggcccuacaucgccagcagaaccagcaucgugggcagagccugggagaacaccaccguggaccuggagagcgacggcaagccccacaaggugggcaccgccggcagcaacaagagccugcagagcgccggcuuccccaccggccugaccuacagccagcugaugacccugaaggacagcaugaugcagcuggaccccagcgccaagaccuggaucgacaucgagggcagacccgaggaccccguggagaucgcccuguaccagcccaugagcggcugcuacauccacuucuucagagagcccaccgaccugaagcaguucaagcaggacgccaaguacagccacggcaucgacguggccgaccuguuccccgcccagcccggccugaccagcgccgugaucgaggcccugcccagaaacauggugcugaccugccagggcagcgacgacaucaagagacugcuggacagccagggcagaaaggacaucaagcugaucgacaucgcccugagcaagaccgacagcagaagauucgagaacgccgugugggaccagugcaaggaccugugccacaugcacaccggcguggugguggagaagaagaagagaggcggcaaggaggagaucaccccccacugcgcccugauggacugcaucauguacgacgccgccgugagcggcggccugaacauccccgugcugagagccgugcugcccagagacaugguguucagaaccagcagccccaagguggugcuguga

SEQ ID NO: 19410 - RNA, 1761 nt, Artificial Sequence
  derived and/or modified CDS sequence (opt4) from LASV(LASV003-NIG-2008;Clade II)__AIT17581__SP-HsALB_NP(2-569)
augaagugggugaccuucaucagccugcuguuccuguucagcagcgccuacagcagcgccagcaaggaggugaagagcuuccuguggacccagagccugagaagagagcugagcggcuacugcagcagcaucaagcugcagguggugaaggacgcccaggcccugcugcacggccuggacuucagcgaggugagcaacgugcagagacugaugagaaagcagaagagagacgacagcgaccugaagagacugagagaccugaaccaggccgugaacaaccugguggagcugaagagcacccagcagaagagcgugcugagagugggcacccugaccagcgacgaccugcugacccuggccgccgaccuggagaagcugaagagcaaggugaucagaaccgagagaccccugagcagcggcguguacaugggcaaccugagcgcccagcagcuggagcagagaagaacccugcugaacaugaucggcauggugggcggcgcccagggcacccagcccggcagagacggcguggugagagugugggacgugaagaaccccgaccugcugaacaaccaguucggcaccaugcccagccugacccuggccugccugaccaagcagggccagguggaccugaacgacguggugcuggcccugaccgaccugggccugaucuacaccgccaaguaccccaacagcagcgaccuggacagacugagccagagccaccccauccugagcaugguggacaccaagaagagcagccugaacaucagcggcuacaacuucagccugggcgccgccgugaaggccggcgccugcaugcuggacggcggcaacaugcuggagaccaucaaggugaccccccagaccauggacggcauccugaagagcauccugaaggugaagaagagccugggcauguucgugagcgacacccccggcgagagaaaccccuacgagaacauccuguacaagaucugccugagcggcgacggcuggcccuacaucgccagcagaaccagcaucgugggcagagccugggagaacaccaccguggaccuggagagcgacggcaagccccagaaggugggcaccgccggcagcaacaagagccugcagagcgccggcuuccccaccggccugaccuacagccagcugaugacccugaaggacagcaugaugcagcuggaccccagcgccaagaccuggaucgacaucgagggcagacccgaggaccccguggagaucgcccuguaccagcccaugagcggcugcuacauccacuucuucagagagcccaccgaccugaagcaguucaagcaggacgccaaguacagccacggcaucgacgugaccgaccuguuccccgcccagcccggccugaccagcgccgugaucgaggcccugcccagaaacauggugcugaccugccagggcagcgacgacaucaagagacugcuggacagccagggcagaagagacaucaagcugaucgacaucgcccugagcaaggccgacagcagaagauucgagaacgccgugugggaccagugcaaggaccugugccacaugcacaccggcguggugguggagaagaagaagagaggcggcaaggaggagaucaccccccacugcgcccugauggacugcaucauguacgacgccgccgugagcggcggccugaacauccccgugcugagagccgugcugcccagagacaugguguucagaaccagcagccccaagguggugcuguga

SEQ ID NO: 19411 - RNA, 1761 nt, Artificial Sequence
  derived and/or modified CDS sequence (opt4) from LASV(LASV035-NIG-2009;Clade II)__AIT17589__SP-HsALB_NP(2-569)
augaagugggugaccuucaucagccugcuguuccuguucagcagcgccuacagcagcgccagcaaggaggugaagagcuuccuguggacccagagccugagaagagagcugagcggcuacugcagcagcaucaagcugcagguggugaaggacgcccaggcccugcugcacggccuggacuucagcgaggugagcaacgugcagagacugaugagaaagcagaagagagacgacagcgaccugaagagacugagagaccugaaccaggccgugaacaaccugguggagcugaagagcacccagcagaagagcauccugagagugggcacccugaccagcgacgaccugcugacccuggccgccgaccuggagaagcugaagagcaaggugaucagaaccgagagaccccugagcagcggcguguacaugggcaaccugagcgcccagcagcuggagcagagaagagcccugcugaacaugaucggcauggugggcggcgcccagggcacccagcccggcagagacggcguggugagagugugggacgugaagaaccccgaccugcugaacaaccaguucggcaccaugcccagccugacccuggccugccugaccaagcagggccagguggaccugaacgacgccgugcuggcccugaccgaccugggccugaucuacaccgccaaguaccccaacagcagcgaccuggacagacugagccagagccaccccauccugaacaugguggacaccaagaagagcagccugaacaucagcggcuacaacuucagccugggcgccgccgugaaggccggcgccugcaugcuggacggcggcaacaugcuggagaccaucaaggugaccccccagaccauggacggcauccugaagagcauccugaaggugaagagaagccugggcauguucgugagcgacacccccggcgagagaaaccccuacgagaacauccuguacaagaucugccugagcggcgacggcuggcccuacaucgccagcagaaccagcaucgugggcagagccugggagaacaccaccguggaccuggagagcgacggcaagccccagaaggugggcaccaccggcagcaacaagagccugcagagcgccggcuuccccaccggccugaccuacagccagcugaugacccugaaggacagcaugaugcagcuggaccccagcgccaagaccuggaucgacaucgagggcagacccgaggaccccguggagaucgcccuguaccagcccaugagcggcugcuacauccacuucuucagagagcccaccgaccugaagcaguucaagcaggacgccaaguacagccacggcaucgacguggccgaccuguuccccgcccagcccggccugaccagcgccgugaucgaggcccugcccagaaacauggugcugaccugccagggcagcgacgacaucaagaagcugcuggacagccagggcagaagagacaucaagcugaucgacaucgcccugagcaaggccgacagcagaaaguucgagaacgccgugugggaccagugcaaggaccugugccacaugcacaccggcguggugguggagaagaagaagagaggcggcaaggaggagaucaccccccacugcgcccugauggacugcaucauguacgacgccgccgugagcggcggccugaacauccccgugcugagagccgugcugcccagagacaugguguucagaaccagcagccccaagguggugcuguga

SEQ ID NO: 19412 - RNA, 1761 nt, Artificial Sequence
  derived and/or modified CDS sequence (opt4) from LASV(LASV1000-NIG-2009;Clade II)__AIT17783__SP-HsALB_NP(2-569)
augaagugggugaccuucaucagccugcuguuccuguucagcagcgccuacagcagcgccagcaaggaggugaagagcuuccuguggacccagagccugagaagagagcugagcggcuacugcagcaacaucaagcugcagguggugaaggacgcccaggcccugcugcacggccuggacuucagcgaggugagcaacgugcagagacugaugagaaagcagaagagagacgacagcgaccugaagagacugagagaccugaaccaggccgugaacaaccugguggagcugaagagcacccagcagaagagcauccugagagugggcacccugaccagcgacgaccugcugacccuggccgccgaccuggagaagcugaagagcaaggugaucagaaccgagagaccccugagcagcggcguguacaugggcaaccugagcacccagcagcuggagcagagaagagcccugcugaacaugaucggcauggugggcggcgcccagggcacccagcccggcagagacggcguggugagagugugggacgugaagaaccccgaccugcugaacaaccaguucggcaccaugcccagccugacccuggccugccugaccaagcagggccagguggaccugaacgacguggugcuggcccugaccgaccugggccugaucuacaccgccaaguaccccaacagcagcgaccuggacagacugagccagagccaccccauccugaacaugguggacaccaagaagagcagccugaacaucagcggcuacaacuucagccugggcgccgccgugaaggccggcgccugcaugcuggacggcggcaacaugcuggagaccaucaaggugaccccccagaccauggacggcauccugaagagcauccugaaggugaagaagagccugggcauguucgugagcgacacccccggcgagagaaaccccuacgagaacauccuguacaagaucugccugagcggcgacggcuggcccuacaucgccagcagaaccagcaucgugggcagagccugggagaacaccaccguggaccuggagagcgacggcaagccccagaaggugggcaccgccggcagcaacaagagccugcagagcgccggcuuccccaccggccugaccuacagccagcugaugacccugaaggacagcaugaugcagcuggaccccagcgccaagaccuggaucgacaucgagggcagacccgaggaccccguggagaucgcccuguaccagcccgugagcggcugcuacauccacuucuucagagagcccaccgaccugaagcaguucaagcaggacgccaaguacagccacggcaucgacguggccgaccuguuccccgcccagcccggccugaccagcgccgugaucgaggcccugcccagaaacauggugcugaccugccagggcagcgacgacaucaagagacugcuggacagccagggcagaagagacaucaagcugaucgacaucgcccugagcaaggccgacagcagaagauucgagaacgccgugugggaccagugcaaggaccugugccacaugcacaccggcguggugguggagaagaagaagagaggcggcaaggaggagaucaccccccacugcgcccugauggacugcaucauguacgacgccgccgugagcggcggccugaacauccccgugcugagagccgugcugcccagagacaugguguucagaaccagcagccccaagguggugcuguga

SEQ ID NO: 19413 - RNA, 1761 nt, Artificial Sequence
  derived and/or modified CDS sequence (opt4) from LASV(LASV221-NIG-2010;Clade II)__AIT17625__SP-HsALB_NP(2-569)
augaagugggugaccuucaucagccugcuguuccuguucagcagcgccuacagcagcgccagcaaggaggugaagagcuuccuguggacccagagccugagaagagagcugagcggcuacugcagcagcaucaagcugcagguggugaaggacgcccaggcccugcugcacggccuggacuucagcgaggugagcaacgugcagagacugaugagaaagcagagaagagacgacagcgaccugaagagacugagagaccugaaccaggccgugaacaaccugguggagcugaagagcacccagcagaagagcauccugagagugggcacccugaccagcgacgaccugcugacccuggccgccgaccuggagaagcugaagagcaaggugaucagaaccgagagaccccugagcagcggcguguacaugggcaaccugagcacccagcagcuggagcagagaagagcccugcugaacaugaucggcauggugggcggcgcccagggcacccagcccggcagagacggcguggugagagugugggacgugaagaaccccgaccugcugaacaaccaguucggcaccaugcccagccugacccuggccugccugaccaagcagggccagguggaccugaacgacgccgugcuggcccugaccgaccugggccugaucuacaccgccaaguaccccaacagcagcgaccuggacagacugagccagagccaccccauccugaacaugguggacaccaagaagagcagccugaacaucagcggcuacaacuucagccugggcgccgccgugaaggccggcgccugcaugcuggacggcggcaacaugcuggagaccaucaaggugaccccccagaccguggacggcauccugaagagcauccugaaggugaagagaagccugggcauguucgugagcgacacccccggcgagagaaaccccuacgagaacauccuguacaagaucugccugagcggcgacggcuggcccuacaucgccagcagaaccagcaucgugggcagagccugggagaacaccaccguggaccuggagagcgacggcaagccccagaaggugggcaccgccggcagcaacaagagccugcagagcgccggcuuccccaccggccugaccuacagccagcugaugacccugaaggacagcaugaugcagcuggaccccagcgccaagaccuggaucgacaucgagggcagacccgaggaccccguggagaucgcccuguaccagcccaugagcggcugcuacauccacuucuucagagagcccaccgaccugaagcaguucaagcaggacgccaaguacagccacggcaucgacguggccgaccuguuccccgcccagcccggccugaccagcgccgugaucgaggcccugcccagaaacauggugcugaccugccagggcagcgacgacaucaagagacugcuggacagccagggcagaagagacaucaagcugaucgacaucgcccugagcaaggccgacagcagaaaguucgagaacgccgugugggaccagugcaaggaccugugccacaugcacaccggcguggugguggagaagaagaagagaggcggcaaggaggagaucaccccccacugcgcccugauggacugcaucauguacgacgccgccgugagcggcggccugaacauccccgugcugagagccgugcugcccagagacaugguguucagaaccagcagccccaagguggugcuguga

SEQ ID NO: 19414 - RNA, 1761 nt, Artificial Sequence
  derived and/or modified CDS sequence (opt4) from LASV(LASV237-NIG-2010;Clade II)__AIT17639__SP-HsALB_NP(2-569)
augaagugggugaccuucaucagccugcuguuccuguucagcagcgccuacagcagcgccagcaaggaggugaagagcuuccuguggacccagagccugagaagagagcugagcggcuacugcagcaacaucaagcugcagguggugaaggacgcccaggcccugcugcacggccuggacuucagcgaggugagcaacgugcagagacugaugagaaagcagaagagagacgacagcgaccugaagagacugagagaccugaaccaggccgugaacaaccugguggagcugaagagcacccagcagaagagcauccugagagugggcacccugaccagcgacgaccugcugacccuggccgccgaccuggagaagcugaagagcaaggugaucagaaccgagagaccccugagcagcggcguguacaugggcaaccugagcacccagcagcuggagcagagaagagcccugcugaacaugaucggcauggugggcggcgcccagggcacccagcccggcagagacggcguggugagagugugggacgugaagaaccccgaccugcugaacaaccaguucggcaccaugcccagccugacccuggccugccugaccaagcagggccagguggaccugaacgacgccgugcuggcccugaccgaccugggccugaucuacaccgccaaguaccccaacagcagcgaccuggacagacugagccagagccaccccauccugaacaugguggacaucaagaagagcagccugaacaucagcggcuacaacuucagccugggcgccgccgugaaggccggcgccugcaugcuggacggcggcaacaugcuggagaccaucaaggugaccccccagaccauggacggcauccugaagagcauccugaaggugaagagaagccugggcauguucgugagcgacacccccggcgagagaaaccccuacgagaacauccuguacaagaucugccugagcggcgacggcuggcccuacaucgccagcagaaccagcaucgugggcagagccugggagaacaccaccguggaccuggagagcgacggcaagccccagaaggugggcagcgccggcagcaacaagagccugcagagcgccggcuuccccaccggccugaccuacagccagcugaugacccugaaggacagcaugaugcagcuggaccccagcgccaagaccuggaucgacaucgagggcagacccgaggaccccguggagaucgcccuguaccagcccaugagcggcugcuacauccacuucuucagagagcccaccgaccugaagcaguucaagcaggacgccaaguacagccacggcaucgacguggccgaccuguuccccgcccagcccggccugaccagcgccgugaucgaggcccugcccagaaacauggugcugaccugccagggcagcgacgacaucaagagacugcuggacagccagggcagaagagacaucaagcugaucgacaucgcccugagcaaggccgacagcagaagauucgagaacgccgugugggaccagugcaaggaccugugccacaugcacaccggcguggugguggagaagaagaagagaggcggcaaggaggagaucaccccccacugcgcccugauggacugcaucauguacgacgccgccgugagcggcggccugaacauccccgugcugagagccgugcugcccagagacaugguguucagaaccagcagccccaagguggugcuguga

SEQ ID NO: 19415 - RNA, 1761 nt, Artificial Sequence
  derived and/or modified CDS sequence (opt4) from LASV(LASV253-NIG-2011;Clade II)__AIT17671__SP-HsALB_NP(2-569)
augaagugggugaccuucaucagccugcuguuccuguucagcagcgccuacagcagcgccagcaaggaggugaagagcuuccuguggacccagagccugagaagagagcugagcggcuacugcagcagcaucaagcugcagguggugaaggacgcccaggcccugcugcacggccuggacuucagcgaggugagcaacgugcagagacugaugagaaagcagaagagagacgacagcgaccugaagagacugagagaccugaaccaggccgugaacaaccugguggagcugaagagcacccagcagaagagcgugcugagagugggcacccugaccagcgacgaccugcugacccuggccgccgaccuggagaagcugaagagcaaggugaucagaaccgagagaccccugagcagcggcguguacaugggcaaccugagcacccagcagcuggagcagagaagagcccugcugaacaugaucggcauggugggcggcgcccagggcacccagcccggcagagacggcguggugagagugugggacgugaagaaccccgaccugcugaacaaccaguucggcaccaugcccagccugacccuggccugccugaccaagcagggccagguggaccugaacgacguggugcuggcccugaccgaccugggccugaucuacaccgccaaguaccccaacagcagcgaccuggacagacugagccagagccaccccauccugaacaugguggacaccaagaagagcagccugaacaucagcggcuacaacuucagccugggcgccgccgugaaggccggcgccugcaugcuggacggcggcaacaugcuggagaccaucaaggugaccccccagaccauggacggcauccugaagagcauccugaaggugaagaagagccugggcauguucgugagcgacacccccggcgagagaaaccccuacgagaacauccuguacaagaucugccugagcggcgacggcuggcccuacaucgccagcagaaccagcaucgugggcagagccugggagaacaccaccguggaccuggagagcgacggcaagccccagaaggugggcaccgccggcagcaacaagagccugcagagcgccggcuuccccaccggccugaccuacagccagcugaugacccugaaggacagcaugaugcagcuggaccccagcgccaagaccuggaucgacaucgagggcagacccgaggaccccguggagaucgcccuguaccagcccaugagcggcugcuacauccacuucuucagagagcccaccgaccugaagcaguucaagcaggacgccaaguacagccacggcaucgacgugaccgaccuguuccccgcccagcccggccugaccagcgccgugaucgaggcccugcccagaaacauggugcugaccugccagggcagcgacgacaucaagagacugcuggacagccagggcagaagagacaucaagcugaucgacaucgcccugagcaaggccgacagcagaagauucgagaacgccgugugggaccagugcaaggaccugugccacaugcacaccggcguggugguggagaagaagaagagaggcggcaaggaggagaucaccccccacugcgcccugauggacugcaucauguacgacgccgccgugagcggcggccugaacauccccgugcugagagccgugcugcccagagacaugguguucagaaccagcagccccaagguggugcuguga

SEQ ID NO: 19416 - RNA, 1761 nt, Artificial Sequence
  derived and/or modified CDS sequence (opt4) from LASV(LASV254-NIG-2011;Clade II)__AIT17675__SP-HsALB_NP(2-569)
augaagugggugaccuucaucagccugcuguuccuguucagcagcgccuacagcagcgccagcaaggaggugaagagcuuccuguggacccagagccugagaagagagcugagcggcuacugcagcagcaucaagcugcagguggugaaggacgcccaggcccugcugcacggccuggacuucagcgaggugagcaacgugcagagacugaugagaaagcagaagagagacgacagcgaccugaagagacugagagaccugaaccaggccgugaacaaccugguggagcugaagagcacccagcagaagagcgugcugagagugggcacccugaccagcgacgaccugcugacccuggccgccgaccuggagaagcugaagagcaaggugaucagaaccgagagaccccugagcagcggcguguacaugggcaaccugagcacccagcagcuggagcagagaagagcccugcugaacaugaucggcauggugggcggcgcccagggcacccagcccggcagagacggcguggugagagugugggacgugaagaaccccgaccugcugaacaaccaguucggcaccaugcccagccugacccuggccugccugaccaagcagggccagguggaccugaacgacgccgugcuggcccugaccgaccugggccugaucuacaccgccaaguaccccaacagcagcgaccuggacagacugagccagagccaccccauccugaacaugguggacaccaagaagagcagccugaacaucagcggcuacaacuucagccugggcgccgccgugaaggccggcgccugcaugcuggacggcggcaacaugcuggagaccaucaaggugaccccccagaccauggacggcauccugaagagcauccugaaggugaagaagagccugggcauguucgugagcgacacccccggcgagagaaaccccuacgagaacauccuguacaagaucugccugagcggcgacggcuggcccuacaucgccagcagaaccagcaucgugggcagagccugggagaacaccaucguggaccuggagagcgacggcaagccccagaaggugggcaccgccggcagcaacaagagccugcagagcgccggcuuccccaccggccugaccuacagccagcugaugacccugaaggacagcaugaugcagcuggaccccagcgccaagaccuggaucgacaucgagggcagacccgaggaccccguggagaucgcccuguaccagcccaugagcggcugcuacauccacuucuucagagagcccaccgaccugaagcaguucaagcaggacgccaaguacagccacggcaucgacguggccgaccuguuccccgcccagcccggccugaccagcgccgugaucgaggcccugcccagaaacauggugcugaccugccagggcagcgacgacaucaagagacugcuggacagccagggcagaagagacaucaagcugaucgacaucgcccugagcaaggccgacagcagaagauucgagaacgccgugugggaccagugcaaggaccugugccacaugcacaccggcguggugguggagaagaagaagagaggcggcaaggaggagaucaccccccacugcgcccugauggacugcaucauguacgacgccgccgugagcggcggccugaacauccccgugcugagagccgugcugcccagagacaugguguucagaaccagcagccccaagguggugcuguga

SEQ ID NO: 19417 - RNA, 1761 nt, Artificial Sequence
  derived and/or modified CDS sequence (opt4) from LASV(Nig08-04;Clade II)__ADU56611__SP-HsALB_NP(2-569)
augaagugggugaccuucaucagccugcuguuccuguucagcagcgccuacagcagcgccagcaaggaggugaagagcuuccuguggacccagagccugagaagagagcugagcggcuacugcagcaacaucaagcugcagguggugaaggacgcccaggcccugcugcacggccuggacuucagcgaggugagcaacgugcagagacugaugagaaagcagaagagagacgacggcgaccugaagagacugagagaccugaaccaggccgugaacaaccugguggagcugaagagcacccagcagaagagcgugcugagagugggcacccugaccagcgacgaccugcugacccuggccgccgaccuggagaagcugaagagcaaggugaucagaaccgagagaccccugagcagcggcguguacaugggcaaccugagcacccagcagcuggagcagagaaaggcccugcugagcaugaucggcauggugggcggcgcccagggcacccagcccggcagagacggcguggugagagugugggacgugaagaaccccgaccugcugaacaaccaguucggcaccaugcccagccugacccuggccugccugaccaagcagggccagguggaccugaacgacgccgugcuggcccugaccgaccugggccugaucuacaccgccaaguaccccaacagcagcgaccuggacagacugagccagagccaccccauccugaacaugguggacaccaagaagagcagccugaacaucagcggcuacaacuucagccugggcgccgccgugaaggccggcgccugcaugcuggacggcggcaacaugcuggagaccaucaaggugaccccccagaccauggacggcauccugaagagcauccugaaggugaagagaagccugggcauguucgugagcgacacccccggcgagagaaaccccuacgagaacauccuguacaagaucugccugagcggcgacggcuggcccuacaucgccagcagaaccagcaucgugggcagagccugggagaacaccaccguggaccuggagagcgacggcaagccccagaaggugggcaccgccggcagcaacaagagccugcagagcgccggcuuccccaccggccugaccuacagccagcugaugacccugaaggacagcaugaugcagcuggaccccagcgccaagaccuggaucgacaucgagggcagacccgaggaccccguggagaucgcccuguaccagcccaugagcggcugcuacauccacuucuucagagagcccaccgaccugaagcaguucaagcaggacgccaaguacagccacggcaucgacgugaccgaccuguucagcgcccagcccggccugaccagcgccgugaucgaggcccugcccagaaacauggugcugaccugccagggcagcgacgacaucaagaagcugcuggacagccagggcagaagagacaucaagcugaucgacaucagccugaacaaggccgacagcagaagauucgagaacgccgugugggaccagugcaaggaccugugccacaugcacaccggcguggugguggagaagaagaagagaggcggcaaggaggagaucaccccccacugcgcccugauggacugcaucauguucgacgccgccgugagcggcggccugaacauccccauccugagagccgugcugcccagagacaugguguucagaaccagcagccccaagguggugcuguga

SEQ ID NO: 19418 - RNA, 1764 nt, Artificial Sequence
  derived and/or modified CDS sequence (opt4) from LASV(GA391;Clade III)__AAA46284__SP-HsALB_NP(2-570)
augaagugggugaccuucaucagccugcuguuccuguucagcagcgccuacagcagcgccagcaaggaggugagaagcugccuguggacccagagccugagaagagagcugagcggcuacugcagcaacaucaagcugcagguggugaaggacgcccaggcccugcugcacggccuggacuucagcgaggugagcaacgugcagagacugaugagaaagcagaagagagacgacggcgaccugaagagacugagagaccugaaccaggccgugaacaaccugguggagcugaagagcacccagcagaagagcgugcugagagugggcacccugagcagcgacgaccugcugauccuggccgccgaccuggagaagcugaagagcaaggugaccagaaccgagagaccccugagcagcggcguguacaugggcaaccugagcagccagcagcuggaccagagaagagcccugcugaacaugaucggcaugaccggcgugagcggcggcggcaagggcgccagcaacggcaucgugagagugugggacgugaagaacgccgagcugcugaacaaccaguucggcaccaugcccagccugacccuggccugccugaccaagcagggccagguggaccugaacgacgccgugcaggcccugaccgaccugggccugaucuacaccgccaaguaccccaacagcagcgaccuggacagacugagccagagccaccccauccugaacaugaucgacaccaagaagagcagccugaacaucagcggcuacaacuucagccugggcgccgccgugaaggccggcgccugcaugcuggacggcggcaacaugcuggagaccaucaaggugagcccccagaccauggacggcauccugaagagcauccugaaggugaagaagagccugggcauguucgugagcgacacccccggcgagagaaaccccuacgagaacauccuguacaagaucugccugagcggcgacggcuggagcuacaucgccagcagaaccagcaucgugggcagagccugggagaacaccgugguggaccuggagcaggacaacaagccccagaagaucggcaacggcggcagcaacaagagccugcagagcgccggcuucgccgccggccugaucuacagccagcugaugacccugaaggacuucaagugcuucaaccugauccccaacgccaagaccuggauggacaucgagggcagacccgaggaccccguggagaucgcccuguaccagcccagcagcggcugcuacgugcacuucuucagagagcccaccgaccugaagcaguucaagcaggacgccaaguacagccacggcagagacgugaccgaccuguucgccgcccagcccggccugaccagcgccgugaucgaggcccugcccagaaacauggugaucaccugccagggcagcgaggacaucagaaagcugcuggagagccagggcagaagagacaucaagcugaucgacaucacccugagcaaggccgacagcagaaaguucgagaacgccgugugggaccaguucaaggaccugugccacaugcacaccggcguggugguggagaagaagaagagaggcggcaaggaggagaucaccccccacugcgcccugauggacugcaucauguucgacgccgccgugagcggcggccuggacgccaaggugcugagaguggugcugcccagagacaugguguucagaaccagcacccccaagguggugcuguga

SEQ ID NO: 19419 - RNA, 1761 nt, Artificial Sequence
  derived and/or modified CDS sequence (opt4) from LASV(Nig08-A19;Clade III)__ADU56619__SP-HsALB_NP(2-569)
augaagugggugaccuucaucagccugcuguuccuguucagcagcgccuacagcagcgccagcaaggaggugaagagcuuccuguggacccagagccugagaagagagcugagcggcuacugcagcaacaucaagcugcagguggugaaggacgcccaggcccugcugcacggccuggacuucagcgaggugagcaacgugcagagacugaugagaaagcagaagagagacgacggcgaccugaagagacugagagaccugaaccaggccgugaacaaccugguggagcugaagagcacccagcagaagagcgugcugagagugggcacccugagcagcgacgaccugcuggugcuggccgccgaccuggagaagcugaagagcaagguggugagaaccgagagaccccugagcagcggcaucuacaugggcaaccugagcagccagcagcuggaccagagaaaggcccugcugaacaugaucggcaugaccggcggcaacggcggcagaaacaccaccagcgacggcaucgugagagugugggacgugaagaacgccgagcugcugaacaaccaguucggcaccaugcccagccugacccuggccugccugaccaagcagggccagguggaccugaacgacgccgugcaggcccugaccgaccugggccugaucuacaccgccaaguaccccaacagcagcgaccuggacagacuggcccagagccaccccauccugaacaugaucgacaccaagaagagcagccugaacaucagcggcuacaacuucagccugggcgccgccgugaaggccggcgccugcaugcuggacggcggcaacaugcuggagaccaucaaggugagcccccagaccauggacggcauccugaagagcauccugaaggugaagagaagccugggcauguucaucagcgacacccccggcgagagaaaccccuacgagaacauccuguacaagaucugccugagcggcgacggcuggcccuacaucgccagcagaaccagcaucgugggcagagccugggagaacaccgugguggaccuggagagcgacaacaagccccagaagaccggcaacggcggcagcaacaagagccugcagagcgccggcuucgccgccggccugaccuacagccagcugaugacccugaaggacagcaugcugcagcuggaccccaacgccaagaccuggauggacaucgagggcagacccgaggaccccguggagaucgcccuguaccagcccagcagcggcugcuacauccacuucuucagagagcccaccgaccugaagcaguucaagcaggacgccaaguacagccacggcaucgacgugaccgaccuguucgccgcccagcccggccugaccagcgccgugaucgaggcccugcccagaaacauggugaucaccugccagggcagcgaggacaucagaaagcugcuggagagccagggcagaagagacaucaagcugaucgacaucagccugagcaagguggacagcagaaaguucgagaacgccgugugggaccaguucaaggaccugugccacaugcacaccggcaucgugguggagaagaagaagagaggcggcaaggaggagaucaccccccacugcgcccugauggacugcaucauguucgacgccgccgugagcggcggcguggacgccaaggugcugagagccgugcugcccagagacaugguguucagaaccagcacccccaagguggugcuguga

SEQ ID NO: 19420 - RNA, 1761 nt, Artificial Sequence
  derived and/or modified CDS sequence (opt4) from LASV(G1180-SLE-2010;Clade IV)__AIT17169__SP-HsALB_NP(2-569)
augaagugggugaccuucaucagccugcuguuccuguucagcagcgccuacagcagcgccagcaaggagaucaagagcuuccuguggacccagagccugagaagagagcugagcggcuacugcagcaacaucaagcugcagguggugaaggacgcccaggcccugcugcacggccuggacuucagcgaggugagcaacgugcagagacugaugagaaaggagagaagagacgacaacgaccugaagagacugagagaccugaaccaggccgugaacaaccugguggagcugaagagcacccagcagaagagcauccugagagugggcacccugaccagcgacgaccugcugauccuggccgccgaccuggagaagcugaagagcaaggugaucagaaccgagagaccccugagcgccggcguguacaugggcaaccugagcagccagcagcuggaccagagaagagcccugcugagcaugaucggcaugagcagcggcaaccagagagcccaggccggcagagacggcguggugagagugugggacgugaagaacguggagcugcugaacaaccaguucggcaccaugcccagccugacccuggccugccugaccaagcagggccagguggaccugaacgacgccgugcaggcccugaccgaccugggccugaucuacaccgccaaguaccccaacaccagcgaccuggacagacugacccagagccaccccauccugaacaugaucgacaccaagaagagcagccugaacaucagcggcuacaacuucagccugggcgccgccgugaaggccggcgccugcaugcuggacggcggcaacaugcuggagaccaucaaggugagcccccagaccauggacggcauccugaagagcauccugaaggugaagaaggcccugggcauguucaucagcgacacccccggcgagagaaaccccuacgagaacauccuguacaagaucugccugagcggcgacggcuggcccuacaucgccagcagaaccagcaucaccggcagagccugggagaacaccgugguggaccuggagagcgacggcaagccccagaaggccggcagcaacaacagcaacaagagccugcagagcgugggcuucaccgccggccugaccuacagccagcugaugacccugaaggacgccaugcugcagcuggaccccaacgccaagaccuggauggacaucgagggcagacccgaggaccccguggagaucgcccuguaccagcccagcagcggcugcuacauccacuucuucagagagcccaccgaccugaagcaguucaagcaggacgccaaguacagccacggcaucgacgugaccgaccuguucgccgcccagcccggccugaccagcgccgugaucgacgcccugcccagaaacauggugaucaccugccagggcagcgacgacaucagaaagcugcuggagagccagggcagaaaggacaucaagcugaucgacaucgcccugagcaagaccgacagcagaaaguacgagaacgccgugugggaccaguacaaggaccugugccacaugcacaccggcguggugguggagaagaagaagagaggcggcaaggaggagaucaccccccacugcgcccugauggacugcaucauguucgacgccgccgugagcggcggccugaacaccagcgugcugagagccgugcugcccagagacaugguguucagaaccagcacccccagaguggugcuguga

SEQ ID NO: 19421 - RNA, 1761 nt, Artificial Sequence
  derived and/or modified CDS sequence (opt4) from LASV(G1442-SLE-2011;Clade IV)__AIT17181__SP-HsALB_NP(2-569)
augaagugggugaccuucaucagccugcuguuccuguucagcagcgccuacagcagcgccagcaaggaggugaagagcuuccuguggacccagagccugagaagagagcugagcggcuacugcagcaacaucaagcugcagguggugaaggacgcccaggcccugcugcacggccuggacuucagcgaggugagcaacgugcagagacugaugagaaagcagagaagagacgacaacgaccugaagagacugagagaccugaaccaggccgugaacaaccugguggagcugaagagcacccagcagaagagcgugcugagagugggcacccugaccagcgacgaccugcuggugcuggccgccgaccuggagaagcugaagagcaaggugaucagaaccgagagaccccugagcgccggcguguacaugggcaaccugagcagccagcagcuggaccagagaagagcccugcugaacaugaucggcaugagcggcggcauccagggcaccagaaccggcagagacggcguggugagagugugggacgugaagaacgccgaccugcugaacaaccaguucggcaccaugcccagccugacccuggccugccugaccaagcagggccagguggaccugaacgacguggugcaggcccugaccgaccugggccugaucuacaccgccaaguaccccaacgccagcgaccuggacagacugacccagagccaccccauccugaacaugaucgacaccaagaagagcagccugaacaucagcggcuacaacuucagccugggcgccgccgugaaggccggcgccugcaugcuggacggcggcaacaugcuggagaccaucaaggugagcccccagaccauggacggcauccugaagagcauccugaaggugaagaagacccugggcauguucaucagcgacacccccggcgagagaaaccccuacgagaacauccuguacaagaucugccugagcggcgacggcuggcccuacaucgccagcagaaccagcaucaccggcagagccugggagaacaccgugguggaccuggagagcgacggcaagccccagaaggccggcagcaacaacagcaacaagagccugcagagcgccggcuucgccgccggccugaccuacagccagcugaugacccugaaggacgccaugcugcagcuggaccccaacgccaagaccuggauggacaucgagggcagacccgaggaccccguggagaucgcccuguaccagcccagcagcggcugcuacauccacuucuucagagagcccaccgaccugaagcaguucaagcaggacgccaaguacagccacggcaucgacgugaccgaccuguucgccgcccagcccggccugaccagcgccgugaucgaggcccugcccagaaacauggugaucaccugccagggcagcgacgacaucaagaagcugcuggagagccagggcagaaaggacaucaagcugaucgacaucgcccugagcaagaccgacagcagaaaguacgagaacgccgugugggaccaguacaaggaccugugccacaugcacaccggcguggugguggagaagaagaagagaggcggcaaggaggagaucaccccccacugcgcccugauggacugcaucauguucgacgccgccgugagcggcggccugaacacccuggugcugagagccgugcugcccagagacaugguguucagaaccagcacccccagaguggugcuguga

SEQ ID NO: 19422 - RNA, 1761 nt, Artificial Sequence
  derived and/or modified CDS sequence (opt4) from LASV(G3010-SLE-2013;Clade IV)__AIT17345__SP-HsALB_NP(2-569)
augaagugggugaccuucaucagccugcuguuccuguucagcagcgccuacagcagcgccagcaaggagaucaagagcuuccuguggacccagagccugagaagagagcugagcggcuacugcagcaacaucaagcugcagguggugaaggacgcccaggcccugcugcacggccuggacuucagcgaggugagcaacgugcagagacugaugagaaaggagagaagagacgacaacgaccugaagagacugagagaccugaaccaggccgugaacaaccugguggagcugaagagcacccagcagaagagcauccugagagugggcacccugaccagcgacgaccugcugauccuggccgccgaccuggagaagcugaagagcaaggugaccagaaccgagagaccccugagcgccggcguguacaugggcaaccugagcagccagcagcuggaccagagaagagcccugcugagcaugaucggcaugagcagcggcgugcagggcgccagagccggcagagacggcguggugagagugugggacgugaagaacgccgagcugcugaacaaccaguucggcaccaugcccagccugacccuggccugccugaccaagcagggccagguggaccugaacgacguggugcaggcccugaccgaccugggccugaucuacaccgccaaguaccccaacaccagcgaccuggacagacugacccagagccaccccauccugaacaugaucgacaccaagaagagcagccugaacaucagcggcuacaacuucagccugggcgccgccgugaaggccggcgccugcaugcuggacggcggcaacaugcuggagaccaucaaggugagcccccagaccauggacggcauccugaagagcauccugaaggugaagaaggcccugggcauguucaucagcgagacccccggcgagagaaaccccuacgagaacauccuguacaagaucugccugagcggcgacggcuggcccuacaucgccagcagaaccagcaucaccggcagagccugggagaacaccgugguggaccuggagagcgacggcaagccccagaaggccggcagcaacaacagcaacaagagccugcagagcgccggcuucaccgccggccugaccuacagccagcugaugacccugaaggacgccaugcugcagcuggaccccaacgccaagaccuggauggacaucgagggcagacccgaggaccccguggagguggcccuguaccagcccagcagcggcugcuacauccacuucuucagagagcccaccgaccugaagcaguucaagcaggacgccaaguacagccacggcaucgacgugaccgaccuguucgccgcccagcccggccugaccagcgccgugaucgacgcccugcccagaaacauggugaucaccugccagggcagcgacgacaucaagaagcugcuggagagccagggcagaaaggacaucaagcugaucgacaucgcccugagcaagaccgacagcagaaaguacgagaacgccgugugggaccaguacaaggaccugugccacaugcacaccggcguggugguggagaagaagaagagaggcggcaaggaggagaucaccccccacugcgcccugauggacugcaucauguucgacgccgccgugagcggcggccugaacaccagcgugcugagagccgugcugcccagagacaugguguucagaaccagcacccccagaguggugcuguga

SEQ ID NO: 19423 - RNA, 1761 nt, Artificial Sequence
  derived and/or modified CDS sequence (opt4) from LASV(G502-SLE-2009;Clade IV)__AIT17127__SP-HsALB_NP(2-569)
augaagugggugaccuucaucagccugcuguuccuguucagcagcgccuacagcagcgccagcaaggagaucaagagcuuccuguggacccagagccugagaagagagcugagcggcuacugcagcaacaucaagcugcagguggugaaggacgcccaggcccugcugcacggccuggacuucagcgaggugagcaacgugcagagacugaugagaaaggagagaagagacgacaacgaccugaagagacugagagaccugaaccaggccgugaacaaccugguggagcugaagagcacccagcagaagagcauccugagagugggcacccugaccagcgacgaccugcugauccuggccgccgaccuggagaagcugaagagcaaggugaucagaaccgagagaccccugagcgccggcguguacaugggcaaccugagcagccagcagcuggaccagagaagagcccugcugagcaugaucggcaugagcggcggcaaccagggcgugagagccggcaaggacggcguggugagagugugggacgugaagaacgccgagcugcugaacaaccaguucggcaccaugcccagccugacccuggccugccugaccaagcagggccagguggaccugaacgacgccgugcaggcccugaccgaccugggccugaucuacaccgccaaguaccccaacaccagcgaccuggacagacugacccagagccaccccauccugaacaugaucgacaccaagaagagcagccugaacaucagcggcuacaacuucagccugggcgccgccgugaaggccggcgccugcaugcuggacggcggcaacaugcuggagaccaucaaggugagcccccagaccauggacggcauccugaagagcauccugaaggugaagaaggcccugggcauguucaucagcgacacccccggcgagagaaaccccuacgagaacauccuguacaagaucugccugagcggcgacggcuggcccuacaucgccagcagaaccagcaucaccggcagagccugggagaacaccgugguggaccuggagagcgacggcaagccccagaaggccggcagcaacaacagcaacaagagccugcagagcgccggcuucaccgccggccugaccuacagccagcugaugacccugaaggacgccaugcugcagcuggaccccaacaccaagaccuggauggacaucgagggcagacccgaggaccccguggagaucgcccuguaccagcccagcagcggcugcuacauccacuucuucagagagcccaccgaccugaagcaguucaagcaggacgccaaguacagccacggcaucgacgugaccgaccuguucgccgcccagcccggccugaccagcgccgugaucgacgcccugcccagaaacauggugaucaccugccagggcagcgacgacaucagaaagcugcuggagagccagggcagaaaggacaucaagcugaucgacaucgcccugaacaagaccgacagcagaaaguacgagaacgccgugugggaccaguacaaggaccugugccacaugcacaccggcguggugguggagaagaagaagagaggcggcaaggaggagaucaccccccacugcgcccugauggacugcaucauguucgacgccgccgugagcggcggccugaacaccagcgugcugagagccgugcugcccagagacaugguguucagaaccagcacccccagaguggugcuguga

SEQ ID NO: 19424 - RNA, 1761 nt, Artificial Sequence
  derived and/or modified CDS sequence (opt4) from LASV(G733-SLE-2010;Clade IV)__AIT17155__SP-HsALB_NP(2-569)
augaagugggugaccuucaucagccugcuguuccuguucagcagcgccuacagcagcgccagcaaggagaucaagagcuuccuguggacccagagccugagaagagagcugagcggcuacugcagcaacaucaagcugcagguggugaaggacgcccaggcccugcugcacggccuggacuucagcgaggugagcaacgugcagagacugaugagaaaggagagaagagacgacaacgaccugaagagacugagagaccugaaccaggccgugaacaaccugguggagcugaagagcacccagcagaagagcgugcugagagugggcacccugaccagcgacgagcugcuggugcuggccgccgaccuggagaagcugaagagcaaggugaucagaaccgagagaccccugagcgccggcguguacaugggcaaccugagcagccagcagcuggaccagagaagagcccugcugagcaugaucggcaugagcggcggcaaccagggcgccagaaccggcagagacggcguggugagagugugggacgugaagaacgccgagcugcugaacaaccaguucggcaccaugcccagccugacccuggccugccugaccaagcagggccagguggaccugaacgacgccgugcaggcccugaccgaccugggccugaucuacaccgccaaguaccccaacaccagcgaccuggacagacugacccagagccaccccauccugaacaugaucgacaccaagaagagcagccugaacaucagcggcuacaacuucagccugggcgccgccgugaaggccggcgccugcaugcuggacggcggcaacaugcuggagaccaucaaggugagcccccagaccauggacggcauccugaagagcauccugaaggugaagaaggcccugggcauguucaucagcgacacccccggcgagagaaaccccuacgagaacauccuguacaagaucugccugagcggcgacggcuggcccuacaucgccagcagaaccagcaucaccggcagagccugggagaacaccgugguggaccuggagagcgacggcaagccccagaaggccggcagcaacaacagcaacaagagccugcagagcgccggcuucaccgccggccugaccuacagccagcugaugacccugaaggacgccaugcugcagcuggaccccaacgccaagaccuggauggacaucgagggcagacccgaggaccccguggagaucgcccuguaccagcccagcagcggcugcuacauccacuucuucagagagcccaccgaccugaagcaguucaagcaggacgccaaguacagccacggcaucgacgugaccgaccuguucgccgcccagcccggccugaccagcgccgugaucgacgcccugcccagaaacauggugaucaccugccagggcagcgacgacaucagaaagcugcuggagagccagggcagaaaggacaucaagcugaucgacaucgcccugagcaagaucgacagcagaaaguacgagaacgccgugugggaccaguacaaggaccugugccacaugcacaccggcguggugguggagaagaagaagagaggcggcaaggaggagaucaccccccacugcgcccugauggacugcaucauguucgacgccgccgugagcggcggccugaacagccuggugcugagagccgugcugcccagagacaugguguucagaaccagcacccccagaguggugcuguga

SEQ ID NO: 19425 - RNA, 1761 nt, Artificial Sequence
  derived and/or modified CDS sequence (opt4) from MOPV/LASV reassortant(IGS-1;Clade IV)__AFY05578__SP-HsALB_NP(2-569)
augaagugggugaccuucaucagccugcuguuccuguucagcagcgccuacagcagcgccagcaaggagaucaagagcuuccuguggacccagagccugagaagagagcugagcggcuacugcagcaacaucaagcugcagguggugaaggacgcccaggcccugcugcacggccuggacuucagcgaggugagcaacgugcagagacugaugagaaaggagagaagagacgacaacgaccugaagagacugagagaccugaaccaggccgugaacaaccugguggagcugaagagcacccagcagaagagcauccugagagugggcacccugaccagcgacgaccugcugauccuggccgccgaccuggagaagcugagaagcaaggugaucagaaccgagagaccccugagcgccggcguguacaugggcaaccugagcagccagcagcuggaccagagaagagcccugcugaacaugaucggcaugagcggcggcaaccagggcgccagagccggcagagacggcguggugagagugugggacgugaagaacgccgagcugcugagcaaccaguucggcaccaugcccagccugacccuggccugccugaccaagcagggccagguggaccugaacgacgccgugcaggcccugaccgaccugggccugaucuacaccgccaaguaccccaacaccagcgaccuggacagacugacccagagccaccccauccugaacaugaucgacaccaagaagagcagccugaacaucagcggcuacaacuucagccugggcgccgccgugaaggccggcgccugcaugcuggacggcggcaacaugcuggagaccaucaaggugagcccccagaccauggacggcauccugaagagcauccugaaggugaagaaggcccugggcauguucaucagcgacacccccggcgagagaaaccccuacgagaacauccuguacaagaucugccugagcggcgacggcuggcccuacaucgccagcagaaccagcaucaccggcagagccugggagaacaccgugguggaccuggagagcgacggcaagccccagaaggccgacagcaacaacagcagcaagagccugcagagcgccggcuucaccgccggccugaccuacagccagcugaugacccugaaggacgccaugcugcagcuggaccccaacgccaagaccuggauggacaucgagggcagacccgaggaccccguggagaucgcccuguaccagcccagcagcggcugcuacauccacuucuucagagagcccaccgaccugaagcaguucaagcaggacgccaaguacagccacggcaucgacgugaccgaccuguucgccacccagcccggccugaccagcgccgugaucgacgcccugcccagaaacauggugaucaccugccagggcagcgacgacaucagaaagcugcuggagagccagggcagaaaggacaucaagcugaucgacaucgaccugagcaagaccgacagcagaaaguacgagaacgccgugugggaccaguacaaggaccugugccacaugcacaccggcguggugguggagaagaagaagagaggcggcaaggaggagaucaccccccacugcgcccugauggacugcaucauguucgacgccgccgugagcggcggccugaacaccagcgugcugagagccgugcugcccagagacaugguguucagaaccagcacccccagaguggugcuguga

SEQ ID NO: 19426 - RNA, 1761 nt, Artificial Sequence
  derived and/or modified CDS sequence (opt4) from LASV(LM765-SLE-2012;Clade IV)__AIT17815__SP-HsALB_NP(2-569)
augaagugggugaccuucaucagccugcuguuccuguucagcagcgccuacagcagcgccagcaaggagaucaagagcuuccuguggacccagagccugagaagagagcugagcggcuacugcagcaacaucaagcugcagguggugaaggacgcccaggcccugcugcacggccuggacuucagcgaggugagcaacgugcagagacugaugagaaaggagagaagagacgacaacgaccugaagagacugagagaccugaaccaggccgugaacaaccugguggagcugaagagcacccagcagaagagcauccugagagugggcacccugaccagcgacgaccugcugauccuggccgccgaccuggagaagcugaagagcaaggugaccagaaccgagagaccccugagcgccggcguguacaugggcaaccugagcagccagcagcuggaccagagaagagcccugcuggacaugaucggcaugagcggcagcaaccagggcgccagagccggcagagacggcguggugagagugugggacgugaagaacgccgagcugcugaacaaccaguucggcaccaugcccagccugacccuggccugccugaccaagcagggccagguggaccugaacgacgccgugcaggcccugaccgaccugggccugaucuacaccgccaaguaccccaacaccagcgaccuggacagacugacccagagccaccccauccugaacaugaucgacaccaagaagagcagccugaacaucagcggcuacaacuucagccugggcgccgccgugaaggccggcgccugcaugcuggacggcggcaacaugcuggagaccaucaaggugagcccccagaccauggacggcauccugaagagcauccugaaggugaagaaggcccugggcauguucaucagcgacgcccccggcgagagaaaccccuacgagaacauccuguacaagaucugccugagcggcgacggcuggcccuacaucgccagcagaaccagcaucaccggcagagccugggagaacaccgugguggaccuggagagcgacggcaagccccagaaggccggcagcaacggcagcaacaagagccugcagagcgccggcuucaccgccggccugaccuacagccagcugaugacccugaaggacgccaugcugcagcuggaccccaacgccaagaccuggauggacaucgagggcagacccgaggaccccguggagaucgcccuguaccagcccagcagcggcugcuacauccacuucuucagagagcccaccgaccugaagcaguucaagcaggacgccaaguacagccacggcaucgacgugaccgaccuguucgccgcccagcccggccugaccagcgccgugaucgacgcccugcccagaaacauggugaucaccugccagggcagcgacgacaucagaaagcuguucgagagccagggcagaaaggacaucaagcugaucgacaucgcccugagcaagaccgacagcagaaaguacgagaacgccgugugggaccaguacaaggaccugugccacaugcacaccggcaucgugguggagaagaagaagagaggcggcaaggaggagaucaccccccacugcgcccugauggacugcaucauguucgacgccgccgugagcggcggccugaacaccagcgugcugagagccgugcugcccagagacaugguguucagaaccagcacccccagaguggugcuguga

SEQ ID NO: 19427 - RNA, 1761 nt, Artificial Sequence
  derived and/or modified CDS sequence (opt4) from LASV(LM776-SLE-2012;Clade IV)__AIT17825__SP-HsALB_NP(2-569)
augaagugggugaccuucaucagccugcuguuccuguucagcagcgccuacagcagcgccagcaaggagaucaagagcuuccuguggacccagagccugagaagagagcugagcagcuacugcagcaacaucaagcugcagguggugaaggacgcccaggcccugcugcacggccuggacuucagcgaggugagcaacgugcagagacugaugagaaaggagagaagagacgacaacgaccugaagagacugagagaccugaaccaggccgugaacaaccugguggagcugaagagcacccagcagaagagcauccugagagugggcacccugaccagcgacgaccugcugauccuggccgccgaccuggagaagcugaagagcaaggugaccagaaccgagagaccccugagcgccggcguguacaugggcaaccugagcagccagcagcuggaccagagaagagcccugcugagcaugaucggcaugagcggcagcaaccagggcgccagagccggcagagacggcguggugagagugugggacgugaagaacgccgagcugcugaacaaccaguucggcaccaugcccagccugacccuggccugccugaccaagcagggccagguggaccugaacgacgccgugcaggcccugaccgaccugggccugaucuacaccgccaaguaccccaacaccagcgaccuggacagacugacccagagccaccccauccugaacaugaucgacaccaagaagagcagccugaacaucagcggcuacaacuucagccugggcgccgccgugaaggccggcgccugcaugcuggacggcggcaacaugcuggagaccaucaaggugagcccccagaccauggacggcauccugaagagcauccugaaggugaagaaggcccugggcauguucaucagcgacacccccggcgagagaaaccccuacgagaacauccuguacaagaucugccugagcggcgacggcuggcccuacaucgccagcagaaccagcaucaccggcagagccugggagaacaccgugguggaccuggagagcgacggcaagccccagaaggccggcagcaacaacagcaacaagagccugcagagcgccggcuucaccgccggccugaccuacagccagcugaugacccugaaggacgccaugcugcagcuggaccccaacgccaagaccuggauggacaucgagggcagacccgaggaccccguggagguggcccuguaccagcccagcagcggcugcuacauccacuucuucagagagcccaccgaccugaagcaguucaagcaggacgccaaguacagccacggcaucgacgugaccgaccuguucgccgcccagcccggccugaccagcgccgugaucgacgcccugcccagaaacauggugaucaccugccagggcagcgacgacaucagaaagcugcuggagagccagggcagaaaggacaucaagcugaucgacaucgcccugagcaagaccgacagcagaaaguacgagaacgccgugugggaccaguacaaggaccugugccacaugcacaccggcguggugguggagaagaagaagagaggcggcaaggaggagaucaccccccacugcgcccugauggacugcaucauguucgacgccgccgugagcggcggccugaacaccagcgugcugagagccgugcugcccagagacaugguguucagaaccagcacccccagaguggugcuguga

SEQ ID NO: 19428 - RNA, 1761 nt, Artificial Sequence
  derived and/or modified CDS sequence (opt4) from LASV(Mad39;Clade IV)__ANH09723__SP-HsALB_NP(2-569)
augaagugggugaccuucaucagccugcuguuccuguucagcagcgccuacagcagcgccagcaaggagaucaagagcuuccuguggacccagagccugagaagagagcugagcggcuacugcagcaacaucaagcugcagguggugaaggacgcccaggcccugcugcacggccuggacuucagcgaggugagcaacgugcagagacugaugagaaagcagagaagagacgacaacgaccugaagagacugagagaccugaaccaggccgugaacaaccugguggagcugaagagcacccagcagaagagcgugcugagagugggcacccugaccagcgacgaccugcugacccuggccgccgaccuggagaagcugaagagcaaggugaccagaaccgagagaccccugaccgccggcguguacaugggcaaccugagcagccagcagcuggaccagagaagagcccugcugaacaugaucggcaugagcggcggcaaccagggcgccagaaccggcagagacggcguggugagagugugggacgugaagaacgccgagcugcugaacaaccaguucggcaccaugcccagccugacccuggccugccugaccaagcagggccagguggaccugaacgacguggugcaggcccugaccgaccugggccugaucuacaccgccaaguaccccaacaccagcgaccuggacagacugacccagagccaccccauccugaacaugaucgacaccaacaagagcagccugaacaucagcggcuacaacuucagccugggcgccgccgugaaggccggcgccugcaugcuggacggcggcaacaugcuggagaccaucaaggugagcccccagaccauggacggcauccugaagagcauccugaaggugaagaagagccugggcauguucaucagcgacacccccggcgagagaaaccccuacgagaacauccuguacaagaucugccugagcggcgacggcuggcccuacaucgccagcagaaccagcaucaccggcagagccugggagaacaccgugguggaccuggagagcggcggcaagccccagaaggccggcagcaacaacagcaacaagagccugcagagcgccggcuucgccgccggccugaccuacagccagcugaugacccugaaggacgccaugcugcagcuggaccccaacgccaagaccuggauggacaucgagggcagacccgaggaccccguggagaucgcccuguaccagcccaucagcggcugcuacauccacuucuucagagagcccaccgaccugaagcaguucaagcaggacgccaaguacagccacggcaucgacgugaccgaccuguucgccgcccagcccggccugaccagcgccgugaucgaggcccugcccagaaacauggugaucaccugccagggcagcgacgacaucagaaagcuguucgagagccagggcagaaaggacaucaagcugaucgacaucgcccugagcaagaccgacagcagaaaguacgagaacgccgugugggaccaguacaaggaccugugccacaugcacaccggcguggugguggagaagaagaagaagggcggcaaggaggagaucaccccccacugcgcccugauggacugcaucauguucgacgccgccgugagcggcggccugaacacccuggugcugagagccgugcugcccagagacaugguguucagaaccagcacccccaagguggugcuguga

SEQ ID NO: 19429 - RNA, 1761 nt, Artificial Sequence
  derived and/or modified CDS sequence (opt4) from LASV(Z0947-SLE-2011;Clade IV)__AIT17841__SP-HsALB_NP(2-569)
augaagugggugaccuucaucagccugcuguuccuguucagcagcgccuacagcagcgccagcaaggagaucaagagcuuccuguggacccagagccugagaagagagcugagcggcuacugcagcaacaucaagcugcagguggugaaggacgcccaggcccugcugcacggccuggacuucagcgaggugagcaacgugcagagacugaugagaaaggagagaagagacgacaacgaccugaagagacugagagaccugaaccaggccgugaacaaccugguggagcugaagagcacccagcagaagagcauccugagagugggcacccugaccagcgacgaccugcugauccuggccgccgaccuggagaagcugaagagcaaggugaccagaaccgagagaccccugagcgccggcguguacaugggcaaccugagcagccagcagcuggaccagagaagagcccugcugaacaugaucggcaugagcggcagcaaccagggcgccagaaccggcagagacggcguggugagagugugggacgugaagaacgccgagcugcugaacaaccaguucggcaccaugcccagccugacccuggccugccugaccaagcagggccagguggaccugaacgacgccgugcaggcccugaccgaccugggccugaucuacaccgccaaguaccccaacaccagcgaccuggacagacugacccagagccaccccauccugaacaugaucgacaccaagaagagcagccugaacaucagcggcuacaacuucagccugggcgccgccgugaaggccggcgccugcaugcuggacggcggcaacaugcuggagaccaucaaggugagcccccagaccauggacggcauccugaagagcauccugaaggugaagaaggcccugggcauguucaucagcgacgcccccggcgagagaaaccccuacgagaacauccuguacaagaucugccugagcggcgacggcuggcccuacaucgccagcagaaccagcaucaccggcagagccugggagaacaccgugguggaccuggagagcgacggcaagccccagaaggccggcagcaacggcagcaacaagagccugcagagcgccggcuucaccgccggccugaccuacagccagcugaugacccugaaggacgccaugcugcagcuggaccccaacgccaagaccuggauggacaucgagggcagacccgaggaccccguggagaucgcccuguaccagcccagcagcggcugcuacauccacuucuucagagagcccaccgaccugaagcaguucaagcaggacgccaaguacagccacggcaucgacgugaccgaccuguucgccgcccagcccggccugaccagcgccgugaucgacgcccugcccagaaacauggugaucaccugccagggcagcgacgacaucagaaagcuguucgagagccagggcagaaaggacaucaagcugaucgacaucgcccugagcaagaccgacagcagaaaguacgagaacgccgugugggaccaguacaaggaccugugccacaugcacaccggcaucgugguggagaagaagaagagaggcggcaaggaggagaucaccccccacugcgcccugauggacugcaucauguucgacgccgccgugagcggcggccugaacaccagcgugcugagagccgugcugcccagagacaugguguucagaaccagcacccccagaguggugcuguga

SEQ ID NO: 19430 - RNA, 1761 nt, Artificial Sequence
  derived and/or modified CDS sequence (opt5) from LASV(Josiah;Clade IV)__NP_694869__SP-HsALB_NP(2-569)
augaagugggugaccuucaucagccugcucuuucuguucuccucugccuacagcagcgccuccaaggagaucaaaucuuuccuguggacccagagccucagacgggaacuguccggcuacugcucuaacauuaagcugcaaguggucaaagacgcucaggcccugcuccacgggcuggauuuuagcgagguuuccaaugugcagcgccuuaugagaaaggaacggcgcgacgauaacgaccugaaaagacuccgggaucugaaucaggcggugaacaaucuggucgagcucaagucuacacaacaaaagagcauccugcgcgugggaacgcuuaccuccgacgaucugcucauucuggcugccgaccuugaaaaacuuaagagcaaaguuaucagaacagagcggccccucucugccggcguguauauggggaaccuguccagccagcagcuggaucagcgcagagcucuccugaauaugauuggaaugucuggcgggaaccagggagcccgggcuggccgcgacggcgucgugagaguuugggaugugaagaaugccgagcuucugaacaaucaguucgggaccaugccuucccucacacuggcgugucuuaccaaacagggacaagucgaccugaacgaugccgugcaggcucucacagaccugggccugaucuacaccgccaaguauccgaauacgagcgaccucgaucggcugacccagucucaucccauccuuaacaugauugacacaaagaaauccagccugaauaucuccggguacaacuuuucucucggagcugccgugaaggcgggcgccugcaugcuggaugggggaaacaugcuugaaaccauuaaagucagcccucaaacaauggacggcauccugaaguccauucucaaaguuaagaaagcucugggcauguucaucagcgauacccccggggagcgcaauccuuaugaaaacauucuguacaagaucugucucucuggagacggcuggcccuauaucgccuccagaacgagcauuacagggcgggcuugggagaauaccgugguggaucuggagucugacggaaagccucagaaagccgauagcaacaauuccucuaagagccuucaguccgccggcuuuacagcugggcugaccuacagccagcucaugacccugaaagacgcgaugcugcaacuugauccgaacgccaagacauggauggacaucgaaggaagacccgaggacccugucgaaauugcucucuaccagcccucuuccggcugcuauauccacuucuuucgcgagccuacggaucugaaacaguucaagcaggacgccaaguacagccauggcauugaugugaccgaccuguuugccacacaacccgggcucaccucugcuguuaucgaugcccugccgcggaauauggugaucacaugucagggauccgacgauauuagaaaacuucuggaaagccagggccgcaaggacaucaaacucauugauaucgcgcuguccaagaccgacucucggaaauaugagaacgcugucugggaucaguacaaggaccugugccacaugcauacgggggugguuguggagaagaaaaagagaggaggcaaagaagagauuacaccucacugugcccuuauggauugcaucauguucgacgccgcugucagcgggggccucaauaccuccgugcugcgcgccguccugccccgggacaugguguuuagaaccucuacaccucgcguugugcucuga

SEQ ID NO: 19431 - RNA, 1761 nt, Artificial Sequence
  derived and/or modified CDS sequence (opt5) from LASV(LP;Clade I)__AAF86702__SP-HsALB_NP(2-569)
augaagugggugaccuucaucagccugcucuuucuguucuccucugccuacagcagcaacuccaaggagaucaaaucuuuccuguggacccagagccucagacgggaacuguccggcuacugcucuaauauuaagcuccaaguggucaaagacgcccaggcucugcuccacgggcuggauuuuagcgagguuuccaacgugcagcgccuuaugagaaagcagaaacgggacgaugccgaccugaagcgccucagagaucugaaucaagcggugaacaaucuggucgaacucaagucuacacagcagaaaaacgugcugcggguuggaacgcuuagcuccgacgaucugaucacccucgcugccgaccuggagaaacuuaaaagcaaggugauucgcacagaaagaccccugucuuccggcgucuauauggggaaucucagcucucagcaacuggaucagcggcgcgcccugcucuccaugaucggaaugagcggcgggccucagggaaacagaaccggcggcgacggggugguucgggugugggaugucaaaaaugcugagcugcuuaacaaucaguucggaacaaugccgucucugacccucgccugucugacaaagcaaggccagguggaccuuaacgaugcugugcaggcccugaccgaccucgggcugauuuacacggcgaaguaucccaauuccagcgaccuggauaugcucacccaaucccauccuauccugggaauggucgacacaaagaagucuagccuuaacaucuccggcuacaauuuuagccugggggccgcuguuaaagccggagcuugcaugcucgauggcggcaacaugcuggagaccauuaaggugucuccccagacaauggacgggauccuuaaauccauucugaaggugaaacgcagccucggaauguucaucucugauaccccuggcgaaagaaaccccuaugagaauauucuguacaagaucugucugagcggggaaggauggccuuauauugccucccggacgucuaucacaggccgcgcgugggagaacacccucgucgaccuggagagcgauaauaagccgcccaaacuuaacuccgccgggagcaauaagucucugcaggcugccggacucaacgcuggccugacauacucccagcugaugacccuuaaagacugcaugcuccaacuggauccuagcucuaagaccuggaucgacauugaaggcagacccgaggauccuguggaaaucgcccuguuucagcccuccagcggguguuacauucacuucuuucgggagccgacagaccucaaacaguucaagcaggacgccaaguauucccauggaaucgauguuacggaccuguuuucuacccaaccuggccuuacaagcgcugugauugaagcgcugcccagaaauaugguccuuaccugccagggguccgaugacaucaaaaagcugcuggagucucagggacgccgggauaucaaacuuauugacaucagccucuccaaggccgauagcagaaaauucgagaacgcugugugggaccaguacaaggaucugugucacaugcauacaggcguuguggucgaaaagaaaaagcgcgggggcaaagaggaaauuaccccucacugcgcccugcucgacuguaucauguuugaugccgcuacgacaggaucucugaauauuaccacccuucgggccgugcugcccagagacauggucuuccgcacauccacccccaaggugguucucuga

SEQ ID NO: 19432 - RNA, 1761 nt, Artificial Sequence
  derived and/or modified CDS sequence (opt5) from LASV(803213;Clade II)__AAF86704__SP-HsALB_NP(2-569)
augaagugggugaccuucaucagccugcucuuucuguucuccucugccuacagcagcgccuccaaggaggugaaaucuuuccuguggacccagagccucagacgggaacuguccggcuacugcucuaacaucaaacuucaagucguuaaggacgcucaggcccugcuccacgggcuggauuuuagcgaggugaauaacgugcagcgccuuaugagaaagcagaaacgggacgauggagaccugaagcgccucagagaucugaaucaagcggucaacaaucugguggaacucaaguccacacagcagaaaucuauucugcggguuggcacgcuuaccagcgacgaucugcucacacuggcugccgaccuugagaagcugaaauccaaggugauccgcaccgaaagaccccucagcucuggggucuauaugggaaaccuguccacacagcaacuggagcagcggcgcgcccuccugaauaugauuggcauggugggaggagcucagggcacccagccuggcagagaugggguugugcgggucugggacgugaaaaacccggaucuucugaauaaccaauucggaacaaugcccagccucacccuggccugucuuacgaagcagggccagguggaccugaaugaugcuguccucgcccugaccgaccuggggcucaucuacacagcgaaguauccuaacucuuccgaccuggaucgccuuagccaaucucaucccauucugaauaugguugacaccaaaaaguccagccucaacaucuccggauacaauuuuucucugggcgccgcugugaaagccggggcuugcaugcuugauggaggcaacaugcuggagacaaucaaggugaccccucagacgauggacggcauucucaaaagcauccugaaggucaaaagaucccuggggauguucgugagcgauacacccggagaacggaacccuuaugagaauauucucuacaagaucugucugucuggcgacggguggccguauauugccucccgcaccagcaucguugggagagcgugggaaaacacaaccguggaucuugagucugacggcaagccccagaaagucgggaccgccggaagcaauaagucccugcagucugcuggcuuuccuacaggccucacguacagccaacugaugacccugaaagauuccaugaugcagcuugaccccagcgccaagacauggauugauaucgaggggcggccugaagaccccguggagaucgcucucuaccagccgaugucuggaugcuauauucacuucuuuagagaaccuaccgaccugaaacaguucaagcaagaugccaaguacucccauggcaucgacguugccgaucuguuucccgcucagccugggcucacaagcgcggugauugaggcccugccccgcaacaugguccuuaccugucagggaucugacgauaucaaaaagcugcucgacucccagggccggagagauauuaaacugaucgacaucagccuguccaagguggauucucgcaaauucgaaaaugcugucugggaccaaugcaaggaucuuugucacaugcauacgggggugguuguggagaagaaaaagcggggcggaaaagaggaaauuacaccccacugcgcccucauggacuguaucauguuugaugccgcugucagcggcgggcugaacauuccugugcugagagccguucucccgcgcgacaugguguuccggaccuccucucccaaggucgugcuguga

SEQ ID NO: 19433 - RNA, 1764 nt, Artificial Sequence
  derived and/or modified CDS sequence (opt5) from LASV(GA391;Clade III)__CAA36646__SP-HsALB_NP(2-570)
augaagugggugaccuucaucagccugcucuuucuguucuccucugccuacagcagcgccuccaaggaggugagaucuuuccuguggacccagagccuccggcgcgaacuguccggcuacugcucuaacaucaaacuucaagucguuaaggacgcucaggcccugcuccacgggcuggauuuuagcgagguguccaaugugcagagacuuaugcggaaacagaagcgcgacgauggagaccugaaaagacuccgggaucugaaccaagcggucaauaaccugguggaacucaagucuacacagcagaaaagcguucugcgcgugggcacgcuuuccagcgacgaucugcucauucuggcugccgaccuugagaaacugaagucuaaagucaccagaacagaacggccccucuccagcgggguguauaugggaaaucugucuucccagcaacuggaucagcgcagagcccuccugaacaugaucggcaugaccgggguuagcggaggcggcaagggggcuucugacggaauugugcgggucugggaugugaaaaaugccgagcuucugaacaaucaguucggcacaaugccuucccucacccuggcuugucuuacaaagcaggggcaaguggaccugaacgaugccguccaggcgcucaccgaccugggacugaucuacacggccaaguauccgaauagcuccgaccucgaucgccugucucagagccaucccauucuuaacaugaucgacaccaaaaaguccagccugaauaucucuggcuacaacuuuucccucggggcugccguuaaagcuggagccugcaugcuggauggcggcaauaugcuugagacaauuaaggugagcccucaaaccauggacgggauccugaaaucuauucucaaggugaaaaagagccugggaauguucgucuccgauacacccggcgaaagaaacccuuaugagaacauccuguacaagauuugucucucuggggacggauggcccuauaucgcgagccggaccuccauugugggccgcgccugggaaaauacgguuguggaucuggagcaggacaacaaaccucagaagaucgggaauggaggcagcaacaaaucucuucaguccgcuggcuuugccgcugggcugacauacagccaacucaugacccugaaggauuucaaaugcuuuaaucugaucccgaacgccaagacauggauggacauugagggaagacccgaagauccugucgagaucgcccuuuaccagcccucuuccggcuguuaugugcacuucuuucgggaaccuaccgaccucaagcaguucaaacaggacgcuaaguacagccaugggauugauguuaccgaccuguuugcggcccaacccggacugacauccgcugugaucgaggcccucccgagaaauauggucauuacgugccagggcucugaagauauccgcaaacugcuugagagccaggggcggagagacaucaagcugauugauaucacccucuccaaagccgacucucgcaaguucgagaacgcugugugggaucaguuuaaggaccugugucacaugcauacaggcgucgugguugaaaagaagaaacggggaggcaaggaggaaauuaccccucacugcgcccugauggauuguaucauguucgacgcggcugugagcgggggacuugaugccaaaguccucagagugguucugccccgcgacaugguguuccggacauccaccccuaaggucgugcuguga

SEQ ID NO: 19434 - RNA, 1761 nt, Artificial Sequence
  derived and/or modified CDS sequence (opt5) from LASV(AV;Clade V)__CCA30315__SP-HsALB_NP(2-569)
augaagugggugaccuucaucagccugcucuuucuguucuccucugccuacagcagcgccuccaaggaggugaaaucuuuccuguggacccagagccucagacgggaacuguccggcuacugcucuaacaucaaacuucaagucguuaaggacgcucaggcccugcuccacgggcuggauuuuagcgagguguccaaugugcagcgccuuaugagaaagcagcggcgcgacgauucugaccugaaaagacuccgggaucugaaccaagcggucaauaaccugguggaacucaagagcacacagcagaaguccguucugcgcgugggaacgcuuagcucugacgaucugcucacccuggcugccgaccuugagaaacugaaguccaaagucacaagaaccgaacggccccucagcucuggcguguauauggggaaucuguccagccagcaacuggaucagcgcagagcccuccugaaccuuauuggaaugacaaauggcucucaggggucccaggcuggacgggacggcguugugcgcgucugggaugugaagaacgccgagcugcucaauaaccaauucggcaccaugccuagccugacacuugcuugucugaccaaacagggacagguggaccucaaugaugucguucaagcccugacggaccuggggcucaucuacaccgcgaaguauccgaacacauccgaccuggauagacuuacccagucucaucccauucugaauaugaucgacacaaagaaaagcucccucaacauuagcggcuacaauuuuucucugggggccgcugugaaggccggagcuugcaugcuugauggcgggaacaugcuggagaccaucaaaguguccccucagagcauggacggaauccucaagucuauucugaaagucaagcgggcccugggcauguucgugagcgauacgcccggcgaacgcaacccuuaugagaauauccucuacaaaauuugucuguccggggacggauggcccuauaucgcgucuagaacaagcauuguuggccgggccugggaaaacaccguggucgaucuugagacagacgggaagccucagaagaucggauccggcaauagcaacaaaucucugcaauccgcuggguuuagcgccggacucaccuacucucagcugaugacccugaaggaugcuaugcuucagcucgacccgaaugccaaaacauggauggauauugagggcagacccgaagacccuguggagguugcccuguaccagcccaucuccggcugcuauauccacuucuuucgcgaaccuacggaccugaagcaauucaaacaggaugcuaaguacagccaugggauugacaucgcggaucucuuugccgcucagcccggacugaccuccgccgugauugaggcccuuccgcggaacauggucaucacaugucagggcucugaagacauuaagaaacugcucgagagccaagggagaaaggauaucaaacugaucgacauugcucuguccaagaucgauucucgcaaauucgagaaugccgugugggaccaguauaaggaucuuugccacaugcauaccggagucgugguugaaaagaaaaagcggggcgggaaagaggaaauuacaccucacugugcgcucauggacugcaucauguuugaugcugccgugagcggcggacugaacacccugguccucagagccgugcugccccgcgacaugguuuuccggacguccacaccuagagugguccuuuga

SEQ ID NO: 19435 - RNA, 1761 nt, Artificial Sequence
  derived and/or modified CDS sequence (opt5) from LASV(Togo/2016/7082;Clade VI)__AMR44578__SP-HsALB_NP(2-569)
augaagugggugaccuucaucagccugcucuuucuguucuccucugccuacagcagcaacuccaaggaggugaaaucuuuccuguggacccagagccucagacgggaacuguccggcuacugcucuaauaucaaacuucaagucguuaaagacgcccaggcucugcuccacgggcuggauuuuagcgagguguccaacgugcagcgccuuaugagaaagcagaaacgggacgauggagaccugaagcgccucagagaucugaaucaagccgucaacaaucugguggaacucaagucuguucagcagaaaagcauucugcgggugggcacacuuacguccgacgaucugcucacccuggcggcugaccuugagaagcugaaaagcaaggucacacgcaccgaaagaccccucucuuccgggguguauaugggaaaccugagcucucagcaacuggaucagcggcgcgcccuccuguccaugaucggcaugagcgggggaaaucagaacucucagccuaaaggcgacggcguugugagagucugggaugugaagaaugccgaccuucugaacaaucaauucgggacaaugccgucccucacccuggcuugucuuacaaagcagggacagguggaucugaacgacgccguccaagcucucaccgaccugggccugauuuacacggccaaauaucccaauagcuccgaucucgaccggcugucucagagccauccuauccuuaacaugauugauaccaagaaauccagccugaauaucucuggguacaacuuuucccucggagcggccaucaagacaggcgcuugcaugcuggacgggggaaacaugcuugagaccauuaaaguuacaccccagaccauggauggcauccucaagagcauucugaaagugaagcgcucucugggcauguucaucagcgacacgccuggggagagaaaucccuaugaaaacauucuguacaagaucugucucuccggagauggcuggccuuauauugccucucggacagcuaucaucgggcgcgccugggagaauaccguggucgaccuggaaagcgauuccaaaccgcagaagauuggaagcaacggcucuaauaaaucccuucaaagcgcgggguuugcccccggacugacauacucucagcucaugacccugaaggacuccaugcugcagcuugauccuaacgcuaaaaccuggaucgacauugagggcagacccgaggacccuguggaaguugcccucuuccagcccaucagcggcugcuacauucacuuuuuccgggagccgacagaucugaagcaauuuaagcaggacgcuaaauauucccaugggaucgaugugacggaccuguucgccgcccagccuggacucaccucugcugucaucgaagcgcugcccagaaauauggugcuuacaugucagggcagcgaugacauuaagaaacugcucgauucccaagggcgccgggacaucaagcugauugauguuucucugaacaaaaucgacagcagaaaguuugagaaugccgugugggaucaguacaaggaccuuugccacaugcauaccggagucguggucgaaaagaagaaaaagggcgggaaagaggagauuacaccucacugugcucuccuggauugcaucauguucgacgccgccguguccggcggacugaacgcuaccguucuccgcgccgugcugccccgggacauggucuuuagaacgagcucucccaaggugguucuuuga

SEQ ID NO: 19436 - RNA, 1761 nt, Artificial Sequence
  derived and/or modified CDS sequence (opt5) from LASV(KAK-428;Clade n.d. (VII))__ANH09741__SP-HsALB_NP(2-569)
augaagugggugaccuucaucagccugcucuuucuguucuccucugccuacagcagcaacuccaaggaggugaaaucuuuccuguggacccagagccucagacgggaacuguccggcuacugcacaaauaucaaacuucaagucguuaaggacgcccaggcucugcuccacgggcuggauuuuucugaggugagcaacgugcagcgccuuaugagaaagcagaaacgggacgauaaugaccugaagcgccucagagaucugaaccaagccgucaauaaccugguggaacucaaguccguucagcagaaaucugugcugaaggucggaacgcuuaauagcgacgaucugcucacccuggcggcugaccuugagaaacugaaguccaaagugguucggacagaacgcccccucagcucuggcguguauauggggaaccuguccagccagcaacuggaucagagacgggcccuccugaauaugauuggaauggccggcgggucucagggaaaccagccuucccgcgacggcgucgugagagugugggaugucaagaaugcugaccuucugaacaaucaauucggcaccaugccgagccucacacuggccugucuuaccaagcaggggcagguugaucugaacgacguggugcucgcucugacagaccugggacucaucuacaccgccaaauaucccaauucuuccgaucuggaccggcuuagccaaaaccauccuguccugaacaugauugaugugaauaaguccucucucaacaucagcggcuacaauuuuucccugggggcggccguuaaagcuggagccugcaugcuugacggcgggaacaugcuggagacgauuaagaucagcccccagaccguggauggaauccucaaaucuauucugaaggucaaacgcgcucugggcauguucguguccgacacaccuggcgagagaaaucccuaugaaaacauccucuacaagguuugucugagcgggaauggauggccuuauauugccucucggaccagcaucgugggccgcgcgugggagaacacagucguggaucuugaauccaauaagaaccagccgaaagucgggaauaacggaucuaauaagaugcugcagagcuccggcuuugccaccgggcucacguacagccaacugaugacacugagagacucuaugcuucagcucgaucccaccgcuaaaacauggauugacaucgagggacggccugaggaucccguggaacuggcccuguuccagccuuccagcggcugcuacauucacuuuuucagagagcccaccgaccucaagcaguuuaaacaagacgcuaaguauucucauggcaucgauguuaacgaccuguucuccgcccagccggggcuuaccagcgccgugcuggaagcucucccucgcaauaugguccugacaugucagggauccgaugacauccggaagcugcuugauucucaggacagaaaagauauuaagcucaucgacauuagccuguccaaagcggaugcccgcaaguuugagaacgacgugugggaucaauucaaagaccugugccacaugcauacgggcaucguuguggaaaagaagaaaaagggagggaaacaggagaugacaccccacugugcucuccuggauugcauuauguuugacgccgccgucucuggcgggcuuaacgugccuacccugcgggcugugcuccccaccgacaugguuuucagaacaaucaccacgaaggucgugcuguga

SEQ ID NO: 19437 - RNA, 1761 nt, Artificial Sequence; identical to SEQ ID NO: 19431
  derived and/or modified CDS sequence (opt5) from LASV(Pinneo-NIG-1969;Clade I)__AIT17837__SP-HsALB_NP(2-569)

SEQ ID NO: 19438 - RNA, 1761 nt, Artificial Sequence
  derived and/or modified CDS sequence (opt5) from LASV(ISTH0009-NIG-2011;Clade II)__AIT17405__SP-HsALB_NP(2-569)
augaagugggugaccuucaucagccugcucuuucuguucuccucugccuacagcagcguguccaaggaggucaaaucuuuccuguggacccagagccucagacgggaacuguccggcuacugcucuaacaucaaacuucaaguugugaaggacgcccaggcucugcuccacgggcuggauuuuagcgagguguccaauguccagcgccuuaugagaaagcagaaacgggacgauucugaccugaagcgccucagagaucugaaccaagccgugaauaaccugguugaacucaagagcacacagcagaaauccauucugcgggugggaacgcuuaccagcgacgaucugcucacacuggcggcugaccuugagaagcugaaaucuaaggucauccgcaccgaaagaccccucuccagcggcguguauauggggaaucugucuacacagcaacuggagcagcggcgcgcccuccugaacaugauuggaaugguuggcggggcccagggaacccagccuggcagagauggcgugguccgggugugggacgugaaaaauccggaucuucugaacaaucaauucgggacaaugcccucccucacccuggcuugucuuacgaagcagggacaggucgaccugaacgaugccguucucgcucugaccgaccugggccucaucuacacagccaaguauccuaauagcucugaccuggaucgccuuucccaaagccaucccauucugaacaugguggacaucaaaaaguccucucucaauaucagcggguacaacuuuucccugggagcggccgugaaagcuggcgccugcaugcuugaugggggaaauaugcuggagaccauuaaggucacaccucagaccauggacggcauccucaaaagcauucugaaggugaaaagaucucugggcauguucguuuccgauacgcccggggaacggaacccuuaugagaacauccucuacaagauuugucugagcggagacggcuggccguauaucgcuucucgcacaagcauuguggggagagccugggaaaauaccacagucgaucuugaguccgacggaaagccccagaaagugggcucugcggggagcaacaagucccugcagagcgccggauuuccuaccggccucaccuacucucaacugaugacacugaaagauuccaugaugcagcuugaccccagcgcuaagacguggaucgauaucgagggccggccugaagaccccguugagauugcccucuaccagccgaugucugggugcuauauccacuucuuuagagaaccuaccgaccugaaacaguucaagcaagaugcuaaguacucccauggaauugacguggccgaucuguuucccgcccagccuggccucacaagcgcugucaucgaggcgcugccccgcaauauggugcuuaccugucagggguccgacgauauuaaacggcugcucgacucucagggaagacgcgauaucaagcugaucgacauugcccugagcaaagcugauucccggagauucgaaaacgccgucugggaccaaugcaaggaucuuugucacaugcauacaggcgugguuguggagaaaaagaagcgcgggggcaaagaggaaaucacgccccacugcgcccucauggacuguauuauguaugaugcugccgucucuggaggccugaauaucccugugcugcgggcgguucucccgagagacaugguguuucgcaccagcucccccaaggucgugcuguga

SEQ ID NO: 19439 - RNA, 1761 nt, Artificial Sequence
  derived and/or modified CDS sequence (opt5) from LASV(ISTH2010-NIG-2012;Clade II)__AIT17483__SP-HsALB_NP(2-569)
augaagugggugaccuucaucagccugcucuuucuguucuccucugccuacagcagcgccuccaaggaggugaaaucuuuccuguggacccagagccucagacgggaacuguccggcuacugcucuaacaucaaacuucaagucguuaaggacgcucaggcccugcuccacgggcuggauuuuagcgagguguccaaugugcagcgccuuaugagaaagcagaaacgggacgauucugaccugaagcgccucagagaucugaaccaagcggucaauaaccugguggaacucaagagcacacagcagaaauccauucugcggguuggaacgcuuaccagcgacgaucugcucacacuggcugccgaccuugagaagcugaaaucuaaggugauccgcaccgaaagaccccucuccagcggcgucuauauggggaaucugucuacacagcaacuggagcagcggcgcgcccuccugaaccuuauuggaauggugggcggggcucagggaacccagccuggcagagauggcguugugcgggucugggacgugaaaaauccggaucugcucaacaaucaauucgggacaaugcccucccugacccuugccugucugacgaagcagggacagguggaccucaacgaugcuguccuggcccugaccgaccucggccugaucuacacagcgaaguauccuaauagcucugaccuugaucgccugucccaaagccaucccauucucaacaugguugacaccaaaaaguccucucugaauaucagcggguuuaacuucucccuuggagccgcugugaaagccggcgcuugcaugcuggaugggggaaauaugcucgagacaaucaaggugaccccucagacgauggacggcauucugaaaagcauccugaaggucaaaaagucucucggcauguuuguguccgauacacccggggaaagaaacccuuacgagaacauucuguauaagaucugucuuagcggagacggcuggccguacauugccucucggaccagcaucguugggcgcgcgugggaaaauacaaccguggaucuggaguccgacggaaaaccccacaaggucggcaccgccgggucuaacaaaagccuccaguccgcuggauucccuacaggccugacguauagccagcugaugacccuuaaggauucuaugaugcaacucgaccccuccgccaaaacauggauugauaucgagggcagaccugaagaccccguggagaucgcucuguaccagccgaugagcgggugcuacauucacuuuuuccgggaaccuaccgaccugaagcaguuuaagcaggaugccaaauauucucauggaaucgacguugccgaucucuuccccgcucaaccuggccugacauccgcggugauugaggcccuucccagaaauaugguccugaccugucaggggagcgacgauaucaagcgccuccuggacucccagggacggagagauauuaaacugaucgacaucgcucuuucuaaggccgauagccgccgguuugaaaacgccgugugggaccagugcaaagaucucugucauaugcacacgggcgucgugguugagaagaagaaaagagggggcaaggaggaaauuacaccccacugcgcucugauggacuguaucauguacgaugccgcgguguccggaggccugaauauuccuguccuccgcgcugugcugccgcgggacaugguuuucagaaccucuagccccaaagugguccuuuga

SEQ ID NO: 19440 - RNA, 1761 nt, Artificial Sequence
  derived and/or modified CDS sequence (opt5) from LASV(Lassa virus/H.sapiens-wt/NGA/2015/ISTH_0543;Clade II)__AVO03640__SP-HsALB_NP(2-569)
augaagugggugaccuucaucagccugcucuuucuguucuccucugccuacagcagcgccuccaaggaggugaaaucuuuccuguggacccagagccucagacgggaacuguccggcuacugcucuaacaucaaacuucaagucguuaaggacgcucaggcccugcuccacgggcuggauuuuagcgagguguccaaugugcagcgccuuaugagaaagcagaaacgggacgauucugaccugaagcgccucagagaucugaaccaagcggucaauaaccugguggaacucaagagcacacagcagaaauccauucugcggguuggaacgcuuaccagcgacgaucugcucacacuggcugccgaccuugagaagcugaaaucuaaggugauccgcaccgaaagaccccucuccagcggcgucuauauggggaaucugucuacacagcaacuggagcagcggcgcgcccuccugaacaugauuggaauggugggcggggcucagggaacccagccuggcagagauggcguugugcgggucugggacgugaaaaauccggaucuucugaacaaucaauucgggacaaugcccucccucacccuggccugucuuacgaagcagggacagguggaccugaacgaugcuguccucgcccugaccgaccugggccucaucuacacagcgaaguauccuaauagcucugaccuggaucgccuuucccaaagccaucccauucugaacaugguugacaccaaaaaguccucucucaauaucagcggguacaacuuuucccugggagccgcugugaaagccggcgcuugcaugcuugaugggggaaauaugcuggagacaaucaaggugaccccucagacgauggacggcauucucaaaagcauccugaaggucaaaaagucucugggcauguucguguccgauacacccggggaaagaaacccuuaugagaacauucucuacaagaucugucugagcggagacggcuggccguauauugccucucggaccagcaucguugggcgcgcgugggaaaauacaaccguggaucuugaguccgacggaaaaccccagaaggucggcucugccgggagcaacaaaucccugcagagcgcuggauuuccuaccggccucacauacucucaacugaugacgcugaaggauuccaugaugcagcuugaccccagcgccaaaaccuggauugauaucgagggcagaccugaagaccccguggagaucgcucucuaccagccgaugucugggugcuauauucacuucuuucgggaaccuacagaccugaagcaguucaagcaagaugccaaauacucccauggaaucgacguugccgaucuguuucccgcucagccuggccucaccagcgcggugauugaggcccugcccagaaauaugguccuuacaugucagggguccgacgauaucaagcgccugcucgacucucagggacggaaagauauuaagcugaucgacaucgcucugagcaaagccgauuccagacgcuucgaaaacgccgugugggaccaaugcaaggaucuuugucacaugcauaccggcgucgugguugagaagaaaaagagagggggcaaagaggaaauuacgccccacugcgcucucauggacuguaucauguaugaugccgcggugucuggaggccugaauauuccuguccugcgggcugugcucccgcgcgacaugguuuuucggacaagcucccccaaggugguccuguga

SEQ ID NO: 19441 - RNA, 1761 nt, Artificial Sequence
  derived and/or modified CDS sequence (opt5) from LASV(Lassa virus/H.sapiens-wt/NGA/2016/ISTH_0009;Clade II)__AVO03572__SP-HsALB_NP(2-569)
augaagugggugaccuucaucagccugcucuuucuguucuccucugccuacagcagcgccuccaaggaggugaaaucuuuccuguggacccagagccucagacgggaacuguccggcuacugcucuaacaucaaacuucaagucguuaaggacgcucaggcccugcuccacgggcuggauuuuagcgagguguccaaugugcagcgccuuaugagaaagcagaaacgggacgauucugaccugaagcgccucagagaucugaaccaagcggucaauaaccugguggaacucaagagcacacagcagaaauccauucugcggguuggaacgcuuaccagcgacgaucugcucacacuggcugccgaccuugagaagcugaaaucuaaggugauccgcaccgaaagaccccucuccagcggcgucuauauggggaaucugucuacacagcaacuggagcagcggcgcgcccuccugaacaugauuggaauggugggcggggcucagggaacccagccuggcagagauggcguugugcgggucugggacgugaaaaauccggaucuucugaacaaucaauucgggacaaugcccucccucacccuggccugucuuacgaagcagggacagguggaccugaacgaugcuguccucgcccugaccgaccugggccucaucuacacagcgaaguauccuaauagcucugaccuggaucgccuuucccaaagccaucccauucugaacaugguugacaccaaaaaguccucucucaauaucagcggguacaacuuuucccugggagccgcugugaaagccggcgcuugcaugcuugaugggggaaauaugcuggagacaaucaaggugaccccucagacgauggacggcauucucaaaagcauccugaaggucaaaaagucucugggcauguucguguccgauacacccggggaaagaaacccuuaugagaacauucucuacaagaucugucugagcggagacggcuggccguauauugccucucggaccagcaucguugggcgcgcgugggaaaauacaaccguggaucuugaguccgacggaaaaccccagaaggucggcucugccgggagcaacaaaucccugcagagcgcuggauuuccuaccggccucacauacucucaacugaugacgcugaaggauuccaugaugcagcuugaccccagcgccaaaaccuggauugauaucgagggcagaccugaagaccccguggagaucgcucucuaccagccgaugucugggugcuauauucacuucuuucgggaaccuacagaccugaagcaguucaagcaagaugccaaauacucccauggaaucgacguugccgaucuguuucccgcucagccuggccucaccagcgcggugauugaggcccugcccagaaauaugguccuuacaugucagggguccgacgauaucaagcgccugcucgacucucagggacggagagauauuaaacugaucgacaucgcucugagcaaggccgauucccgccgguucgaaaacgccgugugggaccaaugcaaagaucuuugucacaugcauaccggcgucgugguugagaagaagaaaagagggggcaaggaggaaauuacgccccacugcgcucucauggacuguaucauguaugaugccgcggugucuggaggccugaauauuccuguccugcgcgcugugcucccgcgggacaugguuuuuagaacaagcucccccaaagugguccuguga

SEQ ID NO: 19442 - RNA, 1761 nt, Artificial Sequence
  derived and/or modified CDS sequence (opt5) from LASV(Lassa virus/H.sapiens-wt/NGA/2016/ISTH_0017;Clade II)__AVO03568__SP-HsALB_NP(2-569)
augaagugggugaccuucaucagccugcucuuucuguucuccucugccuacagcagcgccuccaaggaggugaaaucuuuccuguggacccagagccucagacgggaacuguccggcuacugcucuagcaucaaacuucaagucguuaaggacgcucaggcccugcuccacgggcuggauuuuuccgaggugucuaacgugcagcgccuuaugagaaagcagaaacgggacgauagcgaccugaagcgccucagagaucugaaucaagcggucaacaaucugguggaacucaaguccacacagcagaaaagcauucugcggguuggaacgcuuaccucugacgaucugcucacacuggcugccgaccuugagaagcugaaauccaaggugauccgcaccgaaagaccccucagcucuggcgucuauauggggaaccuguccacacagcaacuggagcagcggcgcgcccuccugaauaugauuggaauggcuggcggggcccagggaacccagccuggcagagauggcgugguucgggugugggacgucaaaaacccggaucuucugaauaaccaauucgggacaaugcccagccucacccuggcuugucuuacgaagcagggacagguggaccugaaugaugccgugcucgcgcugaccgaccugggccucaucuacacagccaaguauccuaacucuuccgaccuggaucgccuuagccaaucccaucccauucugaauauggucgacaccaaaaagucuagccucaacaucuccggguacaauuuuagccugggagcugccguuaaagcuggcgccugcaugcuugaugggggaaacaugcuggagacaaucaaggugaccccucagacgauggacggcauucucaaaucuauccugaaggugaaaagaucccugggcauguucgucagcgaugcgcccggggaacggaauccuuaugagaacauucucuacaagaucugucugucuggagacggcuggccguauauugccagccgcacauccaucguggggagagcuugggaaaacaccacaguugaucuugagucugacggaaagccccagaaagugggcgccaccgggagcaauaagucccugcagagcgcuggauuuccuaccggccucacauacucucaacugaugacgcugaaagauuccaugaugcagcuugaccccagcgccaagaccuggauugauaucgagggccggccugaagaccccgucgagguggcccucuaccagccgguuucugggugcuauauccacuucuuuagagaaccuacagaccugaaacaguucaagcaagaugcuaaguacucccauggaauugacguggcggaucuguuucccgcccagccuggccucaccagcgcugucaucgaggcccugccccgcaacauggugcuuacaugucagggguccgacgauauuaaaaagcugcucgacucucagggacggaaagauaucaagcugauugacaucgcccugagcaaagcugauuccagacgcuucgaaaaugccgucugggaccaaugcaaggaucuuugucacaugcauaccggcgugguuguggagaagaaaaagagagggggcaaagaggaaaucacgccccacugcgcgcucauggacuguauuauguaugaugcugccgucucuggaggccugaacaucccugugcugcgggccguucucccgcgcgacaugguguuucggacaagcucccccaaggucgugcuguga

SEQ ID NO: 19443 - RNA, 1761 nt, Artificial Sequence
  derived and/or modified CDS sequence (opt5) from LASV(Lassa virus/H.sapiens-wt/NGA/2018/ISTH_0959;Clade II)__AVV65100__SP-HsALB_NP(2-569)
augaagugggugaccuucaucagccugcucuuucuguucuccucugccuacagcagcgccuccaaggaggugaaaucuuuccuguggacccagagccucagacgggaacuguccggcuacugcucuaacaucaaacuucaagucguuaaggacgcucaggcccugcuccacgggcuggauuuuagcgagguguccaaugugcagcgccuuaugagaaagcagaaacgggacgauucugaccugaagcgccucagagaucugaaccaagcggucaauaaccugguggaacucaagagcacccagcagaaauccauucugcggguuggaacgcuuaccagcgacgaucugcucacacuggcugccgaccuugagaagcugaaaucuaaggugauccgcaccgaaagaccccucuccagcggcgucuauauggggaaucugucuacacagcaacuggagcagcggcgcgcccuccugaaccuuauuggaauggugggcggggcucagggaacccagccuggcagagauggcguugugcgggucugggacgugaaaaauccggaucugcucaacaaucaauucgggacaaugcccucccugacccuugccugucugacgaagcagggacagguggaccucaacgaugucguucuggcucugaccgaccucggccugaucuacacagccaaguauccuaauagcucugaccuugaucgccugucccaaagccaucccauucucaacaugguggacaccaaaaaguccucucugaauaucagcggguuuaacuucucccuuggagcggccgugaaagcuggcgccugcaugcuggaugggggaaauaugcucgagacaaucaaggucaccccucagacgauggacggcauucugaaaagcauccugaaggugaaaaagucucucggcauguuuguuuccgauacacccggggaaagaaacccuuacgagaacauucuguauaagaucugucuuagcggagacggcuggccguacauugcuucucggaccagcaucguggggcgcgccugggaaaauacaaccgucgaucuggaguccgacggaaaaccccacaaggugggcaccgcggggucuaacaaaagccuccaguccgccggauucccuacaggccugacguauagccagcugaugacccuuaaggauucuaugaugcaacucgaccccuccgcuaaaacauggauugauaucgagggcagaccugaagaccccguugagaucgcccuguaccagccgaugagcgggugcuacauucacuuuuuccgggaaccuaccgaccugaagcaguuuaagcaggaugcuaaauauucucauggaaucgacguggccgaucucuuccccgcccaaccuggccugacauccgcugucauugaggcgcuucccagaaauauggugcugaccugucaggggagcgacgauaucaagcgccuccuggacucccagggacggaaagauauuaagcugaucgacaucgcccuuucuaaaacggauagcagacgcuuugaaaacgcugucugggaccagugcaaggaucucugucauaugcacacaggcgugguuguggagaagaaaaagagagggggcaaagaggaaauuacaccccacugcgcccugauggacuguaucauguacgaugccgcugucuccggaggccugaauauuccugugcuccgggccguucugccgcgcgacaugguguuccggaccucuagccccaaggucgugcuuuga

SEQ ID NO: 19444 - RNA, 1761 nt, Artificial Sequence
  derived and/or modified CDS sequence (opt5) from LASV(LASV003-NIG-2008;Clade II)__AIT17581__SP-HsALB_NP(2-569)
augaagugggugaccuucaucagccugcucuuucuguucuccucugccuacagcagcgccuccaaggaggugaaaucuuuccuguggacccagagccucagacgggaacuguccggcuacugcucuagcaucaaacuucaagucguuaaggacgcucaggcccugcuccacgggcuggauuuuuccgaggugucuaacgugcagcgccuuaugagaaagcagaaacgggacgauagcgaccugaagcgccucagagaucugaaucaagcggucaacaaucugguggaacucaaguccacccagcagaaaagcguucugcgggugggaacgcuuaccucugacgaucugcucacacuggcugccgaccuugagaagcugaaauccaaggucauucgcaccgaaagaccccucagcucuggcguguauauggggaaccuguccgcccagcaacuggagcagcggcgcacacuccugaauaugaucggaaugguuggcggggcucagggaacccagccuggcagagauggcgugguccgggugugggacgugaaaaacccggaucuucugaauaaccaauucgggacaaugcccagccucacccuggccugucuuacgaagcagggacaggucgaccugaaugauguugugcucgcucugaccgaccugggccucauuuacacagccaaguauccuaacucuuccgaccuggaucgccuuagccaaucccaucccauccugucuaugguggacaccaaaaagagcucccucaauauuagcggguacaacuuuucucugggagcggccgucaaagcuggcgccugcaugcuugaugggggaaauaugcuggagacaaucaaggugaccccucagacgauggacggcauccucaaauccauucugaagguuaaaaagagccugggcauguucgugucugauacacccggggaaagaaacccuuaugagaauauccucuacaagauuugucugagcggagacggcuggccguauaucgcuucccggaccucuauugucgggcgcgccugggaaaacacaaccguggaucuugagagcgacggaaaaccccagaagguuggcaccgcgggguccaacaaaagccugcagucugccggauuuccuacaggccucacguacucccaacugaugacccugaaggauagcaugaugcagcuugaccccucugcuaaaacauggaucgauauugagggcagaccugaagaccccguggagaucgcccucuaccagccgauguccgggugcuauauccacuucuuucgggaaccuaccgaccugaagcaguucaagcaagaugcuaaauacagccauggaauugacgucacagaucuguuucccgcccagccuggccucaccuccgccgugaucgaggcucugcccagaaauaugguccuuacgugucaggggucugacgauauuaagcgccugcucgacagccagggacggagagauaucaaacugauugacaucgcgcuguccaaggccgauucucgccgguucgaaaacgcugugugggaccaaugcaaagaucuuugucacaugcauacaggcguuguggucgagaagaagaaaagagggggcaaggaggaaaucacaccccacugcgcccucauggacuguauuauguaugaugccgcugugagcggaggccugaauaucccuguucugcgcgccgugcucccgcgggacauggucuuuagaaccuccagccccaaaguggugcuguga

SEQ ID NO: 19445 - RNA, 1761 nt, Artificial Sequence
  derived and/or modified CDS sequence (opt5) from LASV(LASV035-NIG-2009;Clade II)__AIT17589__SP-HsALB_NP(2-569)
augaagugggugaccuucaucagccugcucuuucuguucuccucugccuacagcagcgccuccaaggaggugaaaucuuuccuguggacccagagccucagacgggaacuguccggcuacugcucuagcaucaaacuucaagucguuaaagacgcucaggcccugcuccacgggcuggauuuuuccgaggugucuaacgugcagcgccuuaugagaaagcagaaacgggacgauagcgaccugaagcgccucagagaucugaaucaagcggucaacaaucugguggaacucaaguccacacagcagaaaagcauucugcggguuggaacgcuuaccucugacgaucugcucacacuggcugccgaccuugagaagcugaaauccaaggugauccgcaccgaaagaccccucagcucuggcgucuauauggggaaccuguccgcccagcaacuggagcagcggcgcgcucuccugaauaugauuggaauggugggcggggcccagggaacacagccuggcagagauggcguugugcgggucugggacgugaaaaacccggaucuucugaauaaccaauucgggaccaugcccagccucacacuggcuugucuuaccaagcagggacagguggaccugaaugaugccguccucgcgcugacggaccugggccucaucuacaccgccaaguauccuaacucuuccgaccuggaucgccuuagccaaucccaucccauucugaauaugguugacacaaagaagucuagccucaacaucuccggguacaauuuuagccugggagcugccgugaaagcuggcgccugcaugcuugaugggggaaacaugcuggagaccaucaaggugacaccucagaccauggacggcauucucaaaucuauccugaaggucaaaagaucccugggcauguucgugagcgauacgcccggggaacggaauccuuaugagaacauucucuacaagaucugucugucuggagacggcuggccguauauugcgagccgcacauccaucguugggagagccugggaaaacaccacaguggaucuugagucugacggaaagccccagaaagucggcaccaccgggagcaauaagucccugcagagcgcuggauuuccuacaggccucacguacucucaacugaugacccugaaagauuccaugaugcagcuugaccccagcgccaagacauggauugauaucgagggccggccugaagaccccguggagaucgcucucuaccagccgaugucugggugcuauauucacuucuuuagagaaccuaccgaccugaaacaguucaagcaagaugccaaguacucccauggaaucgacguugccgaucuguuucccgcucagccuggccucacaagcgcggugauugaggcccugccccgcaacaugguccuuaccugucagggguccgacgauaucaaaaagcugcucgacucucagggacggagagauauuaaacugaucgacaucgcucugagcaaggccgauucccgcaaauucgaaaaugccgugugggaccaaugcaaggaucuuugucacaugcauacgggcgucgugguugagaagaaaaagagagggggcaaagaggaaauuacaccccacugcgcucucauggacuguaucauguaugaugccgcggugucuggaggccugaacauuccuguccugcgggcugugcucccgcgcgacaugguuuuucggaccagcucccccaaggugguccuguga

SEQ ID NO: 19446 - RNA, 1761 nt, Artificial Sequence
  derived and/or modified CDS sequence (opt5) from LASV(LASV1000-NIG-2009;Clade II)__AIT17783__SP-HsALB_NP(2-569)
augaagugggugaccuucaucagccugcucuuucuguucuccucugccuacagcagcgccuccaaggaggugaaaucuuuccuguggacccagagccucagacgggaacuguccggcuacugcucuaacaucaaacuucaagucguuaaggacgcucaggcccugcuccacgggcuggauuuuagcgagguguccaaugugcagcgccuuaugagaaagcagaaacgggacgauucugaccugaagcgccucagagaucugaaccaagcggucaauaaccugguggaacucaagagcacacagcagaaauccauucugcggguuggaacgcuuaccagcgacgaucugcucacacuggcugccgaccuugagaagcugaaaucuaaggugauccgcaccgaaagaccccucuccagcggcgucuauauggggaaucugucuacacagcaacuggagcagcggcgcgcccuccugaacaugauuggaauggugggcggggcucagggaacccagccuggcagagauggcguugugcgggucugggacgugaaaaauccggaucuucugaacaaucaauucgggacaaugcccucccucacccuggccugucuuacgaagcagggacagguggaccugaacgaugucguucucgcucugaccgaccugggccucaucuacacagccaaguauccuaauagcucugaccuggaucgccuuucccaaagccaucccauucugaacaugguggacaccaaaaaguccucucucaauaucagcggguacaacuuuucccugggagcggccgugaaagcuggcgccugcaugcuugaugggggaaauaugcuggagacaaucaaggucaccccucagacgauggacggcauucucaaaagcauccugaaggugaaaaagucucugggcauguucguuuccgauacacccggggaaagaaacccuuaugagaacauucucuacaagaucugucugagcggagacggcuggccguauauugcuucucggaccagcaucguggggcgcgccugggaaaauacaaccgucgaucuugaguccgacggaaaaccccagaaggugggcaccgcggggucuaacaaaagccugcaguccgccggauuuccuacaggccucacguacagccaacugaugacccugaaggauucuaugaugcagcuugaccccuccgcuaaaacauggauugauaucgagggcagaccugaagaccccguugagaucgcccucuaccagccggugagcgggugcuauauucacuucuuucgggaaccuaccgaccugaagcaguucaagcaagaugcuaaauacucucauggaaucgacgucgccgaucuguuucccgcccagccuggccucacauccgcugugauugaggcgcugcccagaaauaugguccuuaccugucaggggagcgacgauaucaagcgccugcucgacucccagggacggagagauauuaaacugaucgacaucgcccugucuaaggcugauagccgccgguucgaaaacgccgugugggaccaaugcaaagaucuuugucacaugcauacgggcguuguggucgagaagaagaaaagagggggcaaggaggaaauuacaccccacugcgcccucauggacuguaucauguaugaugcugccguguccggaggccugaauauuccuguucugcgcgcggugcucccgcgggacauggucuuuagaaccucuagccccaaaguggugcuguga

SEQ ID NO: 19447 - RNA, 1761 nt, Artificial Sequence
  derived and/or modified CDS sequence (opt5) from LASV(LASV221-NIG-2010;Clade II)__AIT17625__SP-HsALB_NP(2-569)
augaagugggugaccuucaucagccugcucuuucuguucuccucugccuacagcagcgccuccaaggaggugaaaucuuuccuguggacccagagccucagacgggaacuguccggcuacugcucuagcaucaaacuucaagucguuaaggacgcucaggcccugcuccacgggcuggauuuuuccgaggugucuaacgugcagcgccuuaugagaaagcagcggcgcgacgauagcgaccugaaaagacuccgggaucugaaucaagcggucaacaaucugguggaacucaaguccacacagcaaaagagcauucugcgcguuggaacgcuuaccucugacgaucugcucacacuggcugccgaccuugagaaacugaaguccaaagugaucagaaccgaacggccccucagcucuggcgucuauauggggaaccuguccacacagcagcuggagcagcgcagagcccuccugaauaugauuggaauggugggcggggcucagggaacccagccuggccgggauggcguugugcgcgucugggacgugaagaacccggaucuucugaauaaccaauucgggacaaugcccagccucacccuggccugucuuacgaaacagggacagguggaccugaaugaugcuguccucgcccugaccgaccugggccucaucuacacagcgaaguauccuaacucuuccgaccuggauagacuuagccaaucccaucccauucugaauaugguugacaccaagaaaucuagccucaacaucuccggguacaauuuuagccugggagccgcugugaaggccggcgcuugcaugcuugaugggggaaacaugcuggagacaaucaaagugaccccucagacggucgacggcauucucaagucuauccugaaagugaagcggucccugggcauguucguuagcgauacacccggggaacgcaauccuuaugagaacauucucuacaaaaucugucugucuggagacggcuggccguauauugccagcagaaccuccaucguggggcgggcgugggaaaacacaaccgucgaucuugagucugacggaaagccccagaaggugggcaccgccgggagcaauaaaucccugcagagcgcuggauuuccuacaggccucacguacucucaacugaugacccugaaggauuccaugaugcagcuugaccccagcgccaaaacauggauugauaucgagggcagaccugaagaccccguugagaucgcucucuaccagccgaugucugggugcuauauucacuucuuucgcgaaccuaccgaccugaagcaguucaaacaagaugccaaguacucccauggaaucgacguggccgaucuguuucccgcucagccuggccucacaagcgcggucauugaggcccugccccggaacauggugcuuaccugucagggguccgacgauaucaagagacugcucgacucucagggacgccgggauauuaaacugaucgacaucgcucugagcaaggccgauuccagaaaauucgaaaaugccgucugggaccaaugcaaggaucuuugucacaugcauacgggcgugguuguggagaaaaagaagcgcgggggcaaagaggaaauuacaccccacugcgcucucauggacuguaucauguaugaugccgcggucucuggaggccugaacauuccugugcugcgggcuguucucccgagagacaugguguuucgcaccagcucccccaaggucgugcuguga

SEQ ID NO: 19448 - RNA, 1761 nt, Artificial Sequence
  derived and/or modified CDS sequence (opt5) from LASV(LASV237-NIG-2010;Clade II)__AIT17639__SP-HsALB_NP(2-569)
augaagugggugaccuucaucagccugcucuuucuguucuccucugccuacagcagcgccuccaaggaggugaaaucuuuccuguggacccagagccucagacgggaacuguccggcuacugcucuaacaucaaacuucaagucguuaaggacgcucaggcccugcuccacgggcuggauuuuagcgagguguccaaugugcagcgccuuaugagaaagcagaaacgggacgauucugaccugaagcgccucagagaucugaaccaagcggucaauaaccugguggaacucaagagcacacagcagaaauccauucugcggguuggaacgcuuaccagcgacgaucugcucacacuggcugccgaccuugagaagcugaaaucuaaggugauccgcaccgaaagaccccucuccagcggcgucuauauggggaaucugucuacacagcaacuggagcagcggcgcgcccuccugaacaugauuggaauggugggcggggcucagggaacccagccuggcagagauggcguugugcgggucugggacgugaaaaauccggaucuucugaacaaucaauucgggacaaugcccucccucacccuggccugucuuacgaagcagggacagguggaccugaacgaugcuguccucgcccugaccgaccugggccucaucuacacagcgaaguauccuaauagcucugaccuggaucgccuuucccaaagccaucccauucugaacaugguugacaucaaaaaguccucucucaauaucagcggguacaacuuuucccugggagccgcugugaaagccggcgcuugcaugcuugaugggggaaauaugcuggagaccauuaaggugacaccucagaccauggacggcauccucaaaagcauucugaaggucaaaagaucucugggcauguucguguccgauacgcccggggaacggaacccuuaugagaacauccucuacaagauuugucugagcggagacggcuggccguauaucgccucucgcacaagcauuguugggagagcgugggaaaauaccacaguggaucuugaguccgacggaaagccccagaaagucggcucugccgggagcaacaagucccugcagagcgcuggauuuccuaccggccucaccuacucucaacugaugacacugaaagauuccaugaugcagcuugaccccagcgccaagacguggaucgauaucgagggccggccugaagaccccguggagauugcucucuaccagccgaugucugggugcuauauccacuucuuuagagaaccuaccgaccugaaacaguucaagcaagaugccaaguacucccauggaauugacguugccgaucuguuucccgcucagccuggccucacaagcgcggugaucgaggcccugccccgcaauaugguccuuaccugucagggguccgacgauauuaaacggcugcucgacucucagggaagacgcgauaucaagcugaucgacauugcucugagcaaagccgauucccggagauucgaaaacgccgugugggaccaaugcaaggaucuuugucacaugcauacaggcgucgugguugagaaaaagaagcgcgggggcaaagaggaaaucacgccccacugcgcucucauggacuguauuauguaugaugccgcggugucuggaggccugaauaucccuguccugcgggcugugcucccgagagacaugguuuuucgcaccagcucccccaaggugguccuguga

SEQ ID NO: 19449 - RNA, 1761 nt, Artificial Sequence
  derived and/or modified CDS sequence (opt5) from LASV(LASV253-NIG-2011;Clade II)__AIT17671__SP-HsALB_NP(2-569)
augaagugggugaccuucaucagccugcucuuucuguucuccucugccuacagcagcgccuccaaggaggugaaaucuuuccuguggacccagagccucagacgggaacuguccggcuacugcucuagcaucaaacuucaagucguuaaggacgcucaggcccugcuccacgggcuggauuuuuccgaggugucuaacgugcagcgccuuaugagaaagcagaaacgggacgauagcgaccugaagcgccucagagaucugaaucaagcggucaacaaucugguggaacucaaguccacccagcagaaaagcguucugcgggugggaacgcuuaccucugacgaucugcucacacuggcugccgaccuugagaagcugaaauccaaggucauucgcaccgaaagaccccucagcucuggcguguauauggggaaccuguccacacagcaacuggagcagcggcgcgcccuccugaauaugaucggaaugguuggcggggcucagggaacccagccuggcagagauggcgugguccgggugugggacgugaaaaacccggaucuucugaauaaccaauucgggacaaugcccagccucacccuggccugucuuacgaagcagggacaggucgaccugaaugauguugugcucgcucugaccgaccugggccucauuuacacagccaaguauccuaacucuuccgaccuggaucgccuuagccaaucccaucccauccugaauaugguggacaccaaaaagucuagccucaacauuuccggguacaauuuuagccugggagcggccgucaaagcuggcgccugcaugcuugaugggggaaacaugcuggagacaaucaaggugaccccucagacgauggacggcauccucaaaucuauucugaagguuaaaaagucccugggcauguucgugagcgauacacccggggaaagaaauccuuaugagaacauccucuacaagauuugucugucuggagacggcuggccguauaucgcuagccggaccuccauugucgggcgcgccugggaaaacacaaccguggaucuugagucugacggaaaaccccagaagguuggcaccgcggggagcaauaaaucccugcagagcgccggauuuccuacaggccucacguacucucaacugaugacccugaaggauuccaugaugcagcuugaccccagcgcuaaaacauggaucgauauugagggcagaccugaagaccccguggagaucgcccucuaccagccgaugucugggugcuauauccacuucuuucgggaaccuaccgaccugaagcaguucaagcaagaugcuaaauacucccauggaauugacgucacagaucuguuucccgcccagccuggccucaccagcgccgugaucgaggcucugcccagaaacaugguccuuacgugucagggguccgacgauauuaagcgccugcucgacucucagggacggagagauaucaaacugauugacaucgcgcugagcaaggccgauucccgccgguucgaaaaugcugugugggaccaaugcaaagaucuuugucacaugcauacaggcguuguggucgagaagaagaaaagagggggcaaggaggaaaucacaccccacugcgcccucauggacuguauuauguaugaugccgcugugucuggaggccugaacaucccuguucugcgcgccgugcucccgcgggacauggucuuuagaaccagcucccccaaaguggugcuguga

SEQ ID NO: 19450 - RNA, 1761 nt, Artificial Sequence
  derived and/or modified CDS sequence (opt5) from LASV(LASV254-NIG-2011;Clade II)__AIT17675__SP-HsALB_NP(2-569)
augaagugggugaccuucaucagccugcucuuucuguucuccucugccuacagcagcgccuccaaggaggugaaaucuuuccuguggacccagagccucagacgggaacuguccggcuacugcucuagcaucaaacuucaagucguuaaggacgcucaggcccugcuccacgggcuggauuuuuccgaggugucuaacgugcagcgccuuaugagaaagcagaaacgggacgauagcgaccugaagcgccucagagaucugaaucaagcggucaacaaucugguggaacucaaguccacacagcagaaaagcguucugcgggugggaacgcuuaccucugacgaucugcucacacuggcugccgaccuugagaagcugaaauccaaggucauucgcaccgaaagaccccucagcucuggcguguauauggggaaccuguccacacagcaacuggagcagcggcgcgcccuccugaauaugaucggaaugguuggcggggcucagggaacccagccuggcagagauggcgugguccgggugugggacgugaaaaacccggaucuucugaauaaccaauucgggacaaugcccagccucacccuggccugucuuacgaagcagggacaggucgaccugaaugaugcuguucucgcccugaccgaccugggccucauuuacacagcgaaguauccuaacucuuccgaccuggaucgccuuagccaaucccaucccauccugaauaugguggacaccaaaaagucuagccucaacauuuccggguacaauuuuagccugggagccgcugugaaagccggcgcuugcaugcuugaugggggaaacaugcuggagacaaucaaggucaccccucagacgauggacggcauccucaaaucuauucugaaggugaaaaagucccugggcauguucguuagcgauacacccggggaaagaaauccuuaugagaacauccucuacaagauuugucugucuggagacggcuggccguauaucgccagccggaccuccauuguggggcgcgcgugggaaaacacaaucgucgaucuugagucugacggaaaaccccagaaggugggcaccgccgggagcaauaaaucccugcagagcgcuggauuuccuaccggccucacauacucucaacugaugacgcugaaggauuccaugaugcagcuugaccccagcgccaaaaccuggauugauaucgagggcagaccugaagaccccguugagaucgcucucuaccagccgaugucugggugcuauauucacuucuuucgggaaccuacagaccugaagcaguucaagcaagaugccaaauacucccauggaaucgacguggccgaucuguuucccgcucagccuggccucaccagcgcggucauugaggcccugcccagaaacauggugcuuacaugucagggguccgacgauaucaagcgccugcucgacucucagggacggagagauauuaaacugaucgacaucgcucugagcaaggccgauucccgccgguucgaaaaugccgucugggaccaaugcaaagaucuuugucacaugcauaccggcgugguuguggagaagaagaaaagagggggcaaggaggaaauuacgccccacugcgcucucauggacuguaucauguaugaugccgcggucucuggaggccugaacauuccugugcugcgcgcuguucucccgcgggacaugguguuuagaacaagcucccccaaagucgugcuguga

SEQ ID NO: 19451 - RNA, 1761 nt, Artificial Sequence
  derived and/or modified CDS sequence (opt5) from LASV(Nig08-04;Clade II)__ADU56611__SP-HsALB_NP(2-569)
augaagugggugaccuucaucagccugcucuuucuguucuccucugccuacagcagcgccuccaaggaggugaaaucuuuccuguggacccagagccucagacgggaacuguccggcuacugcucuaacaucaaacuucaagucguuaaggacgcucaggcccugcuccacgggcuggauuuuagcgagguguccaaugugcagcgccuuaugagaaagcagaaacgggacgauggagaccugaagcgccucagagaucugaaccaagcggucaauaaccugguggaacucaagucuacccagcagaaaagcguucugcgggugggcacgcuuaccuccgacgaucugcucacacuggcugccgaccuugagaagcugaaaagcaaggucauucgcaccgaaagaccccucucuuccgggguguauaugggaaaucugagcacacagcaacuggagcagcggaaagcccuccugucuaugaucggcaugguugggggagcucagggcacccagccuggccgcgaugggguggucagagugugggacgugaagaacccggaucuucugaauaaccaauucggaacaaugcccucccucacccuggccugucuuacgaagcagggccaggucgaccugaaugaugcuguucucgcccugaccgaccuggggcucauuuacacagcgaaauauccuaacagcucugaccuggaucggcuuucccaaagccaucccauccugaauaugguggacaccaagaaauccucucucaacauuagcggauacaauuuuucccugggcgccgcugugaaggccggggcuugcaugcuugauggaggcaacaugcuggagacaaucaaagucaccccucagacgauggacggcauccucaagagcauucugaaagugaagcgcucucuggggauguucguuuccgauacacccggagaaagaaauccuuaugagaacauccucuacaagauuugucugagcggcgacggguggccguauaucgccucucggaccagcauugugggacgcgcgugggaaaacacaaccgucgaucuugaguccgacggcaaaccccagaagguggggaccgccggaucuaauaaaagccugcaguccgcuggcuuuccuacaggccucacguacagccaacugaugacccugaaggauucuaugaugcagcuugaccccuccgccaaaacauggaucgauauugaggggagaccugaagaccccguugagaucgcucucuaccagccgaugagcggaugcuauauccacuucuuucgggaaccuaccgaccugaagcaguucaagcaagaugccaaauacucucauggcauugacgugacagaucuguuuuccgcccagcccgggcucaccagcgcugucaucgaggcgcugccuagaaacauggugcuuacgugucagggauccgacgauauuaagaaacugcucgacucucagggccgccgggauaucaagcugauugacaucagccugaauaaagccgauuccagacgcuucgaaaacgcugucugggaccaaugcaaggaucuuugucacaugcauacaggggugguuguggagaagaaaaagcggggcggaaaagaggaaaucacaccccacugcgcccucauggacuguauuauguuugaugccgcugucucuggcgggcugaauauccccauucugagagccgugcucccucgcgacaugguuuuccggaccagcuccccgaaggugguccuguga

SEQ ID NO: 19452 - RNA, 1764 nt, Artificial Sequence
  derived and/or modified CDS sequence (opt5) from LASV(GA391;Clade III)__AAA46284__SP-HsALB_NP(2-570)
augaagugggugaccuucaucagccugcucuuucuguucuccucugccuacagcagcgccuccaaggaggugagaucuugccuguggacccagagccuccggcgcgaacuguccggcuacuguucuaacaucaaacuucaagucguuaaggacgcucaggcccugcuccacgggcuggauuucagcgagguguccaaugugcagagacuuaugcggaaacagaagcgcgacgauggagaccugaaaagacuccgggaucugaaccaagcggucaauaaccugguggaacucaagucuacacagcagaaaagcguucugcgcgugggcacgcuuuccagcgacgaucugcucauucuggcugccgaccuugagaaacugaagucuaaagucaccagaacagaacggccccucuccagcgggguguauaugggaaaucugucuucccagcaacuggaucagcgcagagcccuccugaacaugaucggcaugaccgggguuagcggaggcggcaagggggcuucuaauggaauugugcgggucugggacgugaaaaacgccgagcuucugaauaaccaguuuggcacaaugccuucccucacccuggcuugccuuacaaagcaggggcaaguggaucugaaugacgccguccaggcgcucaccgaucugggacugaucuacacggccaaguauccgaacagcuccgaccucgaccgccugucucagagccaucccauucuuaauaugaucgauaccaaaaaguccagccugaacaucucuggcuacaauuucucccucggggcugccguuaaagcuggagccuguaugcuggacggcggcaacaugcuugagacaauuaaggugagcccucaaaccauggaugggauccugaaaucuauucucaaggugaaaaagagccugggaauguuugucuccgacacacccggcgaaagaaacccuuaugagaauauccuguacaagauuugccucucuggggauggauggagcuauaucgcgucccggaccagcauugugggccgcgccugggaaaacacgguuguggaccuggagcaggauaauaaaccccagaagaucgggaacggaggcucuaauaaaucccuucagagcgcuggcuucgccgcugggcugaucuacucucaacucaugacacugaaggacuuuaaauguuucaaccugauuccuaaugccaagaccuggauggauaucgagggaagaccggaagaccccgucgagauugcccuuuaccagccuuccagcggcugcuaugugcacuuuuuccgggaacccacagaucucaagcaguuuaaacaggacgcuaaguacucccaugggagagacguuaccgaucuguucgcggcccaaccuggacugaccucugcugugaucgaggcccucccccgcaacauggucauuacaugucagggcagcgaagacauccggaaacugcuugagucccaggggagacgcgauaucaagcugauugacaucacgcucucuaaagccgauagccggaaguuugagaaugcugugugggaccaguucaaggaucugugccacaugcauaccggcgucgugguugaaaagaagaaaagaggaggcaaggaggaaauuacaccgcacugugcccugauggacugcaucauguuugaugcggcuguguccgggggacuugacgccaaaguccuccgcgugguucugccucgggauaugguguucagaaccagcacacccaaggucgugcuguga

SEQ ID NO: 19453 - RNA, 1761 nt, Artificial Sequence
  derived and/or modified CDS sequence (opt5) from LASV(Nig08-A19;Clade III)__ADU56619__SP-HsALB_NP(2-569)
augaagugggugaccuucaucagccugcucuuucuguucuccucugccuacagcagcgccuccaaggaggugaaaucuuuccuguggacccagagccucagacgggaacuguccggcuacugcucuaacaucaaacuucaagucguuaaggacgcucaggcccugcuccacgggcuggauuuuagcgagguguccaaugugcagcgccuuaugagaaagcagaaacgggacgauggagaccugaagcgccucagagaucugaaccaagcggucaauaaccugguggaacucaagucuacacagcagaaaagcguucugcgggugggcacgcuuuccagcgacgaucugcucguccuggcugccgaccuugagaagcugaaaucuaaggugguucgcaccgaaagaccccucuccagcgggauuuauaugggaaaucugucuucccagcaacuggaucagcggaaagcccuccugaacaugaucggcaugacagggggaaauggcggccgcaacaccacaagcgacgggauugugagagucugggaugugaagaaugcugagcuucugaacaaucaguucggaaccaugccuucucucacacuggccugucuuaccaagcagggccaaguggaccugaacgaugcuguccaggcccucacggaccuggggcugaucuacaccgcgaaauaucccaauuccagcgaccucgaucggcuggcccagucccauccgauucuuaacaugaucgacacaaagaaaucuagccugaauaucuccggauacaacuuuagccucggcgcugccguuaaggcuggggccugcaugcuggauggaggcaacaugcuugagaccauuaaagugucuccucaaacaauggacggcauccugaaguccauucucaaagugaagcgcagccuggggauguucaucucugauacccccggagaaagaaauccuuaugagaacauucuguacaagaucugucucagcggcgacggguggcccuauauugcgucccggacgucuaucgucggacgcgccugggaaaauacagugguugaucuggagagcgacaacaaaccucagaagaccggcaaugggggauccaacaaaagccuucagucugcuggcuuugccgcuggccugacauacucccagcucaugacccugaaggauagcaugcugcaacuugacccgaaugccaaaaccuggauggauaucgaggggagacccgaagacccuguggagauugcccucuaccagcccucuuccggaugcuauauccacuucuuucgggaaccuacagaccugaagcaguucaagcaggaugcuaaauacagccauggcauugacgucacggaucuguuugcggcccaacccgggcucaccuccgcugugaucgaggcccugccgagaaacaugguuauuacaugucagggaucugaagacauccgcaaacuucuggagagccagggccggagagauaucaagcucauugacaucucccugucuaagguggauagccgcaaauucgagaaugccgucugggaccaguuuaaggaucugugccacaugcauaccgggauuguggucgaaaagaaaaagcggggcggaaaagaggaaaucacaccucacugugcucuuauggacugcauuauguucgaugccgcgguguccggcgggguugacgcuaaggugcucagagccguccugccccgcgauaugguguuucggaccagcacgccuaaaguugugcuguga

SEQ ID NO: 19454 - RNA, 1761 nt, Artificial Sequence
  derived and/or modified CDS sequence (opt5) from LASV(G1180-SLE-2010;Clade IV)__AIT17169__SP-HsALB_NP(2-569)
augaagugggugaccuucaucagccugcucuuucuguucuccucugccuacagcagcgccuccaaggagaucaaaucuuuccuguggacccagagccucagacgggaacuguccggcuacugcucuaacauuaagcugcaaguggucaaagacgcucaggcccugcuccacgggcuggauuuuagcgagguuuccaaugugcagcgccuuaugagaaaggaacggcgcgacgauaacgaccugaaaagacuccgggaucugaaucaggcggugaacaaucuggucgagcucaagucuacacaacaaaagagcauccugcgcgugggaacgcuuaccuccgacgaucugcucauucuggcugccgaccuugaaaaacuuaagagcaaaguuaucagaacagagcggccccucucugccggcguguauauggggaaccuguccagccagcagcuggaucagcgcagagcucuccugucuaugauuggaauguccagcggcaaucagcgggcccaggcugggcgcgacggagucgugagaguuugggaugugaagaacgucgagcuucugaauaaccaguucggcaccaugccuucucucacacuggccugucuuaccaaacaaggccagguggaccugaaugaugcggugcaggcccucacagaccuggggcugaucuacaccgcuaaguauccgaacacguccgaccucgaucggcugacccaaagccaucccauccuuaauaugauugacacaaagaaauccucucugaacaucagcggauacaauuuuucccucggcgccgcugucaaggccggggcgugcaugcuggauggaggcaacaugcuugaaaccauuaaaguuagcccucagacaauggacgggauccugaagucuauucucaaagugaagaaagcccugggaauguucaucuccgauacccccggcgagcgcaacccuuaugaaaauauucuguacaagaucugucucagcggcgacggguggcccuauaucgcuucuagaacgagcauuacaggacgggccugggagaacaccguggucgaucuggaguccgacggcaagccucagaaagcugggucuaauaacagcaauaagucccuucagagcgugggauuuacagccggccugaccuacucucaacucaugacccugaaagaugccaugcugcagcuugacccgaacgcuaagacauggauggauaucgaagggagacccgaggacccuguugaaauugcgcucuaccagcccuccagcggaugcuauauccacuucuuucgcgagccuacggaccugaaacaguucaagcaagaugccaaguacucucauggcauugacgugaccgaucuguuugcugcccagcccggccucacauccgccgucaucgacgcucugccgcggaauauggugaucaccugucaggggagcgaugacauuagaaaacuucuggaaucccagggacgcaaggauaucaaacucauugacaucgcccugucuaagacagauagccggaaauaugagaacgcgguuugggaccaauacaaggaucugugccacaugcauaccggcguggucguggagaagaaaaagagagggggaaaagaagagauuacgccucacugugcucuuauggacugcaucauguucgaugccgccgucuccggcgggcucaauacaucugugcugcgcgcuguucugccccgggacaugguguuuagaaccagcaccccucgcgucgugcucuga

SEQ ID NO: 19455 - RNA, 1761 nt, Artificial Sequence
  derived and/or modified CDS sequence (opt5) from LASV(G1442-SLE-2011;Clade IV)__AIT17181__SP-HsALB_NP(2-569)
augaagugggugaccuucaucagccugcucuuucuguucuccucugccuacagcagcgccuccaaggaggugaaaucuuuccuguggacccagagccucagacgggaacuguccggcuacugcucuaacaucaaacuucaagucguuaaggacgcucaggcccugcuccacgggcuggauuuuagcgagguguccaaugugcagcgccuuaugagaaagcagcggcgcgacgauaacgaccugaaaagacuccgggaucugaaucaagcggucaacaaucugguggaacucaagucuacacagcaaaagagcguucugcgcgugggaacgcuuaccuccgacgaucugcucguccuggcugccgaccuugagaaacuuaagagcaaagugauuagaacagaacggccccucucugccggcguuuauauggggaaccuguccagccagcagcuggaucagcgcagagcucuccugaauaugaucggaaugucuggcgggauucagggaacccggacaggccgcgacggcguggucagagugugggaugugaagaacgccgaccuucugaauaaccaguucgggaccaugccuucccucacacuggcuugucuuaccaaacaaggacaggucgaucugaaugacguugugcaggcccucacggaccugggccugaucuacaccgcgaaguauccgaacgccagcgaucucgaccggcugacacaaucucaucccauucuuaauaugaucgauaccaagaaauccagccugaacaucuccggguacaauuuuucucucggagcugccgugaaggcuggcgccugcaugcuggacgggggaaacaugcuugagacaauuaaagucagcccucagaccauggauggcauccugaaguccauucucaaagugaagaaaacgcugggcauguucaucagcgacacacccggggagcgcaacccuuaugaaaauauucuguacaagaucugucucucuggagauggcuggcccuauauugcguccagaaccagcaucacagggcgggccugggagaacaccguuguggaccuggaaucugauggaaagccucagaaagcuggcagcaauaacuccaauaagucucuucagagcgccggguuugcugccggacugaccuacucccaacucaugacacugaaagacgccaugcugcagcuugauccgaacgcuaagacguggauggacaucgagggcagacccgaggacccugucgaaauugcgcucuaccagcccagcucuggcugcuauauccacuucuuucgcgagccuaccgaucugaaacaguucaagcaagacgccaaguacucccaugggauugaugugacagaccuguuugcugcccagcccggacucaccagcgccguuaucgaagcucugccgcggaauauggugauuacaugucagggcucugaugacaucaaaaagcugcuggagucccaggggagaaaagauaucaagcucauugacaucgcccugagcaaaaccgauucccgcaaguaugaaaacgcggucugggaccaauacaaggaucugugccacaugcauacgggaguggucguggagaaaaagaaacggggcgggaaggaggaaauuacaccucacugugcucuuauggacugcaucauguucgaugccgccguuucuggcggacucaauacccuggugcugagagcuguccucccccgcgacaugguguuucggaccagcacaccuagaguugugcuguga

SEQ ID NO: 19456 - RNA, 1761 nt, Artificial Sequence
  derived and/or modified CDS sequence (opt5) from LASV(G3010-SLE-2013;Clade IV)__AIT17345__SP-HsALB_NP(2-569)
augaagugggugaccuucaucagccugcucuuucuguucuccucugccuacagcagcgccuccaaggagaucaaaucuuuccuguggacccagagccucagacgggaacuguccggcuacugcucuaacauuaaacuucaaguggucaaagacgcucaggcccugcuccacgggcuggauuuuagcgagguuuccaaugugcagcgccuuaugagaaaggaacggcgcgacgauaacgaccugaaaagacuccgggaucugaaucaggcggugaacaaucuggucgagcucaagucuacacaacaaaagagcauccugcgcgugggaacgcuuaccuccgacgaucugcucauucuggcugccgaccuugaaaaacuuaagagcaaaguuacaagaaccgagcggccccucucugccggcguguauauggggaaccuguccagccagcagcuggaucagcgcagagcucuccugucuaugaucggaauguccagcggcguccagggggcccgggcuggacgcgacggcgugguuagagugugggaugucaagaaugccgagcuucugaacaaucaguucggcacaaugccuucucucacccuggcgugucuuacaaaacaggggcaaguggaccugaacgaugugguccaggcccucaccgaccugggacugauuuacacggcuaaguauccgaauaccuccgaccucgaucggcugacacagagccaucccauccuuaacaugaucgacaccaagaaauccucucugaauauuagcggcuacaacuuuucccucggggccgcuguuaaggccggagcgugcaugcuggauggcgggaauaugcuugaaacaaucaaagugagcccucaaaccauggacggcauucugaagucuauccucaaagugaagaaagcccugggaauguucauuuccgagacgcccggcgaacgcaacccuuaugagaacauccuguacaagauuugucucagcggggauggauggcccuauaucgcuucuagaacaagcaucaccggccgggccugggagaauacagucguggaccuggaauccgaugggaagccucagaaagcuggaucuaacaauagcaacaagucccuucagagcgccggcuuuaccgccgggcugaccuacucucagcucaugacacugaaagacgcuaugcugcaacuugauccgaaugcgaagacguggauggacauugagggaagacccgaagauccuguugagguggcccucuaccagcccuccagcggcugcuauauccacuucuuucgcgaaccuaccgaccugaaacaguucaagcaggacgcuaaguacucucauggcauugaugucacagaccuguuugccgcccaacccgggcucaccuccgcugugaucgaugcccugccgcggaacaugguuauuacaugucagggaagcgacgauaucaaaaagcugcuggagucccagggcagaaaagacaucaagcucauugauaucgcgcugucuaaaaccgacagccgcaaguaugagaaugcugugugggaucaguacaaggaccugugccacaugcauacgggggucguggucgaaaagaagaaacggggaggcaaggaggaaauuacaccucacugugcccuuauggauugcaucauguucgacgccgcuguguccgggggccucaacaccucuguucugagagccgugcugccccgcgauauggucuuucggaccagcacaccuagagugguucucuga

SEQ ID NO: 19457 - RNA, 1761 nt, Artificial Sequence
  derived and/or modified CDS sequence (opt5) from LASV(G502-SLE-2009;Clade IV)__AIT17127__SP-HsALB_NP(2-569)
augaagugggugaccuucaucagccugcucuuucuguucuccucugccuacagcagcgccuccaaggagaucaaaucuuuccuguggacccagagccucagacgggaacuguccggcuacugcucuaacauuaagcugcaaguggucaaagacgcucaggcccugcuccacgggcuggauuuuagcgagguuuccaaugugcagcgccuuaugagaaaggaacggcgcgacgauaacgaccugaaaagacuccgggaucugaaucaggcggugaacaaucuggucgagcucaagucuacacaacaaaagagcauccugcgcgugggaacgcuuaccuccgacgaucugcucauucuggcugccgaccuugaaaaacuuaagagcaaaguuaucagaacagagcggccccucucugccggcguguauauggggaaccuguccagccagcagcuggaucagcgcagagcucuccugucuaugauuggaauguccggcgggaaucagggaguccgggccggcaaggacggcgugguucgcgugugggaugucaaaaacgcugagcuucugaauaaccaguucgggaccaugccuagccucacacuggccugucuuaccaagcagggacaaguggaccugaaugaugcggugcaggcccucacagaccugggccugaucuacaccgcuaaguauccgaacacgucugaccucgauagacugacccagucccaucccauccuuaauaugauugacaccaaaaagagcucccugaacaucucuggguacaauuuuagccucggagccgcugucaaagccggcgcgugcaugcuggaugggggaaacaugcuugaaacaauuaagguuuccccucaaacaauggacggcauccugaaaagcauucucaaggugaaaaaggcccugggcauguucaucucugauacccccggggagcggaacccuuaugaaaauauucuguacaagaucugucucuccggagacggcuggcccuauaucgcuagccgcacgucuauuacagggagagccugggagaacaccguggucgaucuggagagcgacggaaaaccucagaaggcuggcuccaauaacucuaauaaaagccuucaguccgccggguuuacagccggacugaccuacagccagcucaugacccugaaggaugcuaugcugcaacuugacccgaacacaaaaacguggauggauaucgaaggccggcccgaggacccuguggaaauugcgcucuaccagcccucuuccggcugcuauauccacuucuuuagagagccuaccgaccugaagcaguucaagcaggaugccaaauacagccaugggauugacguuacagaucuguuugcugcccaacccggacucaccucugccgugaucgacgcucugccgcgcaauauggucaucacaugucagggcuccgaugacauucggaaacuucuggaaagccaggggagaaaggauaucaagcucauugacaucgcccugaacaaaaccgauucccgcaaguaugagaaugcggugugggaccaguacaaggaucugugccacaugcauacgggaguuguggucgagaaaaagaaacggggcgggaaggaagagauuacaccucacugugcucuuauggacugcaucauguucgaugccgccgugucuggcggacucaacaccagcguccugagagcugugcugccccgcgacaugguuuuucggaccuccacaccuagagugguccucuga

SEQ ID NO: 19458 - RNA, 1761 nt, Artificial Sequence
  derived and/or modified CDS sequence (opt5) from LASV(G733-SLE-2010;Clade IV)__AIT17155__SP-HsALB_NP(2-569)
augaagugggugaccuucaucagccugcucuuucuguucuccucugccuacagcagcgccuccaaggagaucaaaucuuuccuguggacccagagccucagacgggaacuguccggcuacugcucuaacauuaagcugcaaguggucaaagacgcucaggcccugcuccacgggcuggauuuuagcgagguuuccaaugugcagcgccuuaugagaaaggaacggcgcgacgauaacgaccugaaaagacuccgggaucugaaucaggcggugaacaaucuggucgagcucaagucuacacaacaaaagagcgugcugcgcguuggaacgcuuaccuccgacgaacugcucgugcuggcugccgaucuugagaaacuuaagagcaaagucaucagaacagagcggccccucucugccggcguguauauggggaaccuguccagccagcagcuggaccagcgcagagcucuccugucuaugauuggaauguccggcgggaaucagggagcccggaccggccgcgauggcguugugagagucugggacgugaagaacgcugaacuucugaauaaccaguucgggacaaugccuagccucacccuggccugucuuacaaaacagggacaaguggaucugaaugacgcgguccaggcccucaccgaucugggccugaucuacacggcuaaguauccgaacaccucugaccucgaccggcugacacagucccaucccauucuuaauaugaucgauaccaagaaaagcucccugaacaucucuggguacaauuuuagccucggagccgcuguuaaggccggcgcgugcaugcuggacgggggaaacaugcuugagacaauuaaaguguccccucaaaccauggauggcauccucaagagcauucugaaagugaagaaagcccugggcauguucaucucugacacgcccggggaacgcaacccuuaugagaauauucuguacaagaucugucucuccggagauggcuggcccuauauugcuagcagaacaucuaucaccgggcgggccugggagaacacagucguggaccuggaaagcgauggaaagccucagaaagcuggcuccaauaacucuaauaagagccuucaguccgccggguuuaccgccggacugaccuacagccagcucaugacacugaaagacgcuaugcugcaacuugauccgaacgcgaagacguggauggacaucgagggcagacccgaagauccuguugagauugcccucuaccagcccucuuccggcugcuauauccacuucuuucgcgaaccuaccgaccugaaacaguucaagcaggacgcuaaguacagccaugggauugaugugacagaccuguuugccgcccaacccggacucaccucugcugucaucgaugcccugccgcggaauauggugauuacaugucagggcuccgacgauaucagaaaacuucuggagagccaggggcgcaaggacaucaaacucauugauaucgcgcuguccaagauugacucucggaaauaugagaacgcuguuugggaucaguacaaggaccugugccacaugcauaccggaguggucguggaaaagaaaaagagaggcgggaaagaggaaaucacgccucacugugcccuuauggauugcauuauguucgacgccgcugucagcggcggacucaauucccuggugcugcgcgccguucucccccgggauaugguguuuagaacaucuaccccucgcgucgugcuguga

SEQ ID NO: 19459 - RNA, 1761 nt, Artificial Sequence
  derived and/or modified CDS sequence (opt5) from MOPV/LASV reassortant(IGS-1;Clade IV)__AFY05578__SP-HsALB_NP(2-569)
augaagugggugaccuucaucagccugcucuuucuguucuccucugccuacagcagcgccuccaaggagaucaaaucuuuccuguggacccagagccucagacgggaacuguccggcuacugcucuaacauuaaacuucaaguggucaaggacgcucaggcccugcuccacgggcuggauuuuagcgagguuuccaaugugcagcgccuuaugagaaaggaacggcgcgacgauaacgaccugaaaagacuccgggaucugaaucaggcggugaacaaucuggucgagcucaagucuacacaacaaaagagcauccugcgcgugggaacgcuuaccuccgacgaucugcucauucuggcugccgaccuugaaaaacugagaagcaagguuauccggacagagcgcccccucucugccggcguguauauggggaaccuguccagccagcagcuggaucagagacgggcucuccugaauaugauuggaaugucuggcgggaaccagggagcccgcgcuggcagagacggcgucgugcggguuugggaugugaaaaaugccgagcuucuguccaaccaguucgggaccaugccuagccucacacuggcgugucuuaccaagcagggacaagucgaccugaaugaugccgugcaggcucucacagaccugggccugaucuacaccgccaaauauccgaacacgucugaccucgaucgccugacccagucccaucccauccuuaauaugauugacacaaagaaaagcucccugaacaucucuggguacaauuuuagccucggagcugccgugaaggcgggcgccugcaugcuggaugggggaaacaugcuugaaaccauuaaggucuccccucaaacaauggacggcauccugaaaagcauucucaagguuaaaaaggcucugggcauguucaucucugauacccccggggagagaaacccuuaugaaaauauucuguacaaaaucugucucuccggagacggcuggcccuauaucgccagccggacgucuauuacagggagagcuugggagaacaccgugguggaucuggagagcgacggaaagccucagaaggccgauuccaauaacucuagcaaaucccuucagagcgccggcuuuacagcugggcugaccuacucucagcucaugacccugaaggacgcgaugcugcaacuugauccgaaugccaaaacauggauggacaucgaaggacgccccgaggacccugucgaaauugcucucuaccagcccuccagcggcugcuauauccacuucuuucgggagccuacggaucugaagcaguucaaacaggacgccaaguacucucauggcauugaugugaccgaccuguuugccacacaacccgggcucaccuccgcuguuaucgaugcccugccgagaaacauggugaucacaugucagggaagcgacgauauucgcaaacuucuggaaucccagggccggaaggacaucaagcucauugauaucgaccugucuaaaaccgauagcagaaaguaugagaaugcggucugggaccaguacaaagaucugugccacaugcauacgggggugguuguggagaagaagaaacgcggaggcaaggaagagauuacaccucacugugcucuuauggacugcaucauguucgacgccgccgucuccgggggccucaacaccucugugcugcgggcuguccugcccagagauaugguguuucgcaccagcacaccucggguugugcucuga

SEQ ID NO: 19460 - RNA, 1761 nt, Artificial Sequence
  derived and/or modified CDS sequence (opt5) from LASV(LM765-SLE-2012;Clade IV)__AIT17815__SP-HsALB_NP(2-569)
augaagugggugaccuucaucagccugcucuuucuguucuccucugccuacagcagcgccuccaaggagaucaaaucuuuccuguggacccagagccucagacgggaacuguccggcuacugcucuaacauuaagcugcaaguggucaaagacgcucaggcccugcuccacgggcuggauuuuagcgagguuuccaaugugcagcgccuuaugagaaaggaacggcgcgacgauaacgaccugaaaagacuccgggaucugaaucaggcggugaacaaucuggucgagcucaagucuacacaacaaaagagcauccugcgcgugggaacgcuuaccuccgacgaucugcucauucuggcugccgaccuugaaaaacuuaagagcaaaguuacaagaaccgagcggccccucucugccggcguguauauggggaaccuguccagccagcagcuggaucagcgcagagcucuccuggacaugaucggaaugucuggcuccaaucagggggcccgggcuggacgcgauggcgucgugagaguuugggacgugaagaacgccgagcuucugaauaaccaguucggcacaaugccuagccucacccuggcgugucuuacaaaacaggggcaagucgaucugaaugacgccgugcaggcucucaccgaccugggacugauuuacacggccaaguauccgaacaccucugaucucgaccggcugacacagucccaucccauccuuaauaugaucgauaccaagaaaagcucccugaacauuucuggcuacaauuuuagccucggggcugccgugaaggcgggagccugcaugcuggacggcgggaacaugcuugaaacaaucaaagucuccccucaaaccauggauggcauucucaagagcauccugaaaguuaagaaagcucugggaauguucauuucugacgcccccggcgagcgcaacccuuaugaaaauauccuguacaagauuugucucuccggggauggauggcccuauaucgcuagcagaacgucuaucacaggccgggccugggagaacaccgugguggaccuggagagcgaugggaagccucagaaagccggauccaauggcucuaacaagagccuucaguccgcuggguuuacagcgggacugaccuacagccagcucaugacccugaaagacgccaugcugcaacuugauccgaaugcuaagacauggauggacauugaaggcagacccgaggacccugucgaaaucgcccucuaccagcccucuuccggcugcuauauucacuucuuucgcgagccuacggaucugaaacaguucaagcaggacgccaaguacagccaugggaucgaugugaccgaccuguuugcugcccaacccggacucacaucugcgguuauugaugcucugccgcggaacauggugaucaccugucagggcuccgacgauaucagaaaacuuuucgaaagccaggggcgcaaggacauuaaacugaucgauauugcccucuccaagacagacucucggaaauaugagaaugccgucugggaucaguacaaggaccugugccacaugcauaccggaaucgugguugagaagaaaaagagaggcgggaaagaagagauuacgccucacugugcucugauggauugcaucauguuugacgccgcugugagcggcggacuuaacacauccguccuccgcgccgugcugccccgggacauggucuucagaaccucuaccccucgcgugguucuguga

SEQ ID NO: 19461 - RNA, 1761 nt, Artificial Sequence
  derived and/or modified CDS sequence (opt5) from LASV(LM776-SLE-2012;Clade IV)__AIT17825__SP-HsALB_NP(2-569)
augaagugggugaccuucaucagccugcucuuucuguucuccucugccuacagcagcgccuccaaggagaucaaaucuuuccuguggacccagagccucagacgggaacuguccucuuacugcagcaacauuaaacuucaaguggucaaggacgcucaggcccugcuccacggccuggauuuuuccgagguuucuaaugugcagcgccuuaugagaaaggaacggcgcgacgauaacgaccugaaaagacuccgggaucugaaucaggcggugaacaaucuggucgagcucaagagcacacaacagaaguccauccugcgcguggggacgcuuaccagcgacgaucugcucauucuggcugccgaccuugaaaaacugaagucuaaaguuacaagaaccgagcggccccucuccgccggaguguauaugggcaaccugagcucucagcagcuggaucaacgcagagcucuccuguccaugaucgggaugagcggaucuaaucagggcgcccgggcugggcgcgacggagucgugagaguuugggaugugaagaacgccgagcuucugaauaaccaguucggcacaaugccuucccucacccuggcgugucuuacaaaacagggccaagucgaccugaaugaugccgugcaggcucucaccgaccuggggcugauuuacacggccaaguauccgaacaccagcgaccucgaucggcugacacagucccaucccauccuuaauaugaucgacaccaagaaaucuagccugaacauuuccggauacaauuuuagccucggcgcugccgugaaggcgggggccugcaugcuggauggaggcaacaugcuugaaacaaucaaagucucuccucaaaccauggacgggauucugaaguccauccucaaaguuaagaaagcucugggaauguucauuagcgauacgcccggcgagcgcaacccuuaugaaaauauccuguacaagauuugucucucuggcgacggguggcccuauaucgccagcagaacauccaucaccggacgggcuugggagaacacagugguggaucuggagucugacggcaagccucagaaagccgggagcaauaacuccaauaagagccuucagucugccggauuuaccgcuggccugaccuacucccagcucaugacacugaaagaugcgaugcugcaacuugacccgaacgccaagacguggauggauauugaagggagacccgaggacccugucgaaguggcucucuaccagcccagcucuggaugcuauauccacuucuuucgcgagccuaccgaccugaaacaguucaagcaggaugccaaguacucccauggcauugacguuacagaucuguuugccgcucaacccggccucaccagcgccgugaucgacgcgcugccgcggaauauggucauuacaugucagggguccgaugacaucagaaaacuucuggaaucucagggacgcaaggauaucaaacucauugacaucgcucugagcaagaccgauucccggaaauaugagaacgccgugugggaccaguacaaggaucugugccacaugcauacgggcguuguggucgagaagaaaaagagagggggaaaagaagagauuacaccucacugugcccuuauggacugcaucauguucgaugcugccgugucuggcgggcucaauaccagcguccugcgcgcugugcugccccgggacaugguuuuuagaaccuccacaccucgcgugguccucuga

SEQ ID NO: 19462 - RNA, 1761 nt, Artificial Sequence
  derived and/or modified CDS sequence (opt5) from LASV(Mad39;Clade IV)__ANH09723__SP-HsALB_NP(2-569)
augaagugggugaccuucaucagccugcucuuucuguucuccucugccuacagcagcgccuccaaggagaucaaaucuuuccuguggacccagagccucagacgggaacuguccggcuacugcucuaacauuaagcugcaaguggucaaagacgcucaggcccugcuccacgggcuggauuuuagcgagguuuccaaugugcagcgccuuaugagaaagcagcggcgcgacgauaacgaccugaaaagacuccgggaucugaaucaagcggugaacaaucuggucgaacucaagucuacacagcaaaagagcgugcugcgcguuggaacgcuuaccuccgacgaucugcucacacuggcugccgaccuugagaaacuuaagagcaaagugaccagaacagaacggccccucaccgccggcgucuauauggggaaccugucuucccagcagcuggaucagcgcagagcucuccugaauaugaucggaaugagcggcgggaaccagggagcccggacaggccgcgacggcgugguuagagugugggaugucaagaaugcugagcuucugaacaaucaguucgggaccaugccuucucucacgcuggccugucuuaccaaacaaggacagguggaccugaacgaugugguccaggcgcucacagaccugggccugauuuacaccgccaaguauccgaauacauccgaccucgaucggcugacccaaagccaucccauccuuaacaugauugacacgaauaagucuucccugaacaucagcggguacaacuuuucccucggagcugccguuaaagcuggcgccugcaugcuggaugggggaaauaugcuugagacaaucaaggugucuccucagaccauggacggcauucugaaaagcauccucaaggugaaaaagucccugggcauguucauuagcgauacacccggggaacgcaacccuuaugagaauauccuguacaaaauuugucucucuggagacggcuggcccuauaucgcguccagaaccagcauuaccgggcgggccugggaaaacacagucguggaucuggagucuggaggcaagccucagaaggcugggagcaauaacuccaauaaaucucuucagagcgccggauuugcugccggccugacguacucccaacucaugacccugaaggacgccaugcugcagcuugauccgaacgcuaaaacauggauggacaucgagggcagacccgaagauccuguugagaucgcgcucuaccagcccauuagcgggugcuauauccacuucuuucgcgaaccuaccgaccugaagcaguucaaacaagacgccaaguacucucauggaauugaugugacagaccuguuugcugcccagcccggccucaccuccgccgucaucgaggcucugccgcggaauauggugauuacgugucaggggagcgaugacaucagaaaacuuuucgaaucucagggacgcaaggauaucaagcugauugacaucgcccucuccaaaacagauagccggaaguaugagaacgcgguuugggaccaauacaaagaucugugccacaugcauaccggcguggucguggagaagaagaaaaagggcgggaaagaagagauuaccccucacugugcucugauggacugcaucauguuugaugccgccgucuccggaggccuuaauacacucgugcugagagcuguucugccccgcgacaugguguuccggaccucuacaccuaaggucgugcucuga

SEQ ID NO: 19463 - RNA, 1761 nt, Artificial Sequence
  derived and/or modified CDS sequence (opt5) from LASV(Z0947-SLE-2011;Clade IV)__AIT17841__SP-HsALB_NP(2-569)
augaagugggugaccuucaucagccugcucuuucuguucuccucugccuacagcagcgccuccaaggagaucaaaucuuuccuguggacccagagccucagacgggaacuguccggcuacugcucuaacauuaagcugcaaguggucaaagacgcucaggcccugcuccacgggcuggauuuuagcgagguuuccaaugugcagcgccuuaugagaaaggaacggcgcgacgauaacgaccugaaaagacuccgggaucugaaucaggcggugaacaaucuggucgagcucaagucuacacaacaaaagagcauccugcgcgugggaacgcuuaccuccgacgaucugcucauucuggcugccgaccuugaaaaacuuaagagcaaaguuacaagaaccgagcggccccucucugccggcguguauauggggaaccuguccagccagcagcuggaucagcgcagagcucuccugaauaugaucggaaugucuggcuccaaccagggggcccggacaggacgcgacggcgucgugagaguuugggaugugaagaaugcugagcuucugaacaaucaguucggcaccaugccuagccucacacuggccugucuuaccaaacaggggcaagucgaccugaacgaugcggugcaggcccucacggaccugggacugauuuacaccgcuaaguauccgaauacaucugaccucgaucggcugacccagucccaucccauccuuaacaugaucgacacaaagaaaagcucccugaauauuucuggcuacaacuuuagccucggggccgcugugaaggccggagcgugcaugcuggauggcgggaacaugcuugaaaccaucaaagucuccccucaaacgauggacggcauucucaagagcauccugaaaguuaagaaagcccugggaauguucauuucugaugcucccggcgagcgcaauccuuaugaaaacauccuguacaagauuugucucuccggggacggauggcccuauaucgccagcagaacaucuaucaccggccgggcuugggagaauacagugguggaucuggagagcgacgggaagccucagaaagccggauccaacggcucuaauaagagccuucaguccgccggguuuaccgcuggacugaccuacagccagcucaugacacugaaagaugcgaugcugcaacuugacccgaacgccaagacguggauggauauugaaggcagacccgaggacccugucgaaaucgcucucuaccagcccucuuccggcugcuauauucacuucuuucgcgagccuaccgaccugaaacaguucaagcaggaugccaaguacagccaugggaucgacgugacagaucuguuugccgcucaacccggacucaccucugccguuauugacgcgcugccgcggaauauggugaucacaugucagggcuccgaugacaucagaaaacuuuucgaaagccaggggcgcaaggauauuaaacugaucgacauugcucucuccaagaccgauucucggaaauaugagaacgccgucugggaccaguacaaggaucugugccacaugcauacgggaaucgugguugagaagaaaaagagaggcgggaaagaagagauuacaccucacugugcccugauggacugcaucauguuugaugcugccgugagcggcggacuuaauaccuccguccuccgcgcugugcugccccgggacauggucuucagaaccucuacaccucgcgugguucuguga

SEQ ID NO: 19464 - RNA, 2002 nt, Artificial Sequence
  mRNA product Design a-1 (hSL-A64-N5) comprising derived and/or modified sequence from LASV(Josiah;Clade IV)__NP_694869__SP-HsALB_NP(2-569) (opt1)
aggagagucccgcagucggcguccagcggcucugcuuguucgugugugugucguugcaggccuuauucaagcuuaccaugaagugggugaccuucaucagccugcucuuccuguucuccagcgccuacuccagcgccuccaaggagaucaagagcuuccuguggacccagucccuccgccgggagcugagcggcuacugcuccaacaucaagcuccagguggucaaggacgcccaggcgcugcugcacgggcuggacuucagcgagguguccaacgugcagcgccucaugcggaaggagcgccgggacgacaacgaccugaagcgccugcgggaccucaaccaggccgucaacaaccugguggagcucaagagcacccagcagaaguccauccugcgcgugggcacccugaccagcgacgaccugcucauccuggccgccgaccuggagaagcucaaguccaaggucauccggaccgagcgcccccugagcgccgggguguacaugggcaaccuguccagccagcagcucgaccagcggcgcgcgcugcugaacaugaucgggauguccggcggcaaccagggggcccgggccggccgcgacggggugguccgggugugggacgugaagaacgccgagcuccugaacaaccaguucggcaccaugccgagccugacgcucgcgugccugaccaagcaggggcaggucgaccugaacgacgccgugcaggcccucaccgaccugggccugaucuacaccgccaaguaccccaacacguccgaccucgaccgccugacccagagccaccccauccugaacaugaucgacaccaagaaguccagccucaacaucagcggcuacaacuucucccugggggccgcggugaaggccggcgccugcaugcuggacgggggcaacaugcucgagaccaucaaggucagcccccagacgauggacggcauccugaaguccauccugaaggugaagaaggcccucgggauguucaucagcgacaccccgggcgagcggaaccccuacgagaacauccuguacaagaucugccuguccggggacggcuggcccuacaucgccagccgcaccuccaucaccgggcgggcgugggagaacacgguggucgaccucgagagcgacggcaagccccagaaggccgacuccaacaacagcuccaagagccugcaguccgccggcuucaccgccgggcugaccuacagccagcucaugacccugaaggacgccaugcugcagcuggacccgaacgcgaagacguggauggacaucgagggccgccccgaggaccccguggagaucgcccucuaccagcccuccagcgggugcuacauccacuucuuccgggagccgaccgaccugaagcaguucaagcaggacgccaaguacucccacggcaucgacgugaccgaccuguucgccacccagcccgggcucacgagcgccgucaucgacgcgcugccccgcaacauggugaucacgugccagggcuccgacgacauccgcaagcugcucgagagccagggccggaaggacaucaagcugaucgacaucgcccugagcaagaccgacucccgcaaguacgagaacgccgugugggaccaguacaaggaccucugccacaugcacaccggggucguggucgagaagaagaagcggggcgggaaggaggagaucaccccgcacugcgcccugauggacugcaucauguucgacgcggccgugagcggcgggcugaacaccuccgugcuccgcgccguccugccccgggacaugguguuccgcaccagcacgccccgggugguccugugaggacuagucccuguucccagagcccacuuuuuuuucuuuuuuugaaauaaaauagccugucuuucagaucucaaaggcucuuuucagagccaccaaaaaaaaaaaaaaaaaaaaaaaaaaaaaaaaaaaaaaaaaaaaaaaaaaaaaaaaaaaaaaaaagaauu

SEQ ID NO: 19465 - RNA, 2002 nt, Artificial Sequence
  mRNA product Design a-1 (hSL-A64-N5) comprising derived and/or modified sequence from LASV(LP;Clade I)__AAF86702__SP-HsALB_NP(2-569) (opt1)
aggagagucccgcagucggcguccagcggcucugcuuguucgugugugugucguugcaggccuuauucaagcuuaccaugaagugggugaccuucaucagccugcucuuccuguucuccagcgccuacuccagcaacuccaaggagaucaagagcuuccuguggacccagucccuccgccgggagcugagcggcuacugcuccaacaucaagcuccagguggucaaggacgcccaggcccugcugcacgggcuggacuucagcgagguguccaacgugcagcgccucaugcggaagcagaagcgcgacgacgcggaccugaagcggcugcgcgaccucaaccaggccgucaacaaccugguggagcucaagagcacccagcagaagaacgugcugcgggucggcacgcuguccagcgacgaccugaucacccucgccgccgaccuggagaagcugaaguccaaggugauccgcaccgagcggccccucagcuccgggguguacaugggcaaccugagcucccagcagcuggaccagcgccgggcccuccugagcaugaucgggauguccggcggcccgcaggggaaccgcaccggcggggacggcgucgugcgggugugggacgucaagaacgcggagcugcucaacaaccaguucgggacgaugcccagccugacccuggccugccucaccaagcagggccagguggaccugaacgacgccgugcaggcccugaccgaccucggccugaucuacacggcgaaguaccccaacuccagcgaccuggacaugcucacccagagccaccccauccuggggauggucgacaccaagaaguccagccugaacaucuccggcuacaacuucagccucggggccgccgugaaggccggcgccugcaugcuggacggcgggaacaugcuggagaccaucaagguguccccgcagacgauggacggcauccucaagagcauccugaaggucaagcgcucccuggggauguucaucagcgacacccccggcgagcggaaccccuacgagaacauccucuacaagaucugccuguccggggagggcuggcccuacaucgcgagccgcaccuccaucaccggccgggccugggagaacacgcugguggaccucgagagcgacaacaagccgcccaagcugaacuccgccgggagcaacaagucccugcaggccgccggccucaacgcggggcugaccuacagccagcugaugacccugaaggacugcaugcuccagcuggaccccuccagcaagaccuggaucgacaucgagggccgccccgaggacccgguggagaucgcccuguuccagcccuccagcgggugcuacauccacuucuuccgggagcccacggaccucaagcaguucaagcaggacgccaaguacagccacggcaucgacgucaccgaccuguucuccacccagcccggccugaccagcgccgugaucgaggcccucccgcgcaacauggugcugacgugccagggguccgacgacaucaagaagcugcucgagagccagggccggcgcgacaucaagcugaucgacaucucccugagcaaggcggacucccgcaaguucgagaacgccgucugggaccaguacaaggaccucugccacaugcacaccgggguggucguggagaagaagaagcggggcgggaaggaggagaucacgccccacugcgcccugcuggacugcaucauguucgacgccgccaccaccggcagccucaacaucaccacccugcgcgcggugcugccccgggacauggucuuccgcaccuccacgcccaagguggugcucugaggacuagucccuguucccagagcccacuuuuuuuucuuuuuuugaaauaaaauagccugucuuucagaucucaaaggcucuuuucagagccaccaaaaaaaaaaaaaaaaaaaaaaaaaaaaaaaaaaaaaaaaaaaaaaaaaaaaaaaaaaaaaaaaagaauu

SEQ ID NO: 19466 - RNA, 2002 nt, Artificial Sequence
  mRNA product Design a-1 (hSL-A64-N5) comprising derived and/or modified sequence from LASV(803213;Clade II)__AAF86704__SP-HsALB_NP(2-569) (opt1)
aggagagucccgcagucggcguccagcggcucugcuuguucgugugugugucguugcaggccuuauucaagcuuaccaugaagugggugaccuucaucagccugcucuuccuguucuccagcgccuacuccagcgccuccaaggaggugaaguccuuccuguggacccagagccuccgccgggagcugagcggcuacugcuccaacaucaagcugcaggucgugaaggacgcccaggcgcuccugcacgggcuggacuucagcgaggugaacaacguccagcgccucaugcggaagcagaagcgcgacgacggcgaccugaagcggcugcgcgaccucaaccaggccgugaacaaccugguggagcugaaguccacccagcagaaguccauccuccgggucgggacgcugaccagcgacgaccugcucacccuggccgccgaccuggagaagcucaagagcaaggugauccgcaccgagcggccccuguccagcggcguguacauggggaaccuguccacgcagcagcucgagcagcgccgggcccugcugaacaugaucggcauggucggcggggcgcagggcacccagccggggcgcgacggcguggugcgggucugggacgugaagaaccccgaccuccugaacaaccaguucgggaccaugcccagccugacccucgccugccugacgaagcagggccagguggaccugaacgacgccguccucgcccugaccgaccugggccucaucuacaccgcgaaguaccccaacuccagcgaccuggaccgccugucccagagccacccgauccucaacaugguggacaccaagaaguccagccugaacaucagcggguacaacuucucccugggcgccgccgugaaggccggggccugcaugcucgacggcggcaacaugcuggagacgaucaaggucacgccccagaccauggacgggauccucaagagcauccugaaggugaagcggucccugggcauguucgugagcgacacccccggggagcgcaaccccuacgagaacauccuguacaagaucugccucuccggcgacggguggccguacaucgcgagccggaccuccaucgucggccgcgccugggagaacaccaccguggaccuggagagcgacggcaagccccagaagguggggaccgccggcuccaacaagagccugcaguccgccggguuccccacgggccucaccuacagccagcugaugacccugaaggacuccaugaugcagcuggaccccagcgccaagaccuggaucgacaucgaggggcggccggaggaccccgucgagaucgcgcucuaccagcccauguccggcugcuacauccacuucuuccgcgagcccacggaccugaagcaguucaagcaggacgccaaguacagccacggcaucgacguggccgaccuguucccggcccagcccgggcucaccuccgccgucaucgaggcgcugccccggaacauggugcugaccugccagggcagcgacgacaucaagaagcuccuggacucccaggggcgccgcgacaucaagcugaucgacaucagccucagcaagguggacucccggaaguucgagaacgccgucugggaccagugcaaggaccugugccacaugcacaccggcgugguggucgagaagaagaagcgcgggggcaaggaggagaucacgccccacugcgcccugauggacugcaucauguucgacgccgccgugagcggcgggcucaacaucccggugcugcgggcgguccugccccgcgacaugguguuccggaccuccagccccaaggugguccucugaggacuagucccuguucccagagcccacuuuuuuuucuuuuuuugaaauaaaauagccugucuuucagaucucaaaggcucuuuucagagccaccaaaaaaaaaaaaaaaaaaaaaaaaaaaaaaaaaaaaaaaaaaaaaaaaaaaaaaaaaaaaaaaaagaauu

SEQ ID NO: 19467 - RNA, 2005 nt, Artificial Sequence
  mRNA product Design a-1 (hSL-A64-N5) comprising derived and/or modified sequence from LASV(GA391;Clade III)__CAA36646__SP-HsALB_NP(2-570) (opt1)
aggagagucccgcagucggcguccagcggcucugcuuguucgugugugugucguugcaggccuuauucaagcuuaccaugaagugggugaccuucaucagccugcucuuccuguucuccagcgccuacuccagcgccuccaaggaggugcgcagcuuccuguggacccagucccuccggcgcgagcugagcggcuacugcuccaacaucaagcugcaggucgugaaggacgcccaggcgcuccugcacgggcuggacuucagcgagguguccaacguccagcggcucaugcgcaagcagaagcgggacgacggcgaccugaagcgccugcgggaccucaaccaggccgugaacaaccugguggagcucaagagcacccagcagaaguccguccugcgcguggggacccugagcuccgacgaccugcucauccuggccgccgaccuggagaagcucaagagcaaggugacccggaccgagcgcccccuguccagcggcgucuacauggggaaccuguccagccagcagcucgaccagcggcgcgcccugcugaacaugaucggcaugaccggcguguccgggggcgggaagggcgcgagcgacgggaucgugcgggucugggacgugaagaacgccgagcuccugaacaaccaguucggcacgaugccgucccugacccucgccugccugaccaagcagggccagguggaccugaacgacgccguccaggcgcucaccgaccuggggcugaucuacacggccaaguaccccaacagcagcgaccucgaccgccugucccagagccaccccauccugaacaugaucgacaccaagaaguccagccucaacaucuccggcuacaacuucagccugggggccgccgugaaggccggcgcgugcaugcuggacggcgggaacaugcucgagaccaucaaggugagcccccagaccauggacggcauccucaaguccauccugaaggucaagaagucccuggggauguucgugagcgacacgccgggcgagcggaaccccuacgagaacauccuguacaagaucugccuguccggggacggcuggcccuacaucgccagccgcaccuccaucgugggccgggccugggagaacaccgucguggaccucgagcaggacaacaagccccagaagaucgggaacggcgggagcaacaagucccugcagagcgccggcuucgccgcggggcugaccuacucccagcucaugacgcugaaggacuucaagugcuucaaccugaucccgaacgccaagaccuggauggacaucgagggccgccccgaggaccccguggagaucgcccuguaccagcccagcuccggcugcuacguccacuucuuccgggagccgaccgaccucaagcaguucaagcaggacgccaaguacagccacgggaucgacgugaccgaccuguucgccgcgcagcccggccugacgagcgccgucaucgaggcccucccccgcaacauggugaucacgugccagggguccgaggacauccggaagcugcuggagagccagggccgccgcgacaucaagcucaucgacaucacccuguccaaggccgacagccggaaguucgagaacgccgugugggaccaguucaaggaccugugccacaugcacaccggggucgugguggagaagaagaagcgcggcggcaaggaggagaucacgccccacugcgcgcucauggacugcaucauguucgacgccgccgucuccgggggccuggacgccaaggugcugcgggugguccucccgcgcgacaugguguuccggaccagcacccccaaggugguccugugaggacuagucccuguucccagagcccacuuuuuuuucuuuuuuugaaauaaaauagccugucuuucagaucucaaaggcucuuuucagagccaccaaaaaaaaaaaaaaaaaaaaaaaaaaaaaaaaaaaaaaaaaaaaaaaaaaaaaaaaaaaaaaaaagaauu

SEQ ID NO: 19468 - RNA, 2002 nt, Artificial Sequence
  mRNA product Design a-1 (hSL-A64-N5) comprising derived and/or modified sequence from LASV(AV;Clade V)__CCA30315__SP-HsALB_NP(2-569) (opt1)
aggagagucccgcagucggcguccagcggcucugcuuguucgugugugugucguugcaggccuuauucaagcuuaccaugaagugggugaccuucaucagccugcucuuccuguucuccagcgccuacuccagcgccuccaaggaggugaaguccuuccuguggacccagagccuccgccgggagcugagcggcuacugcuccaacaucaagcugcaggucgugaaggacgcccaggcgcuccugcacgggcuggacuucagcgagguguccaacguccagcgccucaugcggaagcagcgccgggacgacagcgaccugaagcgccugcgggaccucaaccaggccgugaacaaccugguggagcugaaguccacccagcagaaguccguccuccgcgugggcacgcugagcagcgacgaccugcucacccuggccgccgaccuggagaagcucaaguccaaggugacccggaccgagcgcccccugagcuccggggucuacaugggcaaccugagcucccagcagcucgaccagcggcgcgcccugcugaaccucaucgggaugacgaacggcagccagggcucccaggcggggcgggacggcguggugcgcgucugggacgugaagaacgccgagcugcugaacaaccaguucgggaccaugccgagccucacccuggccugccugaccaagcagggccagguggaccucaacgacgucgugcaggcccugacggaccuggggcucaucuacaccgcgaaguaccccaacaccagcgaccuggaccggcugacccagucccaccccauccucaacaugaucgacacgaagaaguccagccugaacaucagcggcuacaacuucucccugggcgccgccgugaaggccggggccugcaugcucgacggcgggaacaugcuggagaccaucaaggucagcccccaguccauggacggcauccucaagagcauccugaaggugaagcgcgcgcugggcauguucguguccgacaccccgggggagcggaaccccuacgagaacauccuguacaagaucugccucagcggcgacggguggcccuacaucgccucccgcaccagcaucgucggccgggccugggagaacacggugguggaccuggagaccgacgggaagccccagaagaucggcuccggcaacagcaacaagucccugcagagcgccggguucuccgccggccucaccuacagccagcugaugacccugaaggacgcgaugcugcagcucgacccgaacgccaagacguggauggacaucgaggggcgccccgaggaccccgucgagguggcccuguaccagcccaucuccggcugcuacauccacuucuuccgggagccgaccgaccugaagcaguucaagcaggacgccaaguacagccacgggaucgacaucgccgaccucuucgcggcccagcccggccugaccagcgccgucaucgaggcccugccccgcaacauggugaucacgugccagggcuccgaggacaucaagaagcuccuggagagccaggggcgcaaggacaucaagcugaucgacaucgcccucuccaagaucgacagccggaaguucgagaacgcggugugggaccaguacaaggaccugugccacaugcacaccggcgucgugguggagaagaagaagcgcgggggcaaggaggagaucaccccgcacugcgcccugauggacugcaucauguucgacgccgccgucuccgggggccucaacacccuggugcugcgggcggugcucccccgcgacauggucuuccggaccagcacgccccgcguggugcugugaggacuagucccuguucccagagcccacuuuuuuuucuuuuuuugaaauaaaauagccugucuuucagaucucaaaggcucuuuucagagccaccaaaaaaaaaaaaaaaaaaaaaaaaaaaaaaaaaaaaaaaaaaaaaaaaaaaaaaaaaaaaaaaaagaauu

SEQ ID NO: 19469 - RNA, 2002 nt, Artificial Sequence
  mRNA product Design a-1 (hSL-A64-N5) comprising derived and/or modified sequence from LASV(Togo/2016/7082;Clade VI)__AMR44578__SP-HsALB_NP(2-569) (opt1)
aggagagucccgcagucggcguccagcggcucugcuuguucgugugugugucguugcaggccuuauucaagcuuaccaugaagugggugaccuucaucagccugcucuuccuguucuccagcgccuacuccagcaacuccaaggaggugaaguccuuccuguggacccagagccuccgccgggagcugagcggcuacugcuccaacaucaagcugcaggucgugaaggacgcccaggcccuccugcacgggcuggacuucagcgagguguccaacguccagcgccucaugcggaagcagaagcgcgacgacggcgaccugaagcggcugcgcgaccucaaccaggcggugaacaaccugguggagcucaagagcguccagcagaaguccauccugcggguggggacccugaccagcgacgaccugcucacccuggccgccgaccuggagaagcucaaguccaaggugacccgcaccgagcggccccugagcuccggcgucuacauggggaaccugagcucccagcagcucgaccagcgccgggcccugcugagcaugaucggcauguccggcgggaaccagaacagccagccgaagggcgacgggguggugcgcgucugggacgugaagaacgccgaccuccugaacaaccaguucggcacgaugcccucccugacccucgcgugccugaccaagcagggccagguggaccugaacgacgccguccaggcccucaccgaccuggggcugaucuacacggccaaguaccccaacagcagcgaccucgaccggcugucccagagccaccccauccugaacaugaucgacaccaagaaguccagccucaacaucuccggcuacaacuucagccugggggcggccaucaagaccggcgccugcaugcuggacgggggcaacaugcucgagaccaucaaggugacgccgcagaccauggacggcauccugaaguccauccugaaggugaagcgcagccucgggauguucaucuccgacacccccggcgagcggaaccccuacgagaacauccuguacaagaucugccugagcggggacggcuggcccuacaucgccucccgcaccgccaucaucgggcgggcgugggagaacacggucguggaccucgagagcgacuccaagccgcagaagaucggcagcaacggcuccaacaagagccugcaguccgccggguucgcccccggccugaccuacagccagcucaugacccugaaggacuccaugcugcagcuggaccccaacgccaagaccuggaucgacaucgaggggcgccccgaggacccgguggaggucgcccucuuccagcccaucagcggcugcuacauccacuucuuccgggagcccacggaccugaagcaguucaagcaggacgcgaaguacagccacgggaucgacgugaccgaccuguucgccgcccagcccggccucaccuccgccgugaucgaggcccugccgcgcaacaugguccugaccugccagggcagcgacgacaucaagaagcuccuggacucccaggggcggcgcgacaucaagcugaucgacgugagccucaacaagaucgacucccgcaaguucgagaacgcggucugggaccaguacaaggaccugugccacaugcacacgggcgugguggucgagaagaagaagaagggcgggaaggaggagaucacgccccacugcgcccugcucgacugcaucauguucgacgccgccgugagcgggggccugaacgccaccgugcugcgggcgguccucccccgcgacaugguguuccggaccuccagccccaaggugguccugugaggacuagucccuguucccagagcccacuuuuuuuucuuuuuuugaaauaaaauagccugucuuucagaucucaaaggcucuuuucagagccaccaaaaaaaaaaaaaaaaaaaaaaaaaaaaaaaaaaaaaaaaaaaaaaaaaaaaaaaaaaaaaaaaagaauu

SEQ ID NO: 19470 - RNA, 2002 nt, Artificial Sequence
  mRNA product Design a-1 (hSL-A64-N5) comprising derived and/or modified sequence from LASV(KAK-428;Clade n.d. (VII))__ANH09741__SP-HsALB_NP(2-569) (opt1)
aggagagucccgcagucggcguccagcggcucugcuuguucgugugugugucguugcaggccuuauucaagcuuaccaugaagugggugaccuucaucagccugcucuuccuguucuccagcgccuacuccagcaacuccaaggaggugaaguccuuccuguggacccagagccuccgccgggagcugagcggcuacugcaccaacaucaagcugcaggucgugaaggacgcccaggcccuccugcacgggcuggacuucuccgaggugagcaacguccagcgccucaugcggaagcagaagcgcgacgacaacgaccugaagcggcugcgcgaccucaaccaggcggugaacaaccugguggagcugaaguccguccagcagaaguccgugcucaaggugggcacgcugaacagcgacgaccugcucacccuggccgccgaccuggagaagcucaagagcaaggucgugcggaccgagcgcccccuguccagcgggguguacaugggcaaccuguccagccagcagcucgaccagcggcgcgcccugcugaacaugaucgggauggccggcggcucccaggggaaccagccgagccgggacggcgucgugcgcgugugggacgucaagaacgcggaccuccugaacaaccaguucgggaccaugcccucccugacgcucgccugccugaccaagcagggccagguggaccugaacgacgugguccucgcccugaccgaccuggggcucaucuacaccgccaaguaccccaacagcuccgaccuggaccggcugagccagaaccaccccgugcucaacaugaucgacgugaacaagagcucccugaacaucagcggcuacaacuucucccugggcgcggccgucaaggccggggccugcaugcucgacggcgggaacaugcuggagacgaucaagaucagcccgcagaccguggacggcauccugaaguccauccucaaggugaagcgcgcccugggcauguucgucagcgacacccccggggagcggaaccccuacgagaacauccuguacaaggugugccucuccggcaacggguggcccuacaucgcgagccgcaccuccaucgucggccgggccugggagaacacggugguggaccuggagagcaacaagaaccagccgaaggucgggaacaacggcuccaacaagaugcugcagagcuccggcuucgccaccgggcucaccuacagccagcugaugacccugcgcgacuccaugcugcagcucgaccccacggccaagaccuggaucgacaucgagggccggcccgaggaccccguggagcuggcccuguuccagccgagcuccgggugcuacauccacuucuuccgcgagcccaccgaccucaagcaguucaagcaggacgcgaaguacagccacggcaucgacgugaacgaccuguucuccgcccagcccgggcugaccagcgccguccucgaggcccugccccggaacauggugcugacgugccagggcagcgacgacauccgcaagcuccuggacucccaggaccgcaaggacaucaagcugaucgacaucagccucuccaaggccgacgcgcggaaguucgagaacgacgugugggaccaguucaaggaccugugccacaugcacaccggcaucgucguggagaagaagaagaagggcgggaagcaggagaugaccccgcacugcgcccugcucgacugcaucauguucgacgccgccgugagcgggggccugaacguccccacccugcgcgccgugcuccccacggacaugguguuccggaccaucaccaccaaggucgugcugugaggacuagucccuguucccagagcccacuuuuuuuucuuuuuuugaaauaaaauagccugucuuucagaucucaaaggcucuuuucagagccaccaaaaaaaaaaaaaaaaaaaaaaaaaaaaaaaaaaaaaaaaaaaaaaaaaaaaaaaaaaaaaaaaagaauu

SEQ ID NO: 19471 - RNA, 2002 nt, Artificial Sequence; identical to SEQ ID NO: 19465
  mRNA product Design a-1 (hSL-A64-N5) comprising derived and/or modified sequence from LASV(Pinneo-NIG-1969;Clade I)__AIT17837__SP-HsALB_NP(2-569) (opt1)

SEQ ID NO: 19472 - RNA, 2002 nt, Artificial Sequence
  mRNA product Design a-1 (hSL-A64-N5) comprising derived and/or modified sequence from LASV(ISTH0009-NIG-2011;Clade II)__AIT17405__SP-HsALB_NP(2-569) (opt1)
aggagagucccgcagucggcguccagcggcucugcuuguucgugugugugucguugcaggccuuauucaagcuuaccaugaagugggugaccuucaucagccugcucuuccuguucuccagcgccuacuccagcguguccaaggaggucaagagcuuccuguggacccagucccuccgccgggagcugagcggcuacugcuccaacaucaagcuccagguggugaaggacgcccaggcccugcugcacgggcuggacuucagcgaggucuccaacgugcagcgccucaugcggaagcagaagcgcgacgacagcgaccugaagcggcugcgcgaccucaaccaggcggugaacaaccuggucgagcugaaguccacccagcagaaguccauccuccgggugggcacccugaccagcgacgaccugcucacccuggccgccgaccuggagaagcucaagagcaaggugauccgcaccgagcggccccuguccagcggggucuacaugggcaaccuguccacgcagcagcucgagcagcgccgggcccugcugaacaugaucgggauggugggcggcgcccaggggacccagccgggccgcgacggggugguccgggugugggacgugaagaaccccgaccuccugaacaaccaguucggcaccaugcccagccugacccucgcgugccugacgaagcaggggcaggucgaccugaacgacgccgugcucgcccugaccgaccugggccucaucuacaccgccaaguaccccaacuccagcgaccuggaccgccugucccagagccacccgauccucaacaugguggacaucaagaaguccagccugaacaucagcggcuacaacuucucccugggggcggccgucaaggccggcgccugcaugcucgacgggggcaacaugcuggagaccaucaaggugacgccccagaccauggacggcauccucaagagcauccugaaggugaagcggucccuggggauguucgucagcgacacccccggcgagcgcaaccccuacgagaacauccuguacaagaucugccucuccggggacggcuggccguacaucgccagccggaccuccaucguggggcgcgcgugggagaacacgaccguggaccuggagagcgacggcaagccccagaaggucggcuccgccgggagcaacaagucccugcagagcgccggcuuccccaccgggcucaccuacucccagcugaugacgcugaaggacagcaugaugcagcuggaccccuccgccaagaccuggaucgacaucgagggccggccggaggaccccguggagaucgcccucuaccagcccaugagcgggugcuacauccacuucuuccgcgagcccaccgaccugaagcaguucaagcaggacgcgaaguacucccacggcaucgacgucgccgaccuguucccggcccagcccggccucaccagcgccgugaucgaggcccugccccggaacauggugcugacgugccaggggagcgacgacaucaagcgccuccuggacucccagggccgccgggacaucaagcugaucgacaucgcgcucagcaaggccgacucccgccgguucgagaacgccgucugggaccagugcaaggaccugugccacaugcacaccggggugguggucgagaagaagaagcgcggcgggaaggaggagaucacgccccacugcgcccugauggacugcaucauguacgacgccgcggugagcggcggccucaacaucccggugcugcgggccguccugccccgcgacaugguguuccggaccuccagccccaaggugguccucugaggacuagucccuguucccagagcccacuuuuuuuucuuuuuuugaaauaaaauagccugucuuucagaucucaaaggcucuuuucagagccaccaaaaaaaaaaaaaaaaaaaaaaaaaaaaaaaaaaaaaaaaaaaaaaaaaaaaaaaaaaaaaaaaagaauu

SEQ ID NO: 19473 - RNA, 2002 nt, Artificial Sequence
  mRNA product Design a-1 (hSL-A64-N5) comprising derived and/or modified sequence from LASV(ISTH2010-NIG-2012;Clade II)__AIT17483__SP-HsALB_NP(2-569) (opt1)
aggagagucccgcagucggcguccagcggcucugcuuguucgugugugugucguugcaggccuuauucaagcuuaccaugaagugggugaccuucaucagccugcucuuccuguucuccagcgccuacuccagcgccuccaaggaggugaaguccuuccuguggacccagagccuccgccgggagcugagcggcuacugcuccaacaucaagcugcaggucgugaaggacgcccaggcgcuccugcacgggcuggacuucagcgagguguccaacguccagcgccucaugcggaagcagaagcgcgacgacagcgaccugaagcggcugcgcgaccucaaccaggccgugaacaaccugguggagcugaaguccacccagcagaaguccauccuccgggucggcacgcugaccagcgacgaccugcucacccuggccgccgaccuggagaagcucaagagcaaggugauccgcaccgagcggccccuguccagcgggguguacaugggcaaccuguccacgcagcagcucgagcagcgccgggcccugcugaaccucaucgggauggucggcggcgcgcaggggacccagccgggccgcgacgggguggugcgggucugggacgugaagaaccccgaccugcugaacaaccaguucggcaccaugcccagccucacccuggccugccugacgaagcagggccagguggaccucaacgacgccguccuggcccugaccgaccucgggcugaucuacaccgcgaaguaccccaacuccagcgaccuggaccgccucucccagagccacccgauccugaacaugguggacaccaagaaguccagccugaacaucagcggcuucaacuucucccucggggccgccgugaaggccggcgccugcaugcuggacgggggcaacaugcuggagacgaucaaggucacgccccagaccauggacggcauccucaagagcauccugaaggugaagaagucccuggggauguucgugagcgacacccccggcgagcggaaccccuacgagaacauccucuacaagaucugccuguccggggacggcuggccguacaucgcgagccgcaccuccaucgucgggcgggccugggagaacaccaccguggaccuggagagcgacggcaagccccacaaggugggcaccgccggguccaacaagagccuccaguccgccggcuuccccacggggcugaccuacagccagcugaugacccugaaggacuccaugaugcagcucgaccccagcgccaagaccuggaucgacaucgagggccgcccggaggaccccgucgagaucgcgcuguaccagcccauguccgggugcuacauccacuucuuccgggagcccacggaccugaagcaguucaagcaggacgccaaguacagccacggcaucgacguggccgaccucuucccggcccagcccggccugaccuccgccgucaucgaggcgcugccccgcaacauggugcugaccugccaggggagcgacgacaucaagcggcuccuggacagccagggccgccgcgacaucaagcucaucgacaucgcccuguccaaggccgacagccggcgcuucgagaacgccgugugggaccagugcaaggaccugugccacaugcacaccggggucgugguggagaagaagaagcggggcgggaaggaggagaucacgccccacugcgcccucauggacugcaucauguacgacgcggccgucuccggcggccugaacaucccggugcugcgcgccgugcucccccgggacauggucuuccgcaccagcucccccaagguggugcugugaggacuagucccuguucccagagcccacuuuuuuuucuuuuuuugaaauaaaauagccugucuuucagaucucaaaggcucuuuucagagccaccaaaaaaaaaaaaaaaaaaaaaaaaaaaaaaaaaaaaaaaaaaaaaaaaaaaaaaaaaaaaaaaaagaauu

SEQ ID NO: 19474 - RNA, 2002 nt, Artificial Sequence
  mRNA product Design a-1 (hSL-A64-N5) comprising derived and/or modified sequence from LASV(Lassa virus/H.sapiens-wt/NGA/2015/ISTH_0543;Clade II)__AVO03640__SP-HsALB_NP(2-569) (opt1)
aggagagucccgcagucggcguccagcggcucugcuuguucgugugugugucguugcaggccuuauucaagcuuaccaugaagugggugaccuucaucagccugcucuuccuguucuccagcgccuacuccagcgccuccaaggaggugaaguccuuccuguggacccagagccuccgccgggagcugagcggcuacugcuccaacaucaagcugcaggucgugaaggacgcccaggcgcuccugcacgggcuggacuucagcgagguguccaacguccagcgccucaugcggaagcagaagcgcgacgacagcgaccugaagcggcugcgcgaccucaaccaggccgugaacaaccugguggagcugaaguccacccagcagaaguccauccuccgggucggcacgcugaccagcgacgaccugcucacccuggccgccgaccuggagaagcucaagagcaaggugauccgcaccgagcggccccuguccagcgggguguacaugggcaaccuguccacgcagcagcucgagcagcgccgggcccugcugaacaugaucgggauggucggcggcgcgcaggggacccagccgggccgcgacgggguggugcgggucugggacgugaagaaccccgaccuccugaacaaccaguucggcaccaugcccagccugacccucgccugccugacgaagcagggccagguggaccugaacgacgccguccucgcccugaccgaccuggggcucaucuacaccgcgaaguaccccaacuccagcgaccuggaccgccugucccagagccacccgauccucaacaugguggacaccaagaaguccagccugaacaucagcggcuacaacuucucccugggggccgccgugaaggccggcgccugcaugcucgacgggggcaacaugcuggagacgaucaaggucacgccccagaccauggacggcauccucaagagcauccugaaggugaagaagucccuggggauguucgugagcgacacccccggcgagcggaaccccuacgagaacauccuguacaagaucugccucuccggggacggcuggccguacaucgcgagccgcaccuccaucgucgggcgggccugggagaacaccaccguggaccuggagagcgacggcaagccccagaaggugggcuccgccgggagcaacaagucccugcagagcgccggcuuccccaccgggcucacguacucccagcugaugacccugaaggacagcaugaugcagcuggaccccuccgccaagaccuggaucgacaucgagggccgcccggaggaccccgucgagaucgcgcucuaccagcccaugagcgggugcuacauccacuucuuccgggagcccaccgaccugaagcaguucaagcaggacgccaaguacucccacggcaucgacguggccgaccuguucccggcccagcccggccucacgagcgccgucaucgaggcgcugccccgcaacauggugcugaccugccaggggagcgacgacaucaagcggcuccuggacucccagggccgcaaggacaucaagcugaucgacaucgcccucagcaaggccgacucccgccgguucgagaacgccgugugggaccagugcaaggaccugugccacaugcacaccggggucgugguggagaagaagaagcgcggcgggaaggaggagaucacgccccacugcgcccugauggacugcaucauguacgacgcggccgucagcggcggccucaacaucccggugcugcgggccgugcugccccgcgacauggucuuccggaccuccagccccaagguggugcucugaggacuagucccuguucccagagcccacuuuuuuuucuuuuuuugaaauaaaauagccugucuuucagaucucaaaggcucuuuucagagccaccaaaaaaaaaaaaaaaaaaaaaaaaaaaaaaaaaaaaaaaaaaaaaaaaaaaaaaaaaaaaaaaaagaauu

SEQ ID NO: 19475 - RNA, 2002 nt, Artificial Sequence
  mRNA product Design a-1 (hSL-A64-N5) comprising derived and/or modified sequence from LASV(Lassa virus/H.sapiens-wt/NGA/2016/ISTH_0009;Clade II)__AVO03572__SP-HsALB_NP(2-569) (opt1)
aggagagucccgcagucggcguccagcggcucugcuuguucgugugugugucguugcaggccuuauucaagcuuaccaugaagugggugaccuucaucagccugcucuuccuguucuccagcgccuacuccagcgccuccaaggaggugaaguccuuccuguggacccagagccuccgccgggagcugagcggcuacugcuccaacaucaagcugcaggucgugaaggacgcccaggcgcuccugcacgggcuggacuucagcgagguguccaacguccagcgccucaugcggaagcagaagcgcgacgacagcgaccugaagcggcugcgcgaccucaaccaggccgugaacaaccugguggagcugaaguccacccagcagaaguccauccuccgggucggcacgcugaccagcgacgaccugcucacccuggccgccgaccuggagaagcucaagagcaaggugauccgcaccgagcggccccuguccagcgggguguacaugggcaaccuguccacgcagcagcucgagcagcgccgggcccugcugaacaugaucgggauggucggcggcgcgcaggggacccagccgggccgcgacgggguggugcgggucugggacgugaagaaccccgaccuccugaacaaccaguucggcaccaugcccagccugacccucgccugccugacgaagcagggccagguggaccugaacgacgccguccucgcccugaccgaccuggggcucaucuacaccgcgaaguaccccaacuccagcgaccuggaccgccugucccagagccacccgauccucaacaugguggacaccaagaaguccagccugaacaucagcggcuacaacuucucccugggggccgccgugaaggccggcgccugcaugcucgacgggggcaacaugcuggagacgaucaaggucacgccccagaccauggacggcauccucaagagcauccugaaggugaagaagucccuggggauguucgugagcgacacccccggcgagcggaaccccuacgagaacauccuguacaagaucugccucuccggggacggcuggccguacaucgcgagccgcaccuccaucgucgggcgggccugggagaacaccaccguggaccuggagagcgacggcaagccccagaaggugggcuccgccgggagcaacaagucccugcagagcgccggcuuccccaccgggcucacguacucccagcugaugacccugaaggacagcaugaugcagcuggaccccuccgccaagaccuggaucgacaucgagggccgcccggaggaccccgucgagaucgcgcucuaccagcccaugagcgggugcuacauccacuucuuccgggagcccaccgaccugaagcaguucaagcaggacgccaaguacucccacggcaucgacguggccgaccuguucccggcccagcccggccucacgagcgccgucaucgaggcgcugccccgcaacauggugcugaccugccaggggagcgacgacaucaagcggcuccuggacucccagggccgccgcgacaucaagcugaucgacaucgcccucagcaaggccgacucccggcgcuucgagaacgccgugugggaccagugcaaggaccugugccacaugcacaccggggucgugguggagaagaagaagcggggcgggaaggaggagaucacgccccacugcgcccugauggacugcaucauguacgacgcggccgucagcggcggccucaacaucccggugcugcgcgccgugcugccccgggacauggucuuccgcaccuccagccccaagguggugcucugaggacuagucccuguucccagagcccacuuuuuuuucuuuuuuugaaauaaaauagccugucuuucagaucucaaaggcucuuuucagagccaccaaaaaaaaaaaaaaaaaaaaaaaaaaaaaaaaaaaaaaaaaaaaaaaaaaaaaaaaaaaaaaaaagaauu

SEQ ID NO: 19476 - RNA, 2002 nt, Artificial Sequence
  mRNA product Design a-1 (hSL-A64-N5) comprising derived and/or modified sequence from LASV(Lassa virus/H.sapiens-wt/NGA/2016/ISTH_0017;Clade II)__AVO03568__SP-HsALB_NP(2-569) (opt1)
aggagagucccgcagucggcguccagcggcucugcuuguucgugugugugucguugcaggccuuauucaagcuuaccaugaagugggugaccuucaucagccugcucuuccuguucuccagcgccuacuccagcgccuccaaggaggugaaguccuuccuguggacccagagccuccgccgggagcugagcggcuacugcuccagcaucaagcugcaggucgugaaggacgcccaggcgcuccugcacgggcuggacuucuccgaggugagcaacguccagcgccucaugcggaagcagaagcgcgacgacuccgaccugaagcggcugcgcgaccucaaccaggccgugaacaaccugguggagcucaagagcacccagcagaaguccauccugcgggucggcacgcugaccagcgacgaccugcucacccuggccgccgaccuggagaagcucaaguccaaggugauccgcaccgagcggccccugagcuccgggguguacaugggcaaccugagcacgcagcagcucgagcagcgccgggcccugcugaacaugaucgggauggcgggcggcgcccaggggacccagccgggccgcgacggggucgugcgggugugggacgucaagaaccccgaccuccugaacaaccaguucggcaccaugcccucccugacccucgccugccugacgaagcagggccagguggaccugaacgacgccgugcucgcgcugaccgaccuggggcucaucuacaccgccaaguaccccaacagcuccgaccuggaccgccugagccagagccacccgauccucaacauggucgacaccaagaaguccagccugaacaucuccggcuacaacuucagccugggggccgccgugaaggccggcgcgugcaugcucgacgggggcaacaugcuggagacgaucaaggugacgccccagaccauggacggcauccugaaguccauccucaaggucaagcggagccuggggauguucguguccgacgcccccggcgagcgcaaccccuacgagaacauccuguacaagaucugccucagcggggacggcuggccguacaucgccucccggaccagcaucguggggcgcgccugggagaacaccaccgucgaccuggaguccgacggcaagccccagaaggugggcgccaccgggagcaacaagucccugcagagcgcgggcuuccccaccgggcucacguacucccagcugaugacccugaaggacagcaugaugcagcuggaccccuccgccaagaccuggaucgacaucgagggccggccggaggaccccguggaggucgcccucuaccagcccgugagcgggugcuacauccacuucuuccgcgagcccaccgaccugaagcaguucaagcaggacgccaaguacucccacggcaucgacgucgccgaccuguucccggcgcagcccggccucacgagcgccgugaucgaggcccugccccggaacauggugcugaccugccaggggagcgacgacaucaagaagcuccuggacucccagggccgcaaggacaucaagcugaucgacaucgcccucagcaaggccgacucccgccgguucgagaacgcggucugggaccagugcaaggaccugugccacaugcacaccggggugguggucgagaagaagaagcgcggcgggaaggaggagaucacgccccacugcgcccugauggacugcaucauguacgacgccgccgugagcggcggccucaacaucccggugcugcgggcgguccugccccgcgacaugguguuccggaccuccagccccaaggugguccucugaggacuagucccuguucccagagcccacuuuuuuuucuuuuuuugaaauaaaauagccugucuuucagaucucaaaggcucuuuucagagccaccaaaaaaaaaaaaaaaaaaaaaaaaaaaaaaaaaaaaaaaaaaaaaaaaaaaaaaaaaaaaaaaaagaauu

SEQ ID NO: 19477 - RNA, 2002 nt, Artificial Sequence
  mRNA product Design a-1 (hSL-A64-N5) comprising derived and/or modified sequence from LASV(Lassa virus/H.sapiens-wt/NGA/2018/ISTH_0959;Clade II)__AVV65100__SP-HsALB_NP(2-569) (opt1)
aggagagucccgcagucggcguccagcggcucugcuuguucgugugugugucguugcaggccuuauucaagcuuaccaugaagugggugaccuucaucagccugcucuuccuguucuccagcgccuacuccagcgccuccaaggaggugaaguccuuccuguggacccagagccuccgccgggagcugagcggcuacugcuccaacaucaagcugcaggucgugaaggacgcccaggcgcuccugcacgggcuggacuucagcgagguguccaacguccagcgccucaugcggaagcagaagcgcgacgacagcgaccugaagcggcugcgcgaccucaaccaggccgugaacaaccugguggagcugaaguccacccagcagaaguccauccuccgggucggcacccugaccagcgacgaccugcucacccuggccgccgaccuggagaagcucaagagcaaggugauccgcaccgagcggccccuguccagcgggguguacaugggcaaccuguccacgcagcagcucgagcagcgccgggcccugcugaaccucaucgggauggucggcggcgcgcaggggacccagccgggccgcgacgggguggugcgggucugggacgugaagaaccccgaccugcugaacaaccaguucggcaccaugcccagccucacccuggccugccugacgaagcagggccagguggaccucaacgacgucgugcuggcccugaccgaccucgggcugaucuacaccgccaaguaccccaacuccagcgaccuggaccgccucucccagagccacccgauccugaacaugguggacaccaagaaguccagccugaacaucagcggcuucaacuucucccucggggcggccgucaaggccggcgccugcaugcuggacgggggcaacaugcuggagacgaucaaggugacgccccagaccauggacggcauccucaagagcauccugaaggugaagaagucccuggggauguucgucagcgacacccccggcgagcggaaccccuacgagaacauccucuacaagaucugccuguccggggacggcuggccguacaucgccagccgcaccuccaucguggggcgggcgugggagaacaccaccguggaccuggagagcgacggcaagccccacaaggucggcaccgccggguccaacaagagccuccaguccgccggcuuccccacggggcugaccuacagccagcugaugacccugaaggacuccaugaugcagcucgaccccagcgccaagaccuggaucgacaucgagggccgcccggaggaccccguggagaucgcccuguaccagcccauguccgggugcuacauccacuucuuccgggagcccacggaccugaagcaguucaagcaggacgcgaaguacagccacggcaucgacgucgccgaccucuucccggcccagcccggccugaccuccgccgugaucgaggcccugccccgcaacauggugcugaccugccaggggagcgacgacaucaagcggcuccuggacagccagggccgcaaggacaucaagcucaucgacaucgcgcuguccaagaccgacagccgccgguucgagaacgccgucugggaccagugcaaggaccugugccacaugcacacgggggugguggucgagaagaagaagcgcggcgggaaggaggagaucacgccccacugcgcccucauggacugcaucauguacgacgccgccguguccggcggccugaacaucccggugcugcgggcgguccucccccgcgacaugguguuccggaccagcucccccaaggugguccugugaggacuagucccuguucccagagcccacuuuuuuuucuuuuuuugaaauaaaauagccugucuuucagaucucaaaggcucuuuucagagccaccaaaaaaaaaaaaaaaaaaaaaaaaaaaaaaaaaaaaaaaaaaaaaaaaaaaaaaaaaaaaaaaaagaauu

SEQ ID NO: 19478 - RNA, 2002 nt, Artificial Sequence
  mRNA product Design a-1 (hSL-A64-N5) comprising derived and/or modified sequence from LASV(LASV003-NIG-2008;Clade II)__AIT17581__SP-HsALB_NP(2-569) (opt1)
aggagagucccgcagucggcguccagcggcucugcuuguucgugugugugucguugcaggccuuauucaagcuuaccaugaagugggugaccuucaucagccugcucuuccuguucuccagcgccuacuccagcgccuccaaggaggugaaguccuuccuguggacccagagccuccgccgggagcugagcggcuacugcuccagcaucaagcugcaggucgugaaggacgcccaggcgcuccugcacgggcuggacuucuccgaggugagcaacguccagcgccucaugcggaagcagaagcgcgacgacuccgaccugaagcggcugcgcgaccucaaccaggccgugaacaaccugguggagcucaagagcacccagcagaaguccguccugcgggugggcacccugaccagcgacgaccugcucacccuggccgccgaccuggagaagcucaaguccaaggugauccgcaccgagcggccccugagcuccggggucuacaugggcaaccugagcgcccagcagcucgagcagcgccggacgcugcugaacaugaucgggauggugggcggcgcgcaggggacccagccgggccgcgacggggugguccgggugugggacgugaagaaccccgaccuccugaacaaccaguucggcaccaugcccucccugacccucgccugccugacgaagcaggggcaggucgaccugaacgacguggugcucgcccugaccgaccugggccucaucuacaccgccaaguaccccaacagcuccgaccuggaccgccugagccagagccacccgauccucuccauggucgacaccaagaaguccagccugaacaucagcggcuacaacuucucccugggggcggccgugaaggccggcgccugcaugcucgacgggggcaacaugcuggagacgaucaaggugacgccccagaccauggacggcauccucaagagcauccugaaggucaagaagucccuggggauguucgugagcgacacccccggcgagcggaaccccuacgagaacauccuguacaagaucugccucuccggggacggcuggccguacaucgccagccgcaccuccaucguggggcgggcgugggagaacaccaccgucgaccuggagagcgacggcaagccccagaaggugggcaccgccggguccaacaagagccugcaguccgccggcuuccccacggggcucaccuacagccagcugaugacccugaaggacuccaugaugcagcuggaccccagcgccaagaccuggaucgacaucgagggccgcccggaggaccccgucgagaucgcccucuaccagcccauguccgggugcuacauccacuucuuccgggagcccacggaccugaagcaguucaagcaggacgcgaaguacagccacggcaucgacgugaccgaccuguucccggcccagcccggccucaccagcgccgugaucgaggcccugccccgcaacaugguccugaccugccagggguccgacgacaucaagcggcuccuggacagccagggccgccgcgacaucaagcugaucgacaucgcccucuccaaggcggacagccggcgcuucgagaacgccgugugggaccagugcaaggaccugugccacaugcacacggggguggucguggagaagaagaagcggggcgggaaggaggagaucacgccccacugcgcccugauggacugcaucauguacgacgccgccguguccggcggccucaacaucccgguccugcgcgcggugcugccccgggacaugguguuccgcaccagcucccccaaggucgugcucugaggacuagucccuguucccagagcccacuuuuuuuucuuuuuuugaaauaaaauagccugucuuucagaucucaaaggcucuuuucagagccaccaaaaaaaaaaaaaaaaaaaaaaaaaaaaaaaaaaaaaaaaaaaaaaaaaaaaaaaaaaaaaaaaagaauu

SEQ ID NO: 19479 - RNA, 2002 nt, Artificial Sequence
  mRNA product Design a-1 (hSL-A64-N5) comprising derived and/or modified sequence from LASV(LASV035-NIG-2009;Clade II)__AIT17589__SP-HsALB_NP(2-569) (opt1)
aggagagucccgcagucggcguccagcggcucugcuuguucgugugugugucguugcaggccuuauucaagcuuaccaugaagugggugaccuucaucagccugcucuuccuguucuccagcgccuacuccagcgccuccaaggaggugaaguccuuccuguggacccagagccuccgccgggagcugagcggcuacugcuccagcaucaagcugcaggucgugaaggacgcccaggcgcuccugcacgggcuggacuucuccgaggugagcaacguccagcgccucaugcggaagcagaagcgcgacgacuccgaccugaagcggcugcgcgaccucaaccaggccgugaacaaccugguggagcucaagagcacccagcagaaguccauccugcgggucggcacgcugaccagcgacgaccugcucacccuggccgccgaccuggagaagcucaaguccaaggugauccgcaccgagcggccccugagcuccgggguguacaugggcaaccugagcgcccagcagcucgagcagcgccgggcgcugcugaacaugaucgggauggucggcggcgcccaggggacgcagccgggccgcgacgggguggugcgggucugggacgugaagaaccccgaccuccugaacaaccaguucggcaccaugcccucccugacccucgccugccugaccaagcagggccagguggaccugaacgacgccguccucgcgcugacggaccuggggcucaucuacaccgccaaguaccccaacagcuccgaccuggaccgccugagccagagccacccgauccucaacaugguggacaccaagaaguccagccugaacaucuccggcuacaacuucagccugggggccgccgugaaggccggcgcgugcaugcucgacgggggcaacaugcuggagaccaucaaggucacgccccagaccauggacggcauccugaaguccauccucaaggugaagcggagccuggggauguucguguccgacacccccggcgagcgcaaccccuacgagaacauccuguacaagaucugccucagcggggacggcuggccguacaucgccucccggaccagcaucgucgggcgcgccugggagaacacgaccguggaccuggaguccgacggcaagccccagaaggugggcaccaccgggagcaacaagucccugcagagcgccggcuuccccacggggcucaccuacucccagcugaugacccugaaggacagcaugaugcagcuggaccccuccgccaagaccuggaucgacaucgagggccggccggaggaccccgucgagaucgcgcucuaccagcccaugagcgggugcuacauccacuucuuccgcgagcccacggaccugaagcaguucaagcaggacgccaaguacucccacggcaucgacguggccgaccuguucccggcccagcccggccucaccagcgccgucaucgaggcgcugccccggaacauggugcugaccugccaggggagcgacgacaucaagaagcuccuggacucccagggccgccgcgacaucaagcugaucgacaucgcccucagcaaggccgacucccggaaguucgagaacgccgugugggaccagugcaaggaccugugccacaugcacaccggggucgugguggagaagaagaagcgcggcgggaaggaggagaucacgccccacugcgcccugauggacugcaucauguacgacgcggccgucagcggcggccucaacaucccggugcugcgggccgugcugccccgcgacauggucuuccggaccuccagccccaagguggugcucugaggacuagucccuguucccagagcccacuuuuuuuucuuuuuuugaaauaaaauagccugucuuucagaucucaaaggcucuuuucagagccaccaaaaaaaaaaaaaaaaaaaaaaaaaaaaaaaaaaaaaaaaaaaaaaaaaaaaaaaaaaaaaaaaagaauu

SEQ ID NO: 19480 - RNA, 2002 nt, Artificial Sequence
  mRNA product Design a-1 (hSL-A64-N5) comprising derived and/or modified sequence from LASV(LASV1000-NIG-2009;Clade II)__AIT17783__SP-HsALB_NP(2-569) (opt1)
aggagagucccgcagucggcguccagcggcucugcuuguucgugugugugucguugcaggccuuauucaagcuuaccaugaagugggugaccuucaucagccugcucuuccuguucuccagcgccuacuccagcgccuccaaggaggugaaguccuuccuguggacccagagccuccgccgggagcugagcggcuacugcuccaacaucaagcugcaggucgugaaggacgcccaggcgcuccugcacgggcuggacuucagcgagguguccaacguccagcgccucaugcggaagcagaagcgcgacgacagcgaccugaagcggcugcgcgaccucaaccaggccgugaacaaccugguggagcugaaguccacccagcagaaguccauccuccgggucggcacgcugaccagcgacgaccugcucacccuggccgccgaccuggagaagcucaagagcaaggugauccgcaccgagcggccccuguccagcgggguguacaugggcaaccuguccacgcagcagcucgagcagcgccgggcccugcugaacaugaucgggauggucggcggcgcgcaggggacccagccgggccgcgacgggguggugcgggucugggacgugaagaaccccgaccuccugaacaaccaguucggcaccaugcccagccugacccucgccugccugacgaagcagggccagguggaccugaacgacgucgugcucgcccugaccgaccuggggcucaucuacaccgccaaguaccccaacuccagcgaccuggaccgccugucccagagccacccgauccucaacaugguggacaccaagaaguccagccugaacaucagcggcuacaacuucucccugggggcggccgucaaggccggcgccugcaugcucgacgggggcaacaugcuggagacgaucaaggugacgccccagaccauggacggcauccucaagagcauccugaaggugaagaagucccuggggauguucgucagcgacacccccggcgagcggaaccccuacgagaacauccuguacaagaucugccucuccggggacggcuggccguacaucgccagccgcaccuccaucguggggcgggcgugggagaacaccaccguggaccuggagagcgacggcaagccccagaaggucggcaccgccggguccaacaagagccugcaguccgccggcuuccccacggggcucaccuacagccagcugaugacccugaaggacuccaugaugcagcuggaccccagcgccaagaccuggaucgacaucgagggccgcccggaggaccccguggagaucgcccucuaccagcccgucuccgggugcuacauccacuucuuccgggagcccacggaccugaagcaguucaagcaggacgcgaaguacagccacggcaucgacguggccgaccuguucccggcccagcccggccucaccuccgccgugaucgaggcccugccccgcaacaugguccugaccugccaggggagcgacgacaucaagcggcuccuggacagccagggccgccgcgacaucaagcugaucgacaucgcgcucuccaaggccgacagccggcgcuucgagaacgccgugugggaccagugcaaggaccugugccacaugcacaccgggguggucguggagaagaagaagcggggcgggaaggaggagaucacgccccacugcgcccugauggacugcaucauguacgacgccgcgguguccggcggccucaacaucccgguccugcgcgccgugcugccccgggacaugguguuccgcaccagcucccccaaggucgugcucugaggacuagucccuguucccagagcccacuuuuuuuucuuuuuuugaaauaaaauagccugucuuucagaucucaaaggcucuuuucagagccaccaaaaaaaaaaaaaaaaaaaaaaaaaaaaaaaaaaaaaaaaaaaaaaaaaaaaaaaaaaaaaaaaagaauu

SEQ ID NO: 19481 - RNA, 2002 nt, Artificial Sequence
  mRNA product Design a-1 (hSL-A64-N5) comprising derived and/or modified sequence from LASV(LASV221-NIG-2010;Clade II)__AIT17625__SP-HsALB_NP(2-569) (opt1)
aggagagucccgcagucggcguccagcggcucugcuuguucgugugugugucguugcaggccuuauucaagcuuaccaugaagugggugaccuucaucagccugcucuuccuguucuccagcgccuacuccagcgccuccaaggaggugaaguccuuccuguggacccagagccuccgccgggagcugagcggcuacugcuccagcaucaagcugcaggucgugaaggacgcccaggcgcuccugcacgggcuggacuucuccgaggugagcaacguccagcgccucaugcggaagcagcgccgggacgacuccgaccugaagcgccugcgggaccucaaccaggccgugaacaaccugguggagcucaagagcacccagcagaaguccauccugcgcgucggcacgcugaccagcgacgaccugcucacccuggccgccgaccuggagaagcucaaguccaaggugauccggaccgagcgcccccugagcuccgggguguacaugggcaaccugagcacgcagcagcucgagcagcggcgcgcccugcugaacaugaucgggauggucggcggcgcgcaggggacccagccgggccgggacgggguggugcgcgucugggacgugaagaaccccgaccuccugaacaaccaguucggcaccaugcccucccugacccucgccugccugacgaagcagggccagguggaccugaacgacgccguccucgcccugaccgaccuggggcucaucuacaccgcgaaguaccccaacagcuccgaccuggaccggcugagccagagccacccgauccucaacaugguggacaccaagaaguccagccugaacaucuccggcuacaacuucagccugggggccgccgugaaggccggcgccugcaugcucgacgggggcaacaugcuggagacgaucaaggucacgccccagaccguggacggcauccugaaguccauccucaaggugaagcgcagccuggggauguucgucuccgacacccccggcgagcggaaccccuacgagaacauccuguacaagaucugccucagcggggacggcuggccguacaucgcgucccgcaccagcaucguggggcgggccugggagaacaccaccguggaccuggaguccgacggcaagccccagaaggucggcaccgccgggagcaacaagucccugcagagcgccggcuuccccacggggcucaccuacucccagcugaugacccugaaggacagcaugaugcagcuggaccccuccgccaagaccuggaucgacaucgagggccgcccggaggaccccguggagaucgcgcucuaccagcccaugagcgggugcuacauccacuucuuccgggagcccacggaccugaagcaguucaagcaggacgccaaguacucccacggcaucgacgucgccgaccuguucccggcccagcccggccucaccagcgccgugaucgaggcgcugccccgcaacauggugcugaccugccaggggagcgacgacaucaagcgccuccuggacucccagggccggcgcgacaucaagcugaucgacaucgcccucagcaaggccgacucccggaaguucgagaacgccgucugggaccagugcaaggaccugugccacaugcacaccggggugguggucgagaagaagaagcgcggcgggaaggaggagaucacgccccacugcgcccugauggacugcaucauguacgacgcggccgugagcggcggccucaacaucccggugcugcgggccguccugccccgcgacaugguguuccggaccuccagccccaaggugguccucugaggacuagucccuguucccagagcccacuuuuuuuucuuuuuuugaaauaaaauagccugucuuucagaucucaaaggcucuuuucagagccaccaaaaaaaaaaaaaaaaaaaaaaaaaaaaaaaaaaaaaaaaaaaaaaaaaaaaaaaaaaaaaaaaagaauu

SEQ ID NO: 19482 - RNA, 2002 nt, Artificial Sequence
  mRNA product Design a-1 (hSL-A64-N5) comprising derived and/or modified sequence from LASV(LASV237-NIG-2010;Clade II)__AIT17639__SP-HsALB_NP(2-569) (opt1)
aggagagucccgcagucggcguccagcggcucugcuuguucgugugugugucguugcaggccuuauucaagcuuaccaugaagugggugaccuucaucagccugcucuuccuguucuccagcgccuacuccagcgccuccaaggaggugaaguccuuccuguggacccagagccuccgccgggagcugagcggcuacugcuccaacaucaagcugcaggucgugaaggacgcccaggcgcuccugcacgggcuggacuucagcgagguguccaacguccagcgccucaugcggaagcagaagcgcgacgacagcgaccugaagcggcugcgcgaccucaaccaggccgugaacaaccugguggagcugaaguccacccagcagaaguccauccuccgggucggcacccugaccagcgacgaccugcucacccuggccgccgaccuggagaagcucaagagcaaggugauccgcaccgagcggccccuguccagcgggguguacaugggcaaccuguccacgcagcagcucgagcagcgccgggcccugcugaacaugaucgggauggucggcggcgcgcaggggacccagccgggccgcgacgggguggugcgggucugggacgugaagaaccccgaccuccugaacaaccaguucggcaccaugcccagccugacccucgccugccugacgaagcagggccagguggaccugaacgacgccguccucgcccugaccgaccuggggcucaucuacaccgcgaaguaccccaacuccagcgaccuggaccgccugucccagagccacccgauccucaacaugguggacaucaagaaguccagccugaacaucagcggcuacaacuucucccugggggccgccgugaaggccggcgccugcaugcucgacgggggcaacaugcuggagaccaucaaggucacgccccagaccauggacggcauccucaagagcauccugaaggugaagcggucccuggggauguucgugagcgacacccccggcgagcgcaaccccuacgagaacauccuguacaagaucugccucuccggggacggcuggccguacaucgcgagccggaccuccaucgucgggcgcgccugggagaacacgaccguggaccuggagagcgacggcaagccccagaaggugggcuccgccgggagcaacaagucccugcagagcgccggcuuccccaccgggcucaccuacucccagcugaugacgcugaaggacagcaugaugcagcuggaccccuccgccaagaccuggaucgacaucgagggccggccggaggaccccgucgagaucgcgcucuaccagcccaugagcgggugcuacauccacuucuuccgcgagcccaccgaccugaagcaguucaagcaggacgccaaguacucccacggcaucgacguggccgaccuguucccggcccagcccggccucaccagcgccgucaucgaggcgcugccccggaacauggugcugacgugccaggggagcgacgacaucaagcgccuccuggacucccagggccgccgggacaucaagcugaucgacaucgcccucagcaaggccgacucccgccgguucgagaacgccgugugggaccagugcaaggaccugugccacaugcacaccggggucgugguggagaagaagaagcgcggcgggaaggaggagaucacgccccacugcgcccugauggacugcaucauguacgacgcggccgucagcggcggccucaacaucccggugcugcgggccgugcugccccgcgacauggucuuccggaccuccagccccaagguggugcucugaggacuagucccuguucccagagcccacuuuuuuuucuuuuuuugaaauaaaauagccugucuuucagaucucaaaggcucuuuucagagccaccaaaaaaaaaaaaaaaaaaaaaaaaaaaaaaaaaaaaaaaaaaaaaaaaaaaaaaaaaaaaaaaaagaauu

SEQ ID NO: 19483 - RNA, 2002 nt, Artificial Sequence
  mRNA product Design a-1 (hSL-A64-N5) comprising derived and/or modified sequence from LASV(LASV253-NIG-2011;Clade II)__AIT17671__SP-HsALB_NP(2-569) (opt1)
aggagagucccgcagucggcguccagcggcucugcuuguucgugugugugucguugcaggccuuauucaagcuuaccaugaagugggugaccuucaucagccugcucuuccuguucuccagcgccuacuccagcgccuccaaggaggugaaguccuuccuguggacccagagccuccgccgggagcugagcggcuacugcuccagcaucaagcugcaggucgugaaggacgcccaggcgcuccugcacgggcuggacuucuccgaggugagcaacguccagcgccucaugcggaagcagaagcgcgacgacuccgaccugaagcggcugcgcgaccucaaccaggccgugaacaaccugguggagcucaagagcacccagcagaaguccguccugcgggugggcacccugaccagcgacgaccugcucacccuggccgccgaccuggagaagcucaaguccaaggugauccgcaccgagcggccccugagcuccggggucuacaugggcaaccugagcacgcagcagcucgagcagcgccgggcccugcugaacaugaucgggauggugggcggcgcgcaggggacccagccgggccgcgacggggugguccgggugugggacgugaagaaccccgaccuccugaacaaccaguucggcaccaugcccucccugacccucgccugccugacgaagcaggggcaggucgaccugaacgacguggugcucgcccugaccgaccugggccucaucuacaccgccaaguaccccaacagcuccgaccuggaccgccugagccagagccacccgauccucaacauggucgacaccaagaaguccagccugaacaucuccggcuacaacuucagccugggggcggccgugaaggccggcgccugcaugcucgacgggggcaacaugcuggagacgaucaaggugacgccccagaccauggacggcauccugaaguccauccucaaggucaagaagucccuggggauguucgugagcgacacccccggcgagcggaaccccuacgagaacauccuguacaagaucugccucagcggggacggcuggccguacaucgccucccgcaccagcaucguggggcgggcgugggagaacaccaccgucgaccuggaguccgacggcaagccccagaaggugggcaccgccgggagcaacaagucccugcagagcgccggcuuccccacggggcucaccuacucccagcugaugacccugaaggacagcaugaugcagcuggaccccuccgccaagaccuggaucgacaucgagggccgcccggaggaccccgucgagaucgcccucuaccagcccaugagcgggugcuacauccacuucuuccgggagcccacggaccugaagcaguucaagcaggacgcgaaguacucccacggcaucgacgugaccgaccuguucccggcccagcccggccucaccagcgccgugaucgaggcccugccccgcaacaugguccugaccugccaggggagcgacgacaucaagcggcuccuggacucccagggccgccgcgacaucaagcugaucgacaucgcccucagcaaggcggacucccggcgcuucgagaacgccgugugggaccagugcaaggaccugugccacaugcacacggggguggucguggagaagaagaagcggggcgggaaggaggagaucacgccccacugcgcccugauggacugcaucauguacgacgccgccgugagcggcggccucaacaucccgguccugcgcgcggugcugccccgggacaugguguuccgcaccuccagccccaaggucgugcucugaggacuagucccuguucccagagcccacuuuuuuuucuuuuuuugaaauaaaauagccugucuuucagaucucaaaggcucuuuucagagccaccaaaaaaaaaaaaaaaaaaaaaaaaaaaaaaaaaaaaaaaaaaaaaaaaaaaaaaaaaaaaaaaaagaauu

SEQ ID NO: 19484 - RNA, 2002 nt, Artificial Sequence
  mRNA product Design a-1 (hSL-A64-N5) comprising derived and/or modified sequence from LASV(LASV254-NIG-2011;Clade II)__AIT17675__SP-HsALB_NP(2-569) (opt1)
aggagagucccgcagucggcguccagcggcucugcuuguucgugugugugucguugcaggccuuauucaagcuuaccaugaagugggugaccuucaucagccugcucuuccuguucuccagcgccuacuccagcgccuccaaggaggugaaguccuuccuguggacccagagccuccgccgggagcugagcggcuacugcuccagcaucaagcugcaggucgugaaggacgcccaggcgcuccugcacgggcuggacuucuccgaggugagcaacguccagcgccucaugcggaagcagaagcgcgacgacuccgaccugaagcggcugcgcgaccucaaccaggccgugaacaaccugguggagcucaagagcacccagcagaaguccguccugcgggugggcacgcugaccagcgacgaccugcucacccuggccgccgaccuggagaagcucaaguccaaggugauccgcaccgagcggccccugagcuccggggucuacaugggcaaccugagcacgcagcagcucgagcagcgccgggcccugcugaacaugaucgggauggugggcggcgcgcaggggacccagccgggccgcgacggggugguccgggugugggacgugaagaaccccgaccuccugaacaaccaguucggcaccaugcccucccugacccucgccugccugacgaagcaggggcaggucgaccugaacgacgccgugcucgcccugaccgaccugggccucaucuacaccgcgaaguaccccaacagcuccgaccuggaccgccugagccagagccacccgauccucaacaugguggacaccaagaaguccagccugaacaucuccggcuacaacuucagccugggggccgccgucaaggccggcgccugcaugcucgacgggggcaacaugcuggagacgaucaaggugacgccccagaccauggacggcauccugaaguccauccucaaggugaagaagucccuggggauguucgucagcgacacccccggcgagcggaaccccuacgagaacauccuguacaagaucugccucagcggggacggcuggccguacaucgcgucccgcaccagcaucguggggcgggccugggagaacaccaucguggaccuggaguccgacggcaagccccagaaggucggcaccgccgggagcaacaagucccugcagagcgccggcuuccccaccgggcucacguacucccagcugaugacccugaaggacagcaugaugcagcuggaccccuccgccaagaccuggaucgacaucgagggccgcccggaggaccccguggagaucgcgcucuaccagcccaugagcgggugcuacauccacuucuuccgggagcccaccgaccugaagcaguucaagcaggacgccaaguacucccacggcaucgacgucgccgaccuguucccggcccagcccggccucacgagcgccgugaucgaggcgcugccccgcaacauggugcugaccugccaggggagcgacgacaucaagcggcuccuggacucccagggccgccgcgacaucaagcugaucgacaucgcccucagcaaggccgacucccggcgcuucgagaacgccgucugggaccagugcaaggaccugugccacaugcacaccggggugguggucgagaagaagaagcggggcgggaaggaggagaucacgccccacugcgcccugauggacugcaucauguacgacgcggccgugagcggcggccucaacaucccggugcugcgcgccguccugccccgggacaugguguuccgcaccuccagccccaaggugguccucugaggacuagucccuguucccagagcccacuuuuuuuucuuuuuuugaaauaaaauagccugucuuucagaucucaaaggcucuuuucagagccaccaaaaaaaaaaaaaaaaaaaaaaaaaaaaaaaaaaaaaaaaaaaaaaaaaaaaaaaaaaaaaaaaagaauu

SEQ ID NO: 19485 - RNA, 2002 nt, Artificial Sequence
  mRNA product Design a-1 (hSL-A64-N5) comprising derived and/or modified sequence from LASV(Nig08-04;Clade II)__ADU56611__SP-HsALB_NP(2-569) (opt1)
aggagagucccgcagucggcguccagcggcucugcuuguucgugugugugucguugcaggccuuauucaagcuuaccaugaagugggugaccuucaucagccugcucuuccuguucuccagcgccuacuccagcgccuccaaggaggugaaguccuuccuguggacccagagccuccgccgggagcugagcggcuacugcuccaacaucaagcugcaggucgugaaggacgcccaggcgcuccugcacgggcuggacuucagcgagguguccaacguccagcgccucaugcggaagcagaagcgcgacgacggcgaccugaagcggcugcgcgaccucaaccaggccgugaacaaccugguggagcucaagagcacccagcagaaguccguccugcggguggggacccugaccagcgacgaccugcucacccuggccgccgaccuggagaagcucaaguccaaggugauccgcaccgagcggccccugagcuccggcgucuacauggggaaccugagcacgcagcagcucgagcagcgcaaggcccugcuguccaugaucggcauggugggcggggcgcagggcacccagccggggcgggacggcgugguccgcgugugggacgugaagaaccccgaccuccugaacaaccaguucgggaccaugcccagccugacccucgccugccugacgaagcagggccaggucgaccugaacgacgccgugcucgcccugaccgaccugggccucaucuacaccgcgaaguaccccaacuccagcgaccuggaccggcugucccagagccacccgauccucaacaugguggacaccaagaaguccagccugaacaucagcggguacaacuucucccugggcgccgccgucaaggccggggccugcaugcucgacggcggcaacaugcuggagacgaucaaggugacgccccagaccauggacgggauccucaagagcauccugaaggugaagcgcucccugggcauguucgucagcgacacccccggggagcggaaccccuacgagaacauccuguacaagaucugccucuccggcgacggguggccguacaucgcgagccgcaccuccaucgugggccgggccugggagaacaccaccguggaccuggagagcgacggcaagccccagaaggucgggaccgccggcuccaacaagagccugcaguccgccggguuccccacgggccucaccuacagccagcugaugacccugaaggacuccaugaugcagcuggaccccagcgccaagaccuggaucgacaucgaggggcgcccggaggaccccguggagaucgcgcucuaccagcccauguccggcugcuacauccacuucuuccgggagcccacggaccugaagcaguucaagcaggacgccaaguacagccacggcaucgacgucaccgaccuguucuccgcccagccggggcucaccagcgccgugaucgaggcccugccccgcaacauggugcugaccugccagggcagcgacgacaucaagaagcuccuggacucccaggggcggcgcgacaucaagcugaucgacaucagccucaacaaggcggacucccgccgguucgagaacgccgucugggaccagugcaaggaccugugccacaugcacacgggcgugguggucgagaagaagaagcgcgggggcaaggaggagaucacgccccacugcgcccugauggacugcaucauguucgacgccgccgugagcggcgggcucaacauccccauccugcgggcggugcugccgcgcgacauggucuuccggaccuccagccccaagguggugcucugaggacuagucccuguucccagagcccacuuuuuuuucuuuuuuugaaauaaaauagccugucuuucagaucucaaaggcucuuuucagagccaccaaaaaaaaaaaaaaaaaaaaaaaaaaaaaaaaaaaaaaaaaaaaaaaaaaaaaaaaaaaaaaaaagaauu

SEQ ID NO: 19486 - RNA, 2005 nt, Artificial Sequence
  mRNA product Design a-1 (hSL-A64-N5) comprising derived and/or modified sequence from LASV(GA391;Clade III)__AAA46284__SP-HsALB_NP(2-570) (opt1)
aggagagucccgcagucggcguccagcggcucugcuuguucgugugugugucguugcaggccuuauucaagcuuaccaugaagugggugaccuucaucagccugcucuuccuguucuccagcgccuacuccagcgccuccaaggaggugcgcagcugccuguggacccagucccuccggcgcgagcugagcggcuacugcuccaacaucaagcugcaggucgugaaggacgcccaggcgcuccugcacgggcuggacuucagcgagguguccaacguccagcggcucaugcgcaagcagaagcgggacgacggcgaccugaagcgccugcgggaccucaaccaggccgugaacaaccugguggagcugaaguccacccagcagaaguccguccuccgcguggggacgcugagcuccgacgaccugcucauccuggccgccgaccuggagaagcucaagagcaaggugacccggaccgagcgcccccuguccagcggcgucuacauggggaaccuguccagccagcagcucgaccagcggcgcgcccugcugaacaugaucggcaugaccggcguguccgggggcgggaagggcgcgagcaacgggaucgugcgggucugggacgugaagaacgccgagcuccugaacaaccaguucggcacgaugccgucccugacccucgccugccugaccaagcagggccagguggaccugaacgacgccguccaggcgcucaccgaccuggggcugaucuacacggccaaguaccccaacagcagcgaccucgaccgccugucccagagccaccccauccugaacaugaucgacaccaagaaguccagccucaacaucuccggcuacaacuucagccugggggccgccgugaaggccggcgcgugcaugcuggacggcgggaacaugcucgagaccaucaaggugagcccccagaccauggacggcauccucaagagcauccugaaggucaagaagucccuggggauguucgugagcgacacgccgggcgagcggaaccccuacgagaacauccuguacaagaucugccuguccggggacggcuggagcuacaucgccucccgcaccagcaucgugggccgggccugggagaacaccgucguggaccucgagcaggacaacaagccccagaagaucgggaacggcggguccaacaagagccugcaguccgccggcuucgccgcggggcugaucuacagccagcucaugacccugaaggacuucaagugcuucaaccugauccccaacgccaagacguggauggacaucgagggccgcccggaggaccccguggagaucgcccuguaccagcccuccagcggcugcuacguccacuucuuccgggagcccaccgaccucaagcaguucaagcaggacgccaaguacagccacgggcgcgacgugaccgaccuguucgccgcgcagccgggccugaccuccgccgucaucgaggcccucccccggaacauggugaucacgugccaggggagcgaggacauccgcaagcugcuggagucccagggccgccgggacaucaagcucaucgacaucacccugagcaaggccgacucccgcaaguucgagaacgccgugugggaccaguucaaggaccugugccacaugcacaccggggucgugguggagaagaagaagcggggcggcaaggaggagaucacgccccacugcgcgcucauggacugcaucauguucgacgccgccgucagcgggggccuggacgccaaggugcugcgcgugguccucccccgggacaugguguuccgcaccuccaccccgaaggugguccugugaggacuagucccuguucccagagcccacuuuuuuuucuuuuuuugaaauaaaauagccugucuuucagaucucaaaggcucuuuucagagccaccaaaaaaaaaaaaaaaaaaaaaaaaaaaaaaaaaaaaaaaaaaaaaaaaaaaaaaaaaaaaaaaaagaauu

SEQ ID NO: 19487 - RNA, 2002 nt, Artificial Sequence
  mRNA product Design a-1 (hSL-A64-N5) comprising derived and/or modified sequence from LASV(Nig08-A19;Clade III)__ADU56619__SP-HsALB_NP(2-569) (opt1)
aggagagucccgcagucggcguccagcggcucugcuuguucgugugugugucguugcaggccuuauucaagcuuaccaugaagugggugaccuucaucagccugcucuuccuguucuccagcgccuacuccagcgccuccaaggaggugaaguccuuccuguggacccagucccuccgccgggagcugagcggcuacugcuccaacaucaagcugcaggucgugaaggacgcccaggcgcuccugcacgggcuggacuucagcgagguguccaacguccagcgccucaugcggaagcagaagcgcgacgacggcgaccugaagcggcugcgcgaccucaaccaggccgugaacaaccugguggagcucaagagcacccagcagaaguccguccugcggguggggacccugagcuccgacgaccugcucgugcuggccgccgaccuggagaagcucaagagcaaggucgugcgcaccgagcggccccuguccagcggcaucuacauggggaaccuguccagccagcagcucgaccagcgcaaggcccugcugaacaugaucggcaugaccggcgggaacggcgggcggaacaccacguccgacggcaucgugcgcgucugggacgugaagaacgcggagcuccugaacaaccaguucgggaccaugccgagccugacccucgccugccugaccaagcagggccagguggaccugaacgacgccguccaggcccucacggaccugggccugaucuacaccgcgaaguaccccaacuccagcgaccucgaccggcuggcccagagccaccccauccugaacaugaucgacaccaagaaguccagccucaacaucuccggguacaacuucagccugggcgccgccgugaaggccggggcgugcaugcuggacggcggcaacaugcucgagaccaucaaggugagcccccagacgauggacgggauccucaagagcauccugaaggucaagcgcucccugggcauguucaucagcgacaccccgggggagcggaaccccuacgagaacauccuguacaagaucugccuguccggcgacggguggcccuacaucgccagccgcaccuccaucgugggccgggccugggagaacaccguggucgaccucgagagcgacaacaagccccagaagacgggcaacgggggcuccaacaagagccugcaguccgccggguucgccgcgggccugaccuacagccagcucaugacccugaaggacuccaugcugcagcuggacccgaacgccaagaccuggauggacaucgaggggcgccccgaggaccccguggagaucgcccucuaccagcccagcuccggcugcuacauccacuucuuccgggagccgacggaccugaagcaguucaagcaggacgccaaguacagccacggcaucgacgugaccgaccuguucgccgcgcagcccgggcucaccagcgccgucaucgaggcccugccccgcaacauggugaucacgugccagggcuccgaggacauccggaagcugcucgagagccaggggcgccgcgacaucaagcugaucgacaucucccugagcaaggucgacucccggaaguucgagaacgccgugugggaccaguucaaggaccucugccacaugcacaccggcaucguggucgagaagaagaagcgcgggggcaaggaggagaucacgccccacugcgcccugauggacugcaucauguucgacgcggccgugagcggcgggguggacgccaagguccugcgggccgugcucccgcgcgacaugguguuccggaccuccacccccaaggucgugcugugaggacuagucccuguucccagagcccacuuuuuuuucuuuuuuugaaauaaaauagccugucuuucagaucucaaaggcucuuuucagagccaccaaaaaaaaaaaaaaaaaaaaaaaaaaaaaaaaaaaaaaaaaaaaaaaaaaaaaaaaaaaaaaaaagaauu

SEQ ID NO: 19488 - RNA, 2002 nt, Artificial Sequence
  mRNA product Design a-1 (hSL-A64-N5) comprising derived and/or modified sequence from LASV(G1180-SLE-2010;Clade IV)__AIT17169__SP-HsALB_NP(2-569) (opt1)
aggagagucccgcagucggcguccagcggcucugcuuguucgugugugugucguugcaggccuuauucaagcuuaccaugaagugggugaccuucaucagccugcucuuccuguucuccagcgccuacuccagcgccuccaaggagaucaagagcuuccuguggacccagucccuccgccgggagcugagcggcuacugcuccaacaucaagcuccagguggucaaggacgcccaggcgcugcugcacgggcuggacuucagcgagguguccaacgugcagcgccucaugcggaaggagcgccgggacgacaacgaccugaagcgccugcgggaccucaaccaggccgucaacaaccugguggagcucaagagcacccagcagaaguccauccugcgcgugggcacccugaccagcgacgaccugcucauccuggccgccgaccuggagaagcucaaguccaaggucauccggaccgagcgcccccugagcgccgggguguacaugggcaaccuguccagccagcagcucgaccagcggcgcgcgcugcuguccaugaucgggaugagcuccggcaaccagcgggcccaggccggccgcgacggggugguccgggugugggacgugaagaacgucgagcuccugaacaaccaguucggcaccaugccgagccugacgcucgccugccugaccaagcagggccagguggaccugaacgacgcggugcaggcccucaccgaccuggggcugaucuacaccgccaaguaccccaacacguccgaccucgaccgccugacccagagccaccccauccugaacaugaucgacaccaagaaguccagccucaacaucagcggguacaacuucucccugggcgccgccgucaaggcgggcgccugcaugcuggacgggggcaacaugcucgagaccaucaaggugagcccccagacgauggacgggauccugaaguccauccugaaggugaagaaggcccucggcauguucaucagcgacaccccgggcgagcggaaccccuacgagaacauccuguacaagaucugccuguccggggacggcuggcccuacaucgccagccgcaccuccaucaccgggcgggccugggagaacacggucguggaccucgagagcgacggcaagccccagaaggcgggguccaacaacagcaacaagucccugcagagcgugggcuucaccgccggccugaccuacucccagcucaugacccugaaggacgccaugcugcagcuggacccgaacgccaagacguggauggacaucgaggggcgccccgaggaccccgucgagaucgcccucuaccagcccagcuccggcugcuacauccacuucuuccgggagccgaccgaccugaagcaguucaagcaggacgcgaaguacagccacgggaucgacgugaccgaccuguucgccgcccagcccggccucaccuccgccgugaucgacgcccugccccgcaacauggucaucacgugccaggggagcgacgacauccgcaagcugcucgagagccagggccggaaggacaucaagcugaucgacaucgcgcuguccaagaccgacagccgcaaguacgagaacgccgugugggaccaguacaaggaccucugccacaugcacaccggcgucgugguggagaagaagaagcgcgggggcaaggaggagaucacgccccacugcgcccugauggacugcaucauguucgacgccgcggucuccgggggccugaacaccagcgugcuccgggccgugcugccgcgggacauggucuuccgcaccuccacgccccggguggugcugugaggacuagucccuguucccagagcccacuuuuuuuucuuuuuuugaaauaaaauagccugucuuucagaucucaaaggcucuuuucagagccaccaaaaaaaaaaaaaaaaaaaaaaaaaaaaaaaaaaaaaaaaaaaaaaaaaaaaaaaaaaaaaaaaagaauu

SEQ ID NO: 19489 - RNA, 2002 nt, Artificial Sequence
  mRNA product Design a-1 (hSL-A64-N5) comprising derived and/or modified sequence from LASV(G1442-SLE-2011;Clade IV)__AIT17181__SP-HsALB_NP(2-569) (opt1)
aggagagucccgcagucggcguccagcggcucugcuuguucgugugugugucguugcaggccuuauucaagcuuaccaugaagugggugaccuucaucagccugcucuuccuguucuccagcgccuacuccagcgccuccaaggaggugaaguccuuccuguggacccagagccuccgccgggagcugagcggcuacugcuccaacaucaagcugcaggucgugaaggacgcccaggcgcuccugcacgggcuggacuucagcgagguguccaacguccagcgccucaugcggaagcagcgccgggacgacaacgaccugaagcgccugcgggaccucaaccaggccgugaacaaccugguggagcucaagagcacccagcagaaguccguccugcgcgugggcacccugaccagcgacgaccugcucgugcuggccgccgaccuggagaagcucaaguccaaggucauccggaccgagcgcccccugagcgccgggguguacaugggcaaccuguccagccagcagcucgaccagcggcgcgcgcugcugaacaugaucgggauguccggcggcauccaggggacccggacgggccgcgacggggugguccgggugugggacgugaagaacgccgaccuccugaacaaccaguucggcaccaugccgagccugacccucgccugccugaccaagcaggggcaggucgaccugaacgacguggugcaggcccucacggaccugggccugaucuacaccgcgaaguaccccaacgccuccgaccucgaccgccugacccagagccaccccauccugaacaugaucgacaccaagaaguccagccucaacaucagcggcuacaacuucucccugggggccgccgucaaggccggcgcgugcaugcuggacgggggcaacaugcucgagacgaucaaggugagcccccagaccauggacggcauccugaaguccauccugaaggugaagaagacccucgggauguucaucagcgacaccccgggcgagcggaaccccuacgagaacauccuguacaagaucugccuguccggggacggcuggcccuacaucgccagccgcacguccaucaccgggcgggccugggagaacaccgucguggaccucgagagcgacggcaagccccagaaggccggcuccaacaacagcaacaagucccugcagagcgccggguucgcggccggccugaccuacucccagcucaugacgcugaaggacgccaugcugcagcuggacccgaacgccaagaccuggauggacaucgaggggcgccccgaggaccccguggagaucgcccucuaccagcccagcuccggcugcuacauccacuucuuccgggagccgaccgaccugaagcaguucaagcaggacgcgaaguacagccacgggaucgacgucaccgaccuguucgccgcccagcccggccucacguccgccgugaucgaggcccugccccgcaacauggucaucacgugccagggcagcgacgacaucaagaagcugcucgagucccaggggcgcaaggacaucaagcugaucgacaucgcgcugagcaagaccgacagccggaaguacgagaacgccgugugggaccaguacaaggaccucugccacaugcacaccggcguggucguggagaagaagaagcgcgggggcaaggaggagaucaccccgcacugcgcccugauggacugcaucauguucgacgccgcgguguccgggggccugaacacccucguccugcgggccgugcugccccgcgacaugguguuccggaccagcacgccccgcgucgugcucugaggacuagucccuguucccagagcccacuuuuuuuucuuuuuuugaaauaaaauagccugucuuucagaucucaaaggcucuuuucagagccaccaaaaaaaaaaaaaaaaaaaaaaaaaaaaaaaaaaaaaaaaaaaaaaaaaaaaaaaaaaaaaaaaagaauu

SEQ ID NO: 19490 - RNA, 2002 nt, Artificial Sequence
  mRNA product Design a-1 (hSL-A64-N5) comprising derived and/or modified sequence from LASV(G3010-SLE-2013;Clade IV)__AIT17345__SP-HsALB_NP(2-569) (opt1)
aggagagucccgcagucggcguccagcggcucugcuuguucgugugugugucguugcaggccuuauucaagcuuaccaugaagugggugaccuucaucagccugcucuuccuguucuccagcgccuacuccagcgccuccaaggagaucaagagcuuccuguggacccagucccuccgccgggagcugagcggcuacugcuccaacaucaagcuccagguggucaaggacgcccaggcgcugcugcacgggcuggacuucagcgagguguccaacgugcagcgccucaugcggaaggagcgccgggacgacaacgaccugaagcgccugcgggaccucaaccaggccgucaacaaccugguggagcucaagagcacccagcagaaguccauccugcgcgugggcacccugaccagcgacgaccugcucauccuggccgccgaccuggagaagcucaaguccaaggucacccggaccgagcgcccccugagcgccgggguguacaugggcaaccuguccagccagcagcucgaccagcggcgcgcgcugcuguccaugaucgggaugagcuccggcgugcagggcgcccgggccgggcgcgacggcgucgugcgggugugggacgucaagaacgccgagcuccugaacaaccaguucgggacgaugccgagccugacccucgcgugccugaccaagcagggccagguggaccugaacgacgugguccaggcccucaccgaccuggggcugaucuacacggccaaguaccccaacaccuccgaccucgaccgccugacccagagccaccccauccugaacaugaucgacaccaagaaguccagccucaacaucagcggcuacaacuucucccugggcgccgccgugaaggcgggggccugcaugcuggacggcgggaacaugcucgagacgaucaaggugagcccccagaccauggacggcauccugaaguccauccugaaggucaagaaggcccucggcauguucaucagcgagaccccgggggagcggaaccccuacgagaacauccuguacaagaucugccuguccggcgacggguggcccuacaucgccagccgcaccuccaucacgggccgggccugggagaacaccgugguggaccucgagagcgacgggaagccccagaaggcgggcuccaacaacagcaacaagucccugcagagcgccggcuucaccgccgggcugaccuacucccagcucaugacgcugaaggacgccaugcugcagcuggacccgaacgccaagaccuggauggacaucgagggccgccccgaggaccccgucgagguggcgcucuaccagcccagcuccgggugcuacauccacuucuuccgggagccgaccgaccugaagcaguucaagcaggacgccaaguacagccacggcaucgacgugaccgaccuguucgccgcccagcccgggcucacguccgccgucaucgacgcgcugccccgcaacauggugaucacgugccagggcagcgacgacaucaagaagcugcucgagagccagggccgcaaggacaucaagcugaucgacaucgcccuguccaagaccgacagccggaaguacgagaacgccgucugggaccaguacaaggaccucugccacaugcacaccggggugguggucgagaagaagaagcgcggcgggaaggaggagaucaccccgcacugcgcccugauggacugcaucauguucgacgcggccguguccggcgggcugaacaccagcgugcuccgggccguccugccccgcgacaugguguuccggaccuccacgccccgcgugguccugugaggacuagucccuguucccagagcccacuuuuuuuucuuuuuuugaaauaaaauagccugucuuucagaucucaaaggcucuuuucagagccaccaaaaaaaaaaaaaaaaaaaaaaaaaaaaaaaaaaaaaaaaaaaaaaaaaaaaaaaaaaaaaaaaagaauu

SEQ ID NO: 19491 - RNA, 2002 nt, Artificial Sequence
  mRNA product Design a-1 (hSL-A64-N5) comprising derived and/or modified sequence from LASV(G502-SLE-2009;Clade IV)__AIT17127__SP-HsALB_NP(2-569) (opt1)
aggagagucccgcagucggcguccagcggcucugcuuguucgugugugugucguugcaggccuuauucaagcuuaccaugaagugggugaccuucaucagccugcucuuccuguucuccagcgccuacuccagcgccuccaaggagaucaagagcuuccuguggacccagucccuccgccgggagcugagcggcuacugcuccaacaucaagcuccagguggucaaggacgcccaggcgcugcugcacgggcuggacuucagcgagguguccaacgugcagcgccucaugcggaaggagcgccgggacgacaacgaccugaagcgccugcgggaccucaaccaggccgucaacaaccugguggagcucaagagcacccagcagaaguccauccugcgcgugggcacccugaccagcgacgaccugcucauccuggccgccgaccuggagaagcucaaguccaaggucauccggaccgagcgcccccugagcgccgggguguacaugggcaaccuguccagccagcagcucgaccagcggcgcgcgcugcuguccaugaucgggaugagcggcggcaaccagggggugcgggccggcaaggacggggucgugcgcgugugggacgucaagaacgccgagcuccugaacaaccaguucggcaccaugccgucccugacgcucgccugccugaccaagcagggccagguggaccugaacgacgcggugcaggcccucaccgaccuggggcugaucuacaccgccaaguaccccaacacgagcgaccucgaccggcugacccagucccaccccauccugaacaugaucgacaccaagaaguccagccucaacaucuccggcuacaacuucagccugggggccgccgucaaggcgggcgccugcaugcuggacgggggcaacaugcucgagaccaucaaggugagcccccagacgauggacggcauccucaagagcauccugaaggugaagaaggcccuggggauguucaucuccgacaccccgggcgagcgcaaccccuacgagaacauccuguacaagaucugccugagcggggacggcuggcccuacaucgccucccggaccagcaucaccgggcgcgccugggagaacacggucguggaccucgaguccgacggcaagccccagaaggcgggcagcaacaacuccaacaagagccugcaguccgccggguucaccgccggccugaccuacagccagcucaugacccugaaggacgccaugcugcagcuggacccgaacacgaagaccuggauggacaucgaggggcggcccgaggaccccguggagaucgcccucuaccagcccuccagcggcugcuacauccacuucuuccgcgagccgaccgaccugaagcaguucaagcaggacgcgaaguacucccacgggaucgacgucaccgaccuguucgccgcccagcccggccucacgagcgccgugaucgacgcccugccccggaacauggugaucacgugccagggcuccgacgacauccgcaagcugcucgagagccaggggcgcaaggacaucaagcugaucgacaucgcgcugaacaagaccgacagccggaaguacgagaacgccgucugggaccaguacaaggaccucugccacaugcacaccggcguggucguggagaagaagaagcgcgggggcaaggaggagaucaccccgcacugcgcccugauggacugcaucauguucgacgccgcgguguccgggggccugaacaccagcguccuccgggccgugcugccccgcgacaugguguuccggaccuccacgccccgcgucgugcugugaggacuagucccuguucccagagcccacuuuuuuuucuuuuuuugaaauaaaauagccugucuuucagaucucaaaggcucuuuucagagccaccaaaaaaaaaaaaaaaaaaaaaaaaaaaaaaaaaaaaaaaaaaaaaaaaaaaaaaaaaaaaaaaaagaauu

SEQ ID NO: 19492 - RNA, 2002 nt, Artificial Sequence
  mRNA product Design a-1 (hSL-A64-N5) comprising derived and/or modified sequence from LASV(G733-SLE-2010;Clade IV)__AIT17155__SP-HsALB_NP(2-569) (opt1)
aggagagucccgcagucggcguccagcggcucugcuuguucgugugugugucguugcaggccuuauucaagcuuaccaugaagugggugaccuucaucagccugcucuuccuguucuccagcgccuacuccagcgccuccaaggagaucaagagcuuccuguggacccagucccuccgccgggagcugagcggcuacugcuccaacaucaagcuccagguggucaaggacgcccaggcgcugcugcacgggcuggacuucagcgagguguccaacgugcagcgccucaugcggaaggagcgccgggacgacaacgaccugaagcgccugcgggaccucaaccaggccgucaacaaccugguggagcucaagagcacccagcagaaguccgugcugcgcgucggcacccugaccagcgacgagcugcucgugcuggccgccgaccuggagaagcucaaguccaaggugauccggaccgagcgcccccugagcgccggggucuacaugggcaaccuguccagccagcagcucgaccagcggcgcgcgcugcuguccaugaucgggaugagcggcggcaaccagggggcccggaccggccgcgacgggguggugcgggucugggacgugaagaacgccgagcuccugaacaaccaguucggcaccaugccgucccugacccucgccugccugaccaagcagggccagguggaccugaacgacgcgguccaggcccucaccgaccuggggcugaucuacacggccaaguaccccaacaccagcgaccucgaccgccugacccagucccaccccauccugaacaugaucgacaccaagaaguccagccucaacaucuccggcuacaacuucagccugggggccgccgugaaggcgggcgccugcaugcuggacgggggcaacaugcucgagacgaucaaggugagcccccagaccauggacggcauccucaagagcauccugaaggucaagaaggcccuggggauguucaucuccgacaccccgggcgagcggaaccccuacgagaacauccuguacaagaucugccugagcggggacggcuggcccuacaucgccucccgcaccagcaucacggggcgggccugggagaacaccgugguggaccucgaguccgacggcaagccccagaaggcgggcagcaacaacuccaacaagagccugcaguccgccggguucaccgccggccugaccuacagccagcucaugacgcugaaggacgccaugcugcagcuggacccgaacgccaagaccuggauggacaucgaggggcgccccgaggaccccgucgagaucgcgcucuaccagcccuccagcggcugcuacauccacuucuuccgggagccgaccgaccugaagcaguucaagcaggacgccaaguacucccacgggaucgacgugaccgaccuguucgccgcccagcccggccucacgagcgccgugaucgacgcgcugccccgcaacauggucaucacgugccagggcuccgacgacauccgcaagcugcucgagagccaggggcggaaggacaucaagcugaucgacaucgcccugagcaagaucgacucccgcaaguacgagaacgccgugugggaccaguacaaggaccucugccacaugcacaccggcgucgugguggagaagaagaagcgcgggggcaaggaggagaucacgccccacugcgcccugauggacugcaucauguucgacgcggccgucagcgggggccugaacucccucgugcugcgggccgugcugccgcgggacauggucuuccgcaccagcacgccccggguggugcucugaggacuagucccuguucccagagcccacuuuuuuuucuuuuuuugaaauaaaauagccugucuuucagaucucaaaggcucuuuucagagccaccaaaaaaaaaaaaaaaaaaaaaaaaaaaaaaaaaaaaaaaaaaaaaaaaaaaaaaaaaaaaaaaaagaauu

SEQ ID NO: 19493 - RNA, 2002 nt, Artificial Sequence
  mRNA product Design a-1 (hSL-A64-N5) comprising derived and/or modified sequence from MOPV/LASV reassortant(IGS-1;Clade IV)__AFY05578__SP-HsALB_NP(2-569) (opt1)
aggagagucccgcagucggcguccagcggcucugcuuguucgugugugugucguugcaggccuuauucaagcuuaccaugaagugggugaccuucaucagccugcucuuccuguucuccagcgccuacuccagcgccuccaaggagaucaagagcuuccuguggacccagucccuccgccgggagcugagcggcuacugcuccaacaucaagcuccagguggucaaggacgcccaggcgcugcugcacgggcuggacuucagcgagguguccaacgugcagcgccucaugcggaaggagcgccgggacgacaacgaccugaagcgccugcgggaccucaaccaggccgucaacaaccugguggagcucaagagcacccagcagaaguccauccugcgcgugggcacccugaccagcgacgaccugcucauccuggccgccgaccuggagaagcuccgguccaaggucauccgcaccgagcggccccugagcgccgggguguacaugggcaaccuguccagccagcagcucgaccagcgccgggcgcugcugaacaugaucgggauguccggcggcaaccagggggcccgcgccggccgggacggggugguccgcgugugggacgugaagaacgccgagcuccugagcaaccaguucggcaccaugccgucccugacgcucgcgugccugaccaagcaggggcaggucgaccugaacgacgccgugcaggcccucaccgaccugggccugaucuacaccgccaaguaccccaacacgagcgaccucgaccggcugacccagucccaccccauccugaacaugaucgacaccaagaaguccagccucaacaucuccggcuacaacuucagccugggggccgcggugaaggccggcgccugcaugcuggacgggggcaacaugcucgagaccaucaaggucagcccccagacgauggacggcauccucaagagcauccugaaggugaagaaggcccuggggauguucaucuccgacaccccgggcgagcgcaaccccuacgagaacauccuguacaagaucugccugagcggggacggcuggcccuacaucgccucccggaccagcaucaccgggcgcgcgugggagaacacgguggucgaccucgaguccgacggcaagccccagaaggccgacagcaacaacuccagcaagucccugcagagcgccggcuucaccgccgggcugaccuacucccagcucaugacccugaaggacgccaugcugcagcuggacccgaacgcgaagacguggauggacaucgagggccggcccgaggaccccguggagaucgcccucuaccagcccagcuccgggugcuacauccacuucuuccgcgagccgaccgaccugaagcaguucaagcaggacgccaaguacagccacggcaucgacgugaccgaccuguucgccacccagcccgggcucacguccgccgucaucgacgcgcugccccgcaacauggugaucacgugccagggcagcgacgacauccggaagcugcucgagagccagggccgcaaggacaucaagcugaucgacaucgaccuguccaagaccgacagccggaaguacgagaacgccgugugggaccaguacaaggaccucugccacaugcacaccggggucguggucgagaagaagaagcgcggcgggaaggaggagaucaccccgcacugcgcccugauggacugcaucauguucgacgccgcgguguccggcgggcugaacaccagcgugcuccgggccguccugccccgcgacaugguguuccggaccuccacgccccgcgugguccugugaggacuagucccuguucccagagcccacuuuuuuuucuuuuuuugaaauaaaauagccugucuuucagaucucaaaggcucuuuucagagccaccaaaaaaaaaaaaaaaaaaaaaaaaaaaaaaaaaaaaaaaaaaaaaaaaaaaaaaaaaaaaaaaaagaauu

SEQ ID NO: 19494 - RNA, 2002 nt, Artificial Sequence
  mRNA product Design a-1 (hSL-A64-N5) comprising derived and/or modified sequence from LASV(LM765-SLE-2012;Clade IV)__AIT17815__SP-HsALB_NP(2-569) (opt1)
aggagagucccgcagucggcguccagcggcucugcuuguucgugugugugucguugcaggccuuauucaagcuuaccaugaagugggugaccuucaucagccugcucuuccuguucuccagcgccuacuccagcgccuccaaggagaucaagagcuuccuguggacccagucccuccgccgggagcugagcggcuacugcuccaacaucaagcuccagguggucaaggacgcccaggcgcugcugcacgggcuggacuucagcgagguguccaacgugcagcgccucaugcggaaggagcgccgggacgacaacgaccugaagcgccugcgggaccucaaccaggccgucaacaaccugguggagcucaagagcacccagcagaaguccauccugcgcgugggcacccugaccagcgacgaccugcucauccuggccgccgaccuggagaagcucaaguccaaggucacccggaccgagcgcccccugagcgccgggguguacaugggcaaccuguccagccagcagcucgaccagcggcgcgcgcugcuggacaugaucgggauguccggcagcaaccagggcgcccgggccgggcgcgacggcgugguccgggugugggacgugaagaacgccgagcuccugaacaaccaguucgggacgaugccgucccugacccucgcgugccugaccaagcagggccaggucgaccugaacgacgccgugcaggcccucaccgaccuggggcugaucuacacggccaaguaccccaacaccagcgaccucgaccgccugacccagucccaccccauccugaacaugaucgacaccaagaaguccagccucaacaucuccggcuacaacuucagccugggcgccgcggugaaggccggggccugcaugcuggacggcgggaacaugcucgagacgaucaaggucagcccccagaccauggacggcauccucaagagcauccugaaggugaagaaggcccugggcauguucaucuccgacgccccgggggagcggaaccccuacgagaacauccuguacaagaucugccugagcggcgacggguggcccuacaucgcgucccgcaccagcaucaccggccgggccugggagaacacgguggucgaccucgaguccgacgggaagccccagaaggccggcagcaacggcuccaacaagagccugcaguccgccggguucaccgccggccugaccuacagccagcucaugacccugaaggacgcgaugcugcagcuggacccgaacgccaagacguggauggacaucgaggggcgccccgaggaccccguggagaucgcccucuaccagcccuccagcggcugcuacauccacuucuuccgggagccgaccgaccugaagcaguucaagcaggacgccaaguacucccacgggaucgacgugaccgaccuguucgccgcgcagcccggccucaccagcgccgucaucgacgcccugccccgcaacauggugaucacgugccagggcuccgacgacauccgcaagcuguucgagagccaggggcggaaggacaucaagcucaucgacaucgcccugagcaagaccgacucccgcaaguacgagaacgcggugugggaccaguacaaggaccugugccacaugcacaccggcaucgucguggagaagaagaagcgcgggggcaaggaggagaucacgccccacugcgcccucauggacugcaucauguucgacgccgccgucagcgggggccugaacaccuccgugcugcgggccgugcucccgcgggacauggucuuccgcaccagcacgccccggguggugcugugaggacuagucccuguucccagagcccacuuuuuuuucuuuuuuugaaauaaaauagccugucuuucagaucucaaaggcucuuuucagagccaccaaaaaaaaaaaaaaaaaaaaaaaaaaaaaaaaaaaaaaaaaaaaaaaaaaaaaaaaaaaaaaaaagaauu

SEQ ID NO: 19495 - RNA, 2002 nt, Artificial Sequence
  mRNA product Design a-1 (hSL-A64-N5) comprising derived and/or modified sequence from LASV(LM776-SLE-2012;Clade IV)__AIT17825__SP-HsALB_NP(2-569) (opt1)
aggagagucccgcagucggcguccagcggcucugcuuguucgugugugugucguugcaggccuuauucaagcuuaccaugaagugggugaccuucaucagccugcucuuccuguucuccagcgccuacuccagcgccuccaaggagaucaagagcuuccuguggacccagucccuccgccgggagcugagcuccuacugcagcaacaucaagcuccagguggucaaggacgcccaggcgcugcugcacggccuggacuucuccgaggugagcaacgugcagcgccucaugcggaaggagcgccgggacgacaacgaccugaagcgccugcgggaccucaaccaggccgucaacaaccugguggagcugaaguccacccagcagaaguccauccuccgcguggggacccugaccuccgacgaccugcucauccuggccgccgaccuggagaagcucaagagcaaggucacccggaccgagcgcccccuguccgccggcguguacauggggaaccugagcucccagcagcucgaccagcggcgcgcgcugcugagcaugaucggcauguccgggagcaaccagggcgcccgggccggccgcgacggggugguccgggugugggacgugaagaacgccgagcuccugaacaaccaguucggcacgaugccgucccugacccucgcgugccugaccaagcaggggcaggucgaccugaacgacgccgugcaggcccucaccgaccugggccugaucuacacggccaaguaccccaacaccagcgaccucgaccgccugacccagagccaccccauccugaacaugaucgacaccaagaaguccagccucaacaucuccggguacaacuucagccugggcgccgcggugaaggccggcgccugcaugcuggacgggggcaacaugcucgagacgaucaaggucagcccccagaccauggacgggauccucaagagcauccugaaggugaagaaggcccugggcauguucaucuccgacaccccgggcgagcggaaccccuacgagaacauccuguacaagaucugccugagcggggacggcuggcccuacaucgccucccgcaccagcaucacggggcgggcgugggagaacaccguggucgaccucgaguccgacggcaagccccagaaggccgggagcaacaacuccaacaagagccugcaguccgccggcuucaccgccggccugaccuacagccagcucaugacgcugaaggacgccaugcugcagcuggacccgaacgcgaagaccuggauggacaucgaggggcgccccgaggaccccguggagguggcccucuaccagcccuccagcggcugcuacauccacuucuuccgggagccgaccgaccugaagcaguucaagcaggacgccaaguacucccacgggaucgacgucaccgaccuguucgccgcccagcccggccucacgagcgcggugaucgacgcccugccccgcaacauggugaucacgugccaggggagcgacgacauccgcaagcugcucgagucccagggccggaaggacaucaagcugaucgacaucgcccugagcaagaccgacucccgcaaguacgagaacgccgucugggaccaguacaaggaccucugccacaugcacaccggcguggucguggagaagaagaagcgcgggggcaaggaggagaucaccccgcacugcgcgcugauggacugcaucauguucgacgccgccgugagcgggggccugaacaccuccguccuccgggccgugcugccccgggacaugguguuccgcaccagcacgccccgggucgugcugugaggacuagucccuguucccagagcccacuuuuuuuucuuuuuuugaaauaaaauagccugucuuucagaucucaaaggcucuuuucagagccaccaaaaaaaaaaaaaaaaaaaaaaaaaaaaaaaaaaaaaaaaaaaaaaaaaaaaaaaaaaaaaaaaagaauu

SEQ ID NO: 19496 - RNA, 2002 nt, Artificial Sequence
  mRNA product Design a-1 (hSL-A64-N5) comprising derived and/or modified sequence from LASV(Mad39;Clade IV)__ANH09723__SP-HsALB_NP(2-569) (opt1)
aggagagucccgcagucggcguccagcggcucugcuuguucgugugugugucguugcaggccuuauucaagcuuaccaugaagugggugaccuucaucagccugcucuuccuguucuccagcgccuacuccagcgccuccaaggagaucaagagcuuccuguggacccagucccuccgccgggagcugagcggcuacugcuccaacaucaagcuccagguggucaaggacgcccaggcgcugcugcacgggcuggacuucagcgagguguccaacgugcagcgccucaugcggaagcagcgccgggacgacaacgaccugaagcgccugcgggaccucaaccaggccgucaacaaccugguggagcugaaguccacccagcagaaguccgugcuccgcgucggcacgcugaccagcgacgaccugcucacccuggccgccgaccuggagaagcucaaguccaaggugacccggacggagcgcccccugaccgccgggguguacaugggcaaccugagcucccagcagcucgaccagcggcgcgcgcugcugaacaugaucgggaugagcggcggcaaccagggggcccggaccggccgcgacggggucgugcgggugugggacgucaagaacgccgagcuccugaacaaccaguucggcaccaugccgucccugacgcucgccugccugaccaagcagggccagguggaccugaacgacgugguccaggcgcucaccgaccuggggcugaucuacaccgccaaguaccccaacacgagcgaccucgaccgccugacccagucccaccccauccugaacaugaucgacaccaacaagagcucccucaacaucagcggcuacaacuucagccugggggccgccgugaaggccggcgcgugcaugcuggacgggggcaacaugcucgagaccaucaaggugagcccccagacgauggacggcauccucaagagcauccugaaggucaagaagucccuggggauguucaucagcgacaccccgggcgagcggaaccccuacgagaacauccuguacaagaucugccuguccggggacggcuggcccuacaucgccagccgcaccuccaucaccgggcgggccugggagaacacggugguggaccucgagagcggcggcaagccccagaaggccggguccaacaacagcaacaagucccugcagagcgccggcuucgcggccgggcugaccuacucccagcucaugacccugaaggacgccaugcugcagcuggacccgaacgccaagaccuggauggacaucgagggccgccccgaggaccccgucgagaucgcccucuaccagcccaucagcgggugcuacauccacuucuuccgggagccgacggaccugaagcaguucaagcaggacgcgaaguacucccacggcaucgacgugaccgaccuguucgccgcccagcccggccucaccagcgccgugaucgaggcccugccccgcaacauggucaucacgugccagggguccgacgacauccgcaagcuguucgagagccagggccggaaggacaucaagcucaucgacaucgcgcuguccaagaccgacagccgcaaguacgagaacgccgugugggaccaguacaaggaccugugccacaugcacaccggggucgugguggagaagaagaagaagggcgggaaggaggagaucacgccccacugcgcccucauggacugcaucauguucgacgccgcggucagcggcggccugaacacccuggugcuccgggccgugcugccgcgcgacauggucuuccggaccuccacccccaagguggugcugugaggacuagucccuguucccagagcccacuuuuuuuucuuuuuuugaaauaaaauagccugucuuucagaucucaaaggcucuuuucagagccaccaaaaaaaaaaaaaaaaaaaaaaaaaaaaaaaaaaaaaaaaaaaaaaaaaaaaaaaaaaaaaaaaagaauu

SEQ ID NO: 19497 - RNA, 2002 nt, Artificial Sequence
  mRNA product Design a-1 (hSL-A64-N5) comprising derived and/or modified sequence from LASV(Z0947-SLE-2011;Clade IV)__AIT17841__SP-HsALB_NP(2-569) (opt1)
aggagagucccgcagucggcguccagcggcucugcuuguucgugugugugucguugcaggccuuauucaagcuuaccaugaagugggugaccuucaucagccugcucuuccuguucuccagcgccuacuccagcgccuccaaggagaucaagagcuuccuguggacccagucccuccgccgggagcugagcggcuacugcuccaacaucaagcuccagguggucaaggacgcccaggcgcugcugcacgggcuggacuucagcgagguguccaacgugcagcgccucaugcggaaggagcgccgggacgacaacgaccugaagcgccugcgggaccucaaccaggccgucaacaaccugguggagcucaagagcacccagcagaaguccauccugcgcgugggcacccugaccagcgacgaccugcucauccuggccgccgaccuggagaagcucaaguccaaggucacccggaccgagcgcccccugagcgccgggguguacaugggcaaccuguccagccagcagcucgaccagcggcgcgcgcugcugaacaugaucgggauguccggcagcaaccagggcgcccggacggggcgcgacggcgugguccgggugugggacgugaagaacgccgagcuccugaacaaccaguucgggaccaugccgucccugacccucgccugccugaccaagcagggccaggucgaccugaacgacgcggugcaggcccucacggaccuggggcugaucuacaccgccaaguaccccaacaccagcgaccucgaccgccugacccagucccaccccauccugaacaugaucgacacgaagaaguccagccucaacaucuccggcuacaacuucagccugggcgccgccgugaaggcgggggccugcaugcuggacggcgggaacaugcucgagaccaucaaggucagcccccagaccauggacggcauccucaagagcauccugaaggugaagaaggcccugggcauguucaucuccgacgccccgggggagcggaaccccuacgagaacauccuguacaagaucugccugagcggcgacggguggcccuacaucgccucccgcaccagcaucacgggccgggcgugggagaacaccguggucgaccucgaguccgacgggaagccccagaaggccggcagcaacggcuccaacaagagccugcaguccgccggguucaccgccggccugaccuacagccagcucaugacgcugaaggacgccaugcugcagcuggacccgaacgcgaagaccuggauggacaucgaggggcgccccgaggaccccguggagaucgcccucuaccagcccuccagcggcugcuacauccacuucuuccgggagccgaccgaccugaagcaguucaagcaggacgccaaguacucccacgggaucgacgugaccgaccuguucgccgcccagcccggccucacgagcgcggucaucgacgcccugccccgcaacauggugaucacgugccagggcuccgacgacauccgcaagcuguucgagagccaggggcggaaggacaucaagcucaucgacaucgcccugagcaagaccgacucccgcaaguacgagaacgccgugugggaccaguacaaggaccugugccacaugcacaccggcaucgucguggagaagaagaagcgcgggggcaaggaggagaucaccccgcacugcgcgcucauggacugcaucauguucgacgccgccgucagcgggggccugaacaccuccgugcugcgggccgugcucccccgggacauggucuuccgcaccagcacgccccggguggugcugugaggacuagucccuguucccagagcccacuuuuuuuucuuuuuuugaaauaaaauagccugucuuucagaucucaaaggcucuuuucagagccaccaaaaaaaaaaaaaaaaaaaaaaaaaaaaaaaaaaaaaaaaaaaaaaaaaaaaaaaaaaaaaaaaagaauu

SEQ ID NO: 19498 - RNA, 2002 nt, Artificial Sequence
  mRNA product Design a-1 (hSL-A64-N5) comprising derived and/or modified sequence from LASV(Josiah;Clade IV)__NP_694869__SP-HsALB_NP(2-569) (opt4)
aggagagucccgcagucggcguccagcggcucugcuuguucgugugugugucguugcaggccuuauucaagcuuaccaugaagugggugaccuucaucagccugcuguuccuguucagcagcgccuacagcagcgccagcaaggagaucaagagcuuccuguggacccagagccugagaagagagcugagcggcuacugcagcaacaucaagcugcagguggugaaggacgcccaggcccugcugcacggccuggacuucagcgaggugagcaacgugcagagacugaugagaaaggagagaagagacgacaacgaccugaagagacugagagaccugaaccaggccgugaacaaccugguggagcugaagagcacccagcagaagagcauccugagagugggcacccugaccagcgacgaccugcugauccuggccgccgaccuggagaagcugaagagcaaggugaucagaaccgagagaccccugagcgccggcguguacaugggcaaccugagcagccagcagcuggaccagagaagagcccugcugaacaugaucggcaugagcggcggcaaccagggcgccagagccggcagagacggcguggugagagugugggacgugaagaacgccgagcugcugaacaaccaguucggcaccaugcccagccugacccuggccugccugaccaagcagggccagguggaccugaacgacgccgugcaggcccugaccgaccugggccugaucuacaccgccaaguaccccaacaccagcgaccuggacagacugacccagagccaccccauccugaacaugaucgacaccaagaagagcagccugaacaucagcggcuacaacuucagccugggcgccgccgugaaggccggcgccugcaugcuggacggcggcaacaugcuggagaccaucaaggugagcccccagaccauggacggcauccugaagagcauccugaaggugaagaaggcccugggcauguucaucagcgacacccccggcgagagaaaccccuacgagaacauccuguacaagaucugccugagcggcgacggcuggcccuacaucgccagcagaaccagcaucaccggcagagccugggagaacaccgugguggaccuggagagcgacggcaagccccagaaggccgacagcaacaacagcagcaagagccugcagagcgccggcuucaccgccggccugaccuacagccagcugaugacccugaaggacgccaugcugcagcuggaccccaacgccaagaccuggauggacaucgagggcagacccgaggaccccguggagaucgcccuguaccagcccagcagcggcugcuacauccacuucuucagagagcccaccgaccugaagcaguucaagcaggacgccaaguacagccacggcaucgacgugaccgaccuguucgccacccagcccggccugaccagcgccgugaucgacgcccugcccagaaacauggugaucaccugccagggcagcgacgacaucagaaagcugcuggagagccagggcagaaaggacaucaagcugaucgacaucgcccugagcaagaccgacagcagaaaguacgagaacgccgugugggaccaguacaaggaccugugccacaugcacaccggcguggugguggagaagaagaagagaggcggcaaggaggagaucaccccccacugcgcccugauggacugcaucauguucgacgccgccgugagcggcggccugaacaccagcgugcugagagccgugcugcccagagacaugguguucagaaccagcacccccagaguggugcugugaggacuagucccuguucccagagcccacuuuuuuuucuuuuuuugaaauaaaauagccugucuuucagaucucaaaggcucuuuucagagccaccaaaaaaaaaaaaaaaaaaaaaaaaaaaaaaaaaaaaaaaaaaaaaaaaaaaaaaaaaaaaaaaaagaauu

SEQ ID NO: 19499 - RNA, 2002 nt, Artificial Sequence
  mRNA product Design a-1 (hSL-A64-N5) comprising derived and/or modified sequence from LASV(LP;Clade I)__AAF86702__SP-HsALB_NP(2-569) (opt4)
aggagagucccgcagucggcguccagcggcucugcuuguucgugugugugucguugcaggccuuauucaagcuuaccaugaagugggugaccuucaucagccugcuguuccuguucagcagcgccuacagcagcaacagcaaggagaucaagagcuuccuguggacccagagccugagaagagagcugagcggcuacugcagcaacaucaagcugcagguggugaaggacgcccaggcccugcugcacggccuggacuucagcgaggugagcaacgugcagagacugaugagaaagcagaagagagacgacgccgaccugaagagacugagagaccugaaccaggccgugaacaaccugguggagcugaagagcacccagcagaagaacgugcugagagugggcacccugagcagcgacgaccugaucacccuggccgccgaccuggagaagcugaagagcaaggugaucagaaccgagagaccccugagcagcggcguguacaugggcaaccugagcagccagcagcuggaccagagaagagcccugcugagcaugaucggcaugagcggcggcccccagggcaacagaaccggcggcgacggcguggugagagugugggacgugaagaacgccgagcugcugaacaaccaguucggcaccaugcccagccugacccuggccugccugaccaagcagggccagguggaccugaacgacgccgugcaggcccugaccgaccugggccugaucuacaccgccaaguaccccaacagcagcgaccuggacaugcugacccagagccaccccauccugggcaugguggacaccaagaagagcagccugaacaucagcggcuacaacuucagccugggcgccgccgugaaggccggcgccugcaugcuggacggcggcaacaugcuggagaccaucaaggugagcccccagaccauggacggcauccugaagagcauccugaaggugaagagaagccugggcauguucaucagcgacacccccggcgagagaaaccccuacgagaacauccuguacaagaucugccugagcggcgagggcuggcccuacaucgccagcagaaccagcaucaccggcagagccugggagaacacccugguggaccuggagagcgacaacaagccccccaagcugaacagcgccggcagcaacaagagccugcaggccgccggccugaacgccggccugaccuacagccagcugaugacccugaaggacugcaugcugcagcuggaccccagcagcaagaccuggaucgacaucgagggcagacccgaggaccccguggagaucgcccuguuccagcccagcagcggcugcuacauccacuucuucagagagcccaccgaccugaagcaguucaagcaggacgccaaguacagccacggcaucgacgugaccgaccuguucagcacccagcccggccugaccagcgccgugaucgaggcccugcccagaaacauggugcugaccugccagggcagcgacgacaucaagaagcugcuggagagccagggcagaagagacaucaagcugaucgacaucagccugagcaaggccgacagcagaaaguucgagaacgccgugugggaccaguacaaggaccugugccacaugcacaccggcguggugguggagaagaagaagagaggcggcaaggaggagaucaccccccacugcgcccugcuggacugcaucauguucgacgccgccaccaccggcagccugaacaucaccacccugagagccgugcugcccagagacaugguguucagaaccagcacccccaagguggugcugugaggacuagucccuguucccagagcccacuuuuuuuucuuuuuuugaaauaaaauagccugucuuucagaucucaaaggcucuuuucagagccaccaaaaaaaaaaaaaaaaaaaaaaaaaaaaaaaaaaaaaaaaaaaaaaaaaaaaaaaaaaaaaaaaagaauu

SEQ ID NO: 19500 - RNA, 2002 nt, Artificial Sequence
  mRNA product Design a-1 (hSL-A64-N5) comprising derived and/or modified sequence from LASV(803213;Clade II)__AAF86704__SP-HsALB_NP(2-569) (opt4)
aggagagucccgcagucggcguccagcggcucugcuuguucgugugugugucguugcaggccuuauucaagcuuaccaugaagugggugaccuucaucagccugcuguuccuguucagcagcgccuacagcagcgccagcaaggaggugaagagcuuccuguggacccagagccugagaagagagcugagcggcuacugcagcaacaucaagcugcagguggugaaggacgcccaggcccugcugcacggccuggacuucagcgaggugaacaacgugcagagacugaugagaaagcagaagagagacgacggcgaccugaagagacugagagaccugaaccaggccgugaacaaccugguggagcugaagagcacccagcagaagagcauccugagagugggcacccugaccagcgacgaccugcugacccuggccgccgaccuggagaagcugaagagcaaggugaucagaaccgagagaccccugagcagcggcguguacaugggcaaccugagcacccagcagcuggagcagagaagagcccugcugaacaugaucggcauggugggcggcgcccagggcacccagcccggcagagacggcguggugagagugugggacgugaagaaccccgaccugcugaacaaccaguucggcaccaugcccagccugacccuggccugccugaccaagcagggccagguggaccugaacgacgccgugcuggcccugaccgaccugggccugaucuacaccgccaaguaccccaacagcagcgaccuggacagacugagccagagccaccccauccugaacaugguggacaccaagaagagcagccugaacaucagcggcuacaacuucagccugggcgccgccgugaaggccggcgccugcaugcuggacggcggcaacaugcuggagaccaucaaggugaccccccagaccauggacggcauccugaagagcauccugaaggugaagagaagccugggcauguucgugagcgacacccccggcgagagaaaccccuacgagaacauccuguacaagaucugccugagcggcgacggcuggcccuacaucgccagcagaaccagcaucgugggcagagccugggagaacaccaccguggaccuggagagcgacggcaagccccagaaggugggcaccgccggcagcaacaagagccugcagagcgccggcuuccccaccggccugaccuacagccagcugaugacccugaaggacagcaugaugcagcuggaccccagcgccaagaccuggaucgacaucgagggcagacccgaggaccccguggagaucgcccuguaccagcccaugagcggcugcuacauccacuucuucagagagcccaccgaccugaagcaguucaagcaggacgccaaguacagccacggcaucgacguggccgaccuguuccccgcccagcccggccugaccagcgccgugaucgaggcccugcccagaaacauggugcugaccugccagggcagcgacgacaucaagaagcugcuggacagccagggcagaagagacaucaagcugaucgacaucagccugagcaagguggacagcagaaaguucgagaacgccgugugggaccagugcaaggaccugugccacaugcacaccggcguggugguggagaagaagaagagaggcggcaaggaggagaucaccccccacugcgcccugauggacugcaucauguucgacgccgccgugagcggcggccugaacauccccgugcugagagccgugcugcccagagacaugguguucagaaccagcagccccaagguggugcugugaggacuagucccuguucccagagcccacuuuuuuuucuuuuuuugaaauaaaauagccugucuuucagaucucaaaggcucuuuucagagccaccaaaaaaaaaaaaaaaaaaaaaaaaaaaaaaaaaaaaaaaaaaaaaaaaaaaaaaaaaaaaaaaaagaauu

SEQ ID NO: 19501 - RNA, 2005 nt, Artificial Sequence
  mRNA product Design a-1 (hSL-A64-N5) comprising derived and/or modified sequence from LASV(GA391;Clade III)__CAA36646__SP-HsALB_NP(2-570) (opt4)
aggagagucccgcagucggcguccagcggcucugcuuguucgugugugugucguugcaggccuuauucaagcuuaccaugaagugggugaccuucaucagccugcuguuccuguucagcagcgccuacagcagcgccagcaaggaggugagaagcuuccuguggacccagagccugagaagagagcugagcggcuacugcagcaacaucaagcugcagguggugaaggacgcccaggcccugcugcacggccuggacuucagcgaggugagcaacgugcagagacugaugagaaagcagaagagagacgacggcgaccugaagagacugagagaccugaaccaggccgugaacaaccugguggagcugaagagcacccagcagaagagcgugcugagagugggcacccugagcagcgacgaccugcugauccuggccgccgaccuggagaagcugaagagcaaggugaccagaaccgagagaccccugagcagcggcguguacaugggcaaccugagcagccagcagcuggaccagagaagagcccugcugaacaugaucggcaugaccggcgugagcggcggcggcaagggcgccagcgacggcaucgugagagugugggacgugaagaacgccgagcugcugaacaaccaguucggcaccaugcccagccugacccuggccugccugaccaagcagggccagguggaccugaacgacgccgugcaggcccugaccgaccugggccugaucuacaccgccaaguaccccaacagcagcgaccuggacagacugagccagagccaccccauccugaacaugaucgacaccaagaagagcagccugaacaucagcggcuacaacuucagccugggcgccgccgugaaggccggcgccugcaugcuggacggcggcaacaugcuggagaccaucaaggugagcccccagaccauggacggcauccugaagagcauccugaaggugaagaagagccugggcauguucgugagcgacacccccggcgagagaaaccccuacgagaacauccuguacaagaucugccugagcggcgacggcuggcccuacaucgccagcagaaccagcaucgugggcagagccugggagaacaccgugguggaccuggagcaggacaacaagccccagaagaucggcaacggcggcagcaacaagagccugcagagcgccggcuucgccgccggccugaccuacagccagcugaugacccugaaggacuucaagugcuucaaccugauccccaacgccaagaccuggauggacaucgagggcagacccgaggaccccguggagaucgcccuguaccagcccagcagcggcugcuacgugcacuucuucagagagcccaccgaccugaagcaguucaagcaggacgccaaguacagccacggcaucgacgugaccgaccuguucgccgcccagcccggccugaccagcgccgugaucgaggcccugcccagaaacauggugaucaccugccagggcagcgaggacaucagaaagcugcuggagagccagggcagaagagacaucaagcugaucgacaucacccugagcaaggccgacagcagaaaguucgagaacgccgugugggaccaguucaaggaccugugccacaugcacaccggcguggugguggagaagaagaagagaggcggcaaggaggagaucaccccccacugcgcccugauggacugcaucauguucgacgccgccgugagcggcggccuggacgccaaggugcugagaguggugcugcccagagacaugguguucagaaccagcacccccaagguggugcugugaggacuagucccuguucccagagcccacuuuuuuuucuuuuuuugaaauaaaauagccugucuuucagaucucaaaggcucuuuucagagccaccaaaaaaaaaaaaaaaaaaaaaaaaaaaaaaaaaaaaaaaaaaaaaaaaaaaaaaaaaaaaaaaaagaauu

SEQ ID NO: 19502 - RNA, 2002 nt, Artificial Sequence
  mRNA product Design a-1 (hSL-A64-N5) comprising derived and/or modified sequence from LASV(AV;Clade V)__CCA30315__SP-HsALB_NP(2-569) (opt4)
aggagagucccgcagucggcguccagcggcucugcuuguucgugugugugucguugcaggccuuauucaagcuuaccaugaagugggugaccuucaucagccugcuguuccuguucagcagcgccuacagcagcgccagcaaggaggugaagagcuuccuguggacccagagccugagaagagagcugagcggcuacugcagcaacaucaagcugcagguggugaaggacgcccaggcccugcugcacggccuggacuucagcgaggugagcaacgugcagagacugaugagaaagcagagaagagacgacagcgaccugaagagacugagagaccugaaccaggccgugaacaaccugguggagcugaagagcacccagcagaagagcgugcugagagugggcacccugagcagcgacgaccugcugacccuggccgccgaccuggagaagcugaagagcaaggugaccagaaccgagagaccccugagcagcggcguguacaugggcaaccugagcagccagcagcuggaccagagaagagcccugcugaaccugaucggcaugaccaacggcagccagggcagccaggccggcagagacggcguggugagagugugggacgugaagaacgccgagcugcugaacaaccaguucggcaccaugcccagccugacccuggccugccugaccaagcagggccagguggaccugaacgacguggugcaggcccugaccgaccugggccugaucuacaccgccaaguaccccaacaccagcgaccuggacagacugacccagagccaccccauccugaacaugaucgacaccaagaagagcagccugaacaucagcggcuacaacuucagccugggcgccgccgugaaggccggcgccugcaugcuggacggcggcaacaugcuggagaccaucaaggugagcccccagagcauggacggcauccugaagagcauccugaaggugaagagagcccugggcauguucgugagcgacacccccggcgagagaaaccccuacgagaacauccuguacaagaucugccugagcggcgacggcuggcccuacaucgccagcagaaccagcaucgugggcagagccugggagaacaccgugguggaccuggagaccgacggcaagccccagaagaucggcagcggcaacagcaacaagagccugcagagcgccggcuucagcgccggccugaccuacagccagcugaugacccugaaggacgccaugcugcagcuggaccccaacgccaagaccuggauggacaucgagggcagacccgaggaccccguggagguggcccuguaccagcccaucagcggcugcuacauccacuucuucagagagcccaccgaccugaagcaguucaagcaggacgccaaguacagccacggcaucgacaucgccgaccuguucgccgcccagcccggccugaccagcgccgugaucgaggcccugcccagaaacauggugaucaccugccagggcagcgaggacaucaagaagcugcuggagagccagggcagaaaggacaucaagcugaucgacaucgcccugagcaagaucgacagcagaaaguucgagaacgccgugugggaccaguacaaggaccugugccacaugcacaccggcguggugguggagaagaagaagagaggcggcaaggaggagaucaccccccacugcgcccugauggacugcaucauguucgacgccgccgugagcggcggccugaacacccuggugcugagagccgugcugcccagagacaugguguucagaaccagcacccccagaguggugcugugaggacuagucccuguucccagagcccacuuuuuuuucuuuuuuugaaauaaaauagccugucuuucagaucucaaaggcucuuuucagagccaccaaaaaaaaaaaaaaaaaaaaaaaaaaaaaaaaaaaaaaaaaaaaaaaaaaaaaaaaaaaaaaaaagaauu

SEQ ID NO: 19503 - RNA, 2002 nt, Artificial Sequence
  mRNA product Design a-1 (hSL-A64-N5) comprising derived and/or modified sequence from LASV(Togo/2016/7082;Clade VI)__AMR44578__SP-HsALB_NP(2-569) (opt4)
aggagagucccgcagucggcguccagcggcucugcuuguucgugugugugucguugcaggccuuauucaagcuuaccaugaagugggugaccuucaucagccugcuguuccuguucagcagcgccuacagcagcaacagcaaggaggugaagagcuuccuguggacccagagccugagaagagagcugagcggcuacugcagcaacaucaagcugcagguggugaaggacgcccaggcccugcugcacggccuggacuucagcgaggugagcaacgugcagagacugaugagaaagcagaagagagacgacggcgaccugaagagacugagagaccugaaccaggccgugaacaaccugguggagcugaagagcgugcagcagaagagcauccugagagugggcacccugaccagcgacgaccugcugacccuggccgccgaccuggagaagcugaagagcaaggugaccagaaccgagagaccccugagcagcggcguguacaugggcaaccugagcagccagcagcuggaccagagaagagcccugcugagcaugaucggcaugagcggcggcaaccagaacagccagcccaagggcgacggcguggugagagugugggacgugaagaacgccgaccugcugaacaaccaguucggcaccaugcccagccugacccuggccugccugaccaagcagggccagguggaccugaacgacgccgugcaggcccugaccgaccugggccugaucuacaccgccaaguaccccaacagcagcgaccuggacagacugagccagagccaccccauccugaacaugaucgacaccaagaagagcagccugaacaucagcggcuacaacuucagccugggcgccgccaucaagaccggcgccugcaugcuggacggcggcaacaugcuggagaccaucaaggugaccccccagaccauggacggcauccugaagagcauccugaaggugaagagaagccugggcauguucaucagcgacacccccggcgagagaaaccccuacgagaacauccuguacaagaucugccugagcggcgacggcuggcccuacaucgccagcagaaccgccaucaucggcagagccugggagaacaccgugguggaccuggagagcgacagcaagccccagaagaucggcagcaacggcagcaacaagagccugcagagcgccggcuucgcccccggccugaccuacagccagcugaugacccugaaggacagcaugcugcagcuggaccccaacgccaagaccuggaucgacaucgagggcagacccgaggaccccguggagguggcccuguuccagcccaucagcggcugcuacauccacuucuucagagagcccaccgaccugaagcaguucaagcaggacgccaaguacagccacggcaucgacgugaccgaccuguucgccgcccagcccggccugaccagcgccgugaucgaggcccugcccagaaacauggugcugaccugccagggcagcgacgacaucaagaagcugcuggacagccagggcagaagagacaucaagcugaucgacgugagccugaacaagaucgacagcagaaaguucgagaacgccgugugggaccaguacaaggaccugugccacaugcacaccggcguggugguggagaagaagaagaagggcggcaaggaggagaucaccccccacugcgcccugcuggacugcaucauguucgacgccgccgugagcggcggccugaacgccaccgugcugagagccgugcugcccagagacaugguguucagaaccagcagccccaagguggugcugugaggacuagucccuguucccagagcccacuuuuuuuucuuuuuuugaaauaaaauagccugucuuucagaucucaaaggcucuuuucagagccaccaaaaaaaaaaaaaaaaaaaaaaaaaaaaaaaaaaaaaaaaaaaaaaaaaaaaaaaaaaaaaaaaagaauu

SEQ ID NO: 19504 - RNA, 2002 nt, Artificial Sequence
  mRNA product Design a-1 (hSL-A64-N5) comprising derived and/or modified sequence from LASV(KAK-428;Clade n.d. (VII))__ANH09741__SP-HsALB_NP(2-569) (opt4)
aggagagucccgcagucggcguccagcggcucugcuuguucgugugugugucguugcaggccuuauucaagcuuaccaugaagugggugaccuucaucagccugcuguuccuguucagcagcgccuacagcagcaacagcaaggaggugaagagcuuccuguggacccagagccugagaagagagcugagcggcuacugcaccaacaucaagcugcagguggugaaggacgcccaggcccugcugcacggccuggacuucagcgaggugagcaacgugcagagacugaugagaaagcagaagagagacgacaacgaccugaagagacugagagaccugaaccaggccgugaacaaccugguggagcugaagagcgugcagcagaagagcgugcugaaggugggcacccugaacagcgacgaccugcugacccuggccgccgaccuggagaagcugaagagcaagguggugagaaccgagagaccccugagcagcggcguguacaugggcaaccugagcagccagcagcuggaccagagaagagcccugcugaacaugaucggcauggccggcggcagccagggcaaccagcccagcagagacggcguggugagagugugggacgugaagaacgccgaccugcugaacaaccaguucggcaccaugcccagccugacccuggccugccugaccaagcagggccagguggaccugaacgacguggugcuggcccugaccgaccugggccugaucuacaccgccaaguaccccaacagcagcgaccuggacagacugagccagaaccaccccgugcugaacaugaucgacgugaacaagagcagccugaacaucagcggcuacaacuucagccugggcgccgccgugaaggccggcgccugcaugcuggacggcggcaacaugcuggagaccaucaagaucagcccccagaccguggacggcauccugaagagcauccugaaggugaagagagcccugggcauguucgugagcgacacccccggcgagagaaaccccuacgagaacauccuguacaaggugugccugagcggcaacggcuggcccuacaucgccagcagaaccagcaucgugggcagagccugggagaacaccgugguggaccuggagagcaacaagaaccagcccaaggugggcaacaacggcagcaacaagaugcugcagagcagcggcuucgccaccggccugaccuacagccagcugaugacccugagagacagcaugcugcagcuggaccccaccgccaagaccuggaucgacaucgagggcagacccgaggaccccguggagcuggcccuguuccagcccagcagcggcugcuacauccacuucuucagagagcccaccgaccugaagcaguucaagcaggacgccaaguacagccacggcaucgacgugaacgaccuguucagcgcccagcccggccugaccagcgccgugcuggaggcccugcccagaaacauggugcugaccugccagggcagcgacgacaucagaaagcugcuggacagccaggacagaaaggacaucaagcugaucgacaucagccugagcaaggccgacgccagaaaguucgagaacgacgugugggaccaguucaaggaccugugccacaugcacaccggcaucgugguggagaagaagaagaagggcggcaagcaggagaugaccccccacugcgcccugcuggacugcaucauguucgacgccgccgugagcggcggccugaacgugcccacccugagagccgugcugcccaccgacaugguguucagaaccaucaccaccaagguggugcugugaggacuagucccuguucccagagcccacuuuuuuuucuuuuuuugaaauaaaauagccugucuuucagaucucaaaggcucuuuucagagccaccaaaaaaaaaaaaaaaaaaaaaaaaaaaaaaaaaaaaaaaaaaaaaaaaaaaaaaaaaaaaaaaaagaauu

SEQ ID NO: 19505 - RNA, 2002 nt, Artificial Sequence; identical to SEQ ID NO: 19499
  mRNA product Design a-1 (hSL-A64-N5) comprising derived and/or modified sequence from LASV(Pinneo-NIG-1969;Clade I)__AIT17837__SP-HsALB_NP(2-569) (opt4)

SEQ ID NO: 19506 - RNA, 2002 nt, Artificial Sequence
  mRNA product Design a-1 (hSL-A64-N5) comprising derived and/or modified sequence from LASV(ISTH0009-NIG-2011;Clade II)__AIT17405__SP-HsALB_NP(2-569) (opt4)
aggagagucccgcagucggcguccagcggcucugcuuguucgugugugugucguugcaggccuuauucaagcuuaccaugaagugggugaccuucaucagccugcuguuccuguucagcagcgccuacagcagcgugagcaaggaggugaagagcuuccuguggacccagagccugagaagagagcugagcggcuacugcagcaacaucaagcugcagguggugaaggacgcccaggcccugcugcacggccuggacuucagcgaggugagcaacgugcagagacugaugagaaagcagaagagagacgacagcgaccugaagagacugagagaccugaaccaggccgugaacaaccugguggagcugaagagcacccagcagaagagcauccugagagugggcacccugaccagcgacgaccugcugacccuggccgccgaccuggagaagcugaagagcaaggugaucagaaccgagagaccccugagcagcggcguguacaugggcaaccugagcacccagcagcuggagcagagaagagcccugcugaacaugaucggcauggugggcggcgcccagggcacccagcccggcagagacggcguggugagagugugggacgugaagaaccccgaccugcugaacaaccaguucggcaccaugcccagccugacccuggccugccugaccaagcagggccagguggaccugaacgacgccgugcuggcccugaccgaccugggccugaucuacaccgccaaguaccccaacagcagcgaccuggacagacugagccagagccaccccauccugaacaugguggacaucaagaagagcagccugaacaucagcggcuacaacuucagccugggcgccgccgugaaggccggcgccugcaugcuggacggcggcaacaugcuggagaccaucaaggugaccccccagaccauggacggcauccugaagagcauccugaaggugaagagaagccugggcauguucgugagcgacacccccggcgagagaaaccccuacgagaacauccuguacaagaucugccugagcggcgacggcuggcccuacaucgccagcagaaccagcaucgugggcagagccugggagaacaccaccguggaccuggagagcgacggcaagccccagaaggugggcagcgccggcagcaacaagagccugcagagcgccggcuuccccaccggccugaccuacagccagcugaugacccugaaggacagcaugaugcagcuggaccccagcgccaagaccuggaucgacaucgagggcagacccgaggaccccguggagaucgcccuguaccagcccaugagcggcugcuacauccacuucuucagagagcccaccgaccugaagcaguucaagcaggacgccaaguacagccacggcaucgacguggccgaccuguuccccgcccagcccggccugaccagcgccgugaucgaggcccugcccagaaacauggugcugaccugccagggcagcgacgacaucaagagacugcuggacagccagggcagaagagacaucaagcugaucgacaucgcccugagcaaggccgacagcagaagauucgagaacgccgugugggaccagugcaaggaccugugccacaugcacaccggcguggugguggagaagaagaagagaggcggcaaggaggagaucaccccccacugcgcccugauggacugcaucauguacgacgccgccgugagcggcggccugaacauccccgugcugagagccgugcugcccagagacaugguguucagaaccagcagccccaagguggugcugugaggacuagucccuguucccagagcccacuuuuuuuucuuuuuuugaaauaaaauagccugucuuucagaucucaaaggcucuuuucagagccaccaaaaaaaaaaaaaaaaaaaaaaaaaaaaaaaaaaaaaaaaaaaaaaaaaaaaaaaaaaaaaaaaagaauu

SEQ ID NO: 19507 - RNA, 2002 nt, Artificial Sequence
  mRNA product Design a-1 (hSL-A64-N5) comprising derived and/or modified sequence from LASV(ISTH2010-NIG-2012;Clade II)__AIT17483__SP-HsALB_NP(2-569) (opt4)
aggagagucccgcagucggcguccagcggcucugcuuguucgugugugugucguugcaggccuuauucaagcuuaccaugaagugggugaccuucaucagccugcuguuccuguucagcagcgccuacagcagcgccagcaaggaggugaagagcuuccuguggacccagagccugagaagagagcugagcggcuacugcagcaacaucaagcugcagguggugaaggacgcccaggcccugcugcacggccuggacuucagcgaggugagcaacgugcagagacugaugagaaagcagaagagagacgacagcgaccugaagagacugagagaccugaaccaggccgugaacaaccugguggagcugaagagcacccagcagaagagcauccugagagugggcacccugaccagcgacgaccugcugacccuggccgccgaccuggagaagcugaagagcaaggugaucagaaccgagagaccccugagcagcggcguguacaugggcaaccugagcacccagcagcuggagcagagaagagcccugcugaaccugaucggcauggugggcggcgcccagggcacccagcccggcagagacggcguggugagagugugggacgugaagaaccccgaccugcugaacaaccaguucggcaccaugcccagccugacccuggccugccugaccaagcagggccagguggaccugaacgacgccgugcuggcccugaccgaccugggccugaucuacaccgccaaguaccccaacagcagcgaccuggacagacugagccagagccaccccauccugaacaugguggacaccaagaagagcagccugaacaucagcggcuucaacuucagccugggcgccgccgugaaggccggcgccugcaugcuggacggcggcaacaugcuggagaccaucaaggugaccccccagaccauggacggcauccugaagagcauccugaaggugaagaagagccugggcauguucgugagcgacacccccggcgagagaaaccccuacgagaacauccuguacaagaucugccugagcggcgacggcuggcccuacaucgccagcagaaccagcaucgugggcagagccugggagaacaccaccguggaccuggagagcgacggcaagccccacaaggugggcaccgccggcagcaacaagagccugcagagcgccggcuuccccaccggccugaccuacagccagcugaugacccugaaggacagcaugaugcagcuggaccccagcgccaagaccuggaucgacaucgagggcagacccgaggaccccguggagaucgcccuguaccagcccaugagcggcugcuacauccacuucuucagagagcccaccgaccugaagcaguucaagcaggacgccaaguacagccacggcaucgacguggccgaccuguuccccgcccagcccggccugaccagcgccgugaucgaggcccugcccagaaacauggugcugaccugccagggcagcgacgacaucaagagacugcuggacagccagggcagaagagacaucaagcugaucgacaucgcccugagcaaggccgacagcagaagauucgagaacgccgugugggaccagugcaaggaccugugccacaugcacaccggcguggugguggagaagaagaagagaggcggcaaggaggagaucaccccccacugcgcccugauggacugcaucauguacgacgccgccgugagcggcggccugaacauccccgugcugagagccgugcugcccagagacaugguguucagaaccagcagccccaagguggugcugugaggacuagucccuguucccagagcccacuuuuuuuucuuuuuuugaaauaaaauagccugucuuucagaucucaaaggcucuuuucagagccaccaaaaaaaaaaaaaaaaaaaaaaaaaaaaaaaaaaaaaaaaaaaaaaaaaaaaaaaaaaaaaaaaagaauu

SEQ ID NO: 19508 - RNA, 2002 nt, Artificial Sequence
  mRNA product Design a-1 (hSL-A64-N5) comprising derived and/or modified sequence from LASV(Lassa virus/H.sapiens-wt/NGA/2015/ISTH_0543;Clade II)__AVO03640__SP-HsALB_NP(2-569) (opt4)
aggagagucccgcagucggcguccagcggcucugcuuguucgugugugugucguugcaggccuuauucaagcuuaccaugaagugggugaccuucaucagccugcuguuccuguucagcagcgccuacagcagcgccagcaaggaggugaagagcuuccuguggacccagagccugagaagagagcugagcggcuacugcagcaacaucaagcugcagguggugaaggacgcccaggcccugcugcacggccuggacuucagcgaggugagcaacgugcagagacugaugagaaagcagaagagagacgacagcgaccugaagagacugagagaccugaaccaggccgugaacaaccugguggagcugaagagcacccagcagaagagcauccugagagugggcacccugaccagcgacgaccugcugacccuggccgccgaccuggagaagcugaagagcaaggugaucagaaccgagagaccccugagcagcggcguguacaugggcaaccugagcacccagcagcuggagcagagaagagcccugcugaacaugaucggcauggugggcggcgcccagggcacccagcccggcagagacggcguggugagagugugggacgugaagaaccccgaccugcugaacaaccaguucggcaccaugcccagccugacccuggccugccugaccaagcagggccagguggaccugaacgacgccgugcuggcccugaccgaccugggccugaucuacaccgccaaguaccccaacagcagcgaccuggacagacugagccagagccaccccauccugaacaugguggacaccaagaagagcagccugaacaucagcggcuacaacuucagccugggcgccgccgugaaggccggcgccugcaugcuggacggcggcaacaugcuggagaccaucaaggugaccccccagaccauggacggcauccugaagagcauccugaaggugaagaagagccugggcauguucgugagcgacacccccggcgagagaaaccccuacgagaacauccuguacaagaucugccugagcggcgacggcuggcccuacaucgccagcagaaccagcaucgugggcagagccugggagaacaccaccguggaccuggagagcgacggcaagccccagaaggugggcagcgccggcagcaacaagagccugcagagcgccggcuuccccaccggccugaccuacagccagcugaugacccugaaggacagcaugaugcagcuggaccccagcgccaagaccuggaucgacaucgagggcagacccgaggaccccguggagaucgcccuguaccagcccaugagcggcugcuacauccacuucuucagagagcccaccgaccugaagcaguucaagcaggacgccaaguacagccacggcaucgacguggccgaccuguuccccgcccagcccggccugaccagcgccgugaucgaggcccugcccagaaacauggugcugaccugccagggcagcgacgacaucaagagacugcuggacagccagggcagaaaggacaucaagcugaucgacaucgcccugagcaaggccgacagcagaagauucgagaacgccgugugggaccagugcaaggaccugugccacaugcacaccggcguggugguggagaagaagaagagaggcggcaaggaggagaucaccccccacugcgcccugauggacugcaucauguacgacgccgccgugagcggcggccugaacauccccgugcugagagccgugcugcccagagacaugguguucagaaccagcagccccaagguggugcugugaggacuagucccuguucccagagcccacuuuuuuuucuuuuuuugaaauaaaauagccugucuuucagaucucaaaggcucuuuucagagccaccaaaaaaaaaaaaaaaaaaaaaaaaaaaaaaaaaaaaaaaaaaaaaaaaaaaaaaaaaaaaaaaaagaauu

SEQ ID NO: 19509 - RNA, 2002 nt, Artificial Sequence
  mRNA product Design a-1 (hSL-A64-N5) comprising derived and/or modified sequence from LASV(Lassa virus/H.sapiens-wt/NGA/2016/ISTH_0009;Clade II)__AVO03572__SP-HsALB_NP(2-569) (opt4)
aggagagucccgcagucggcguccagcggcucugcuuguucgugugugugucguugcaggccuuauucaagcuuaccaugaagugggugaccuucaucagccugcuguuccuguucagcagcgccuacagcagcgccagcaaggaggugaagagcuuccuguggacccagagccugagaagagagcugagcggcuacugcagcaacaucaagcugcagguggugaaggacgcccaggcccugcugcacggccuggacuucagcgaggugagcaacgugcagagacugaugagaaagcagaagagagacgacagcgaccugaagagacugagagaccugaaccaggccgugaacaaccugguggagcugaagagcacccagcagaagagcauccugagagugggcacccugaccagcgacgaccugcugacccuggccgccgaccuggagaagcugaagagcaaggugaucagaaccgagagaccccugagcagcggcguguacaugggcaaccugagcacccagcagcuggagcagagaagagcccugcugaacaugaucggcauggugggcggcgcccagggcacccagcccggcagagacggcguggugagagugugggacgugaagaaccccgaccugcugaacaaccaguucggcaccaugcccagccugacccuggccugccugaccaagcagggccagguggaccugaacgacgccgugcuggcccugaccgaccugggccugaucuacaccgccaaguaccccaacagcagcgaccuggacagacugagccagagccaccccauccugaacaugguggacaccaagaagagcagccugaacaucagcggcuacaacuucagccugggcgccgccgugaaggccggcgccugcaugcuggacggcggcaacaugcuggagaccaucaaggugaccccccagaccauggacggcauccugaagagcauccugaaggugaagaagagccugggcauguucgugagcgacacccccggcgagagaaaccccuacgagaacauccuguacaagaucugccugagcggcgacggcuggcccuacaucgccagcagaaccagcaucgugggcagagccugggagaacaccaccguggaccuggagagcgacggcaagccccagaaggugggcagcgccggcagcaacaagagccugcagagcgccggcuuccccaccggccugaccuacagccagcugaugacccugaaggacagcaugaugcagcuggaccccagcgccaagaccuggaucgacaucgagggcagacccgaggaccccguggagaucgcccuguaccagcccaugagcggcugcuacauccacuucuucagagagcccaccgaccugaagcaguucaagcaggacgccaaguacagccacggcaucgacguggccgaccuguuccccgcccagcccggccugaccagcgccgugaucgaggcccugcccagaaacauggugcugaccugccagggcagcgacgacaucaagagacugcuggacagccagggcagaagagacaucaagcugaucgacaucgcccugagcaaggccgacagcagaagauucgagaacgccgugugggaccagugcaaggaccugugccacaugcacaccggcguggugguggagaagaagaagagaggcggcaaggaggagaucaccccccacugcgcccugauggacugcaucauguacgacgccgccgugagcggcggccugaacauccccgugcugagagccgugcugcccagagacaugguguucagaaccagcagccccaagguggugcugugaggacuagucccuguucccagagcccacuuuuuuuucuuuuuuugaaauaaaauagccugucuuucagaucucaaaggcucuuuucagagccaccaaaaaaaaaaaaaaaaaaaaaaaaaaaaaaaaaaaaaaaaaaaaaaaaaaaaaaaaaaaaaaaaagaauu

SEQ ID NO: 19510 - RNA, 2002 nt, Artificial Sequence
  mRNA product Design a-1 (hSL-A64-N5) comprising derived and/or modified sequence from LASV(Lassa virus/H.sapiens-wt/NGA/2016/ISTH_0017;Clade II)__AVO03568__SP-HsALB_NP(2-569) (opt4)
aggagagucccgcagucggcguccagcggcucugcuuguucgugugugugucguugcaggccuuauucaagcuuaccaugaagugggugaccuucaucagccugcuguuccuguucagcagcgccuacagcagcgccagcaaggaggugaagagcuuccuguggacccagagccugagaagagagcugagcggcuacugcagcagcaucaagcugcagguggugaaggacgcccaggcccugcugcacggccuggacuucagcgaggugagcaacgugcagagacugaugagaaagcagaagagagacgacagcgaccugaagagacugagagaccugaaccaggccgugaacaaccugguggagcugaagagcacccagcagaagagcauccugagagugggcacccugaccagcgacgaccugcugacccuggccgccgaccuggagaagcugaagagcaaggugaucagaaccgagagaccccugagcagcggcguguacaugggcaaccugagcacccagcagcuggagcagagaagagcccugcugaacaugaucggcauggccggcggcgcccagggcacccagcccggcagagacggcguggugagagugugggacgugaagaaccccgaccugcugaacaaccaguucggcaccaugcccagccugacccuggccugccugaccaagcagggccagguggaccugaacgacgccgugcuggcccugaccgaccugggccugaucuacaccgccaaguaccccaacagcagcgaccuggacagacugagccagagccaccccauccugaacaugguggacaccaagaagagcagccugaacaucagcggcuacaacuucagccugggcgccgccgugaaggccggcgccugcaugcuggacggcggcaacaugcuggagaccaucaaggugaccccccagaccauggacggcauccugaagagcauccugaaggugaagagaagccugggcauguucgugagcgacgcccccggcgagagaaaccccuacgagaacauccuguacaagaucugccugagcggcgacggcuggcccuacaucgccagcagaaccagcaucgugggcagagccugggagaacaccaccguggaccuggagagcgacggcaagccccagaaggugggcgccaccggcagcaacaagagccugcagagcgccggcuuccccaccggccugaccuacagccagcugaugacccugaaggacagcaugaugcagcuggaccccagcgccaagaccuggaucgacaucgagggcagacccgaggaccccguggagguggcccuguaccagcccgugagcggcugcuacauccacuucuucagagagcccaccgaccugaagcaguucaagcaggacgccaaguacagccacggcaucgacguggccgaccuguuccccgcccagcccggccugaccagcgccgugaucgaggcccugcccagaaacauggugcugaccugccagggcagcgacgacaucaagaagcugcuggacagccagggcagaaaggacaucaagcugaucgacaucgcccugagcaaggccgacagcagaagauucgagaacgccgugugggaccagugcaaggaccugugccacaugcacaccggcguggugguggagaagaagaagagaggcggcaaggaggagaucaccccccacugcgcccugauggacugcaucauguacgacgccgccgugagcggcggccugaacauccccgugcugagagccgugcugcccagagacaugguguucagaaccagcagccccaagguggugcugugaggacuagucccuguucccagagcccacuuuuuuuucuuuuuuugaaauaaaauagccugucuuucagaucucaaaggcucuuuucagagccaccaaaaaaaaaaaaaaaaaaaaaaaaaaaaaaaaaaaaaaaaaaaaaaaaaaaaaaaaaaaaaaaaagaauu

SEQ ID NO: 19511 - RNA, 2002 nt, Artificial Sequence
  mRNA product Design a-1 (hSL-A64-N5) comprising derived and/or modified sequence from LASV(Lassa virus/H.sapiens-wt/NGA/2018/ISTH_0959;Clade II)__AVV65100__SP-HsALB_NP(2-569) (opt4)
aggagagucccgcagucggcguccagcggcucugcuuguucgugugugugucguugcaggccuuauucaagcuuaccaugaagugggugaccuucaucagccugcuguuccuguucagcagcgccuacagcagcgccagcaaggaggugaagagcuuccuguggacccagagccugagaagagagcugagcggcuacugcagcaacaucaagcugcagguggugaaggacgcccaggcccugcugcacggccuggacuucagcgaggugagcaacgugcagagacugaugagaaagcagaagagagacgacagcgaccugaagagacugagagaccugaaccaggccgugaacaaccugguggagcugaagagcacccagcagaagagcauccugagagugggcacccugaccagcgacgaccugcugacccuggccgccgaccuggagaagcugaagagcaaggugaucagaaccgagagaccccugagcagcggcguguacaugggcaaccugagcacccagcagcuggagcagagaagagcccugcugaaccugaucggcauggugggcggcgcccagggcacccagcccggcagagacggcguggugagagugugggacgugaagaaccccgaccugcugaacaaccaguucggcaccaugcccagccugacccuggccugccugaccaagcagggccagguggaccugaacgacguggugcuggcccugaccgaccugggccugaucuacaccgccaaguaccccaacagcagcgaccuggacagacugagccagagccaccccauccugaacaugguggacaccaagaagagcagccugaacaucagcggcuucaacuucagccugggcgccgccgugaaggccggcgccugcaugcuggacggcggcaacaugcuggagaccaucaaggugaccccccagaccauggacggcauccugaagagcauccugaaggugaagaagagccugggcauguucgugagcgacacccccggcgagagaaaccccuacgagaacauccuguacaagaucugccugagcggcgacggcuggcccuacaucgccagcagaaccagcaucgugggcagagccugggagaacaccaccguggaccuggagagcgacggcaagccccacaaggugggcaccgccggcagcaacaagagccugcagagcgccggcuuccccaccggccugaccuacagccagcugaugacccugaaggacagcaugaugcagcuggaccccagcgccaagaccuggaucgacaucgagggcagacccgaggaccccguggagaucgcccuguaccagcccaugagcggcugcuacauccacuucuucagagagcccaccgaccugaagcaguucaagcaggacgccaaguacagccacggcaucgacguggccgaccuguuccccgcccagcccggccugaccagcgccgugaucgaggcccugcccagaaacauggugcugaccugccagggcagcgacgacaucaagagacugcuggacagccagggcagaaaggacaucaagcugaucgacaucgcccugagcaagaccgacagcagaagauucgagaacgccgugugggaccagugcaaggaccugugccacaugcacaccggcguggugguggagaagaagaagagaggcggcaaggaggagaucaccccccacugcgcccugauggacugcaucauguacgacgccgccgugagcggcggccugaacauccccgugcugagagccgugcugcccagagacaugguguucagaaccagcagccccaagguggugcugugaggacuagucccuguucccagagcccacuuuuuuuucuuuuuuugaaauaaaauagccugucuuucagaucucaaaggcucuuuucagagccaccaaaaaaaaaaaaaaaaaaaaaaaaaaaaaaaaaaaaaaaaaaaaaaaaaaaaaaaaaaaaaaaaagaauu

SEQ ID NO: 19512 - RNA, 2002 nt, Artificial Sequence
  mRNA product Design a-1 (hSL-A64-N5) comprising derived and/or modified sequence from LASV(LASV003-NIG-2008;Clade II)__AIT17581__SP-HsALB_NP(2-569) (opt4)
aggagagucccgcagucggcguccagcggcucugcuuguucgugugugugucguugcaggccuuauucaagcuuaccaugaagugggugaccuucaucagccugcuguuccuguucagcagcgccuacagcagcgccagcaaggaggugaagagcuuccuguggacccagagccugagaagagagcugagcggcuacugcagcagcaucaagcugcagguggugaaggacgcccaggcccugcugcacggccuggacuucagcgaggugagcaacgugcagagacugaugagaaagcagaagagagacgacagcgaccugaagagacugagagaccugaaccaggccgugaacaaccugguggagcugaagagcacccagcagaagagcgugcugagagugggcacccugaccagcgacgaccugcugacccuggccgccgaccuggagaagcugaagagcaaggugaucagaaccgagagaccccugagcagcggcguguacaugggcaaccugagcgcccagcagcuggagcagagaagaacccugcugaacaugaucggcauggugggcggcgcccagggcacccagcccggcagagacggcguggugagagugugggacgugaagaaccccgaccugcugaacaaccaguucggcaccaugcccagccugacccuggccugccugaccaagcagggccagguggaccugaacgacguggugcuggcccugaccgaccugggccugaucuacaccgccaaguaccccaacagcagcgaccuggacagacugagccagagccaccccauccugagcaugguggacaccaagaagagcagccugaacaucagcggcuacaacuucagccugggcgccgccgugaaggccggcgccugcaugcuggacggcggcaacaugcuggagaccaucaaggugaccccccagaccauggacggcauccugaagagcauccugaaggugaagaagagccugggcauguucgugagcgacacccccggcgagagaaaccccuacgagaacauccuguacaagaucugccugagcggcgacggcuggcccuacaucgccagcagaaccagcaucgugggcagagccugggagaacaccaccguggaccuggagagcgacggcaagccccagaaggugggcaccgccggcagcaacaagagccugcagagcgccggcuuccccaccggccugaccuacagccagcugaugacccugaaggacagcaugaugcagcuggaccccagcgccaagaccuggaucgacaucgagggcagacccgaggaccccguggagaucgcccuguaccagcccaugagcggcugcuacauccacuucuucagagagcccaccgaccugaagcaguucaagcaggacgccaaguacagccacggcaucgacgugaccgaccuguuccccgcccagcccggccugaccagcgccgugaucgaggcccugcccagaaacauggugcugaccugccagggcagcgacgacaucaagagacugcuggacagccagggcagaagagacaucaagcugaucgacaucgcccugagcaaggccgacagcagaagauucgagaacgccgugugggaccagugcaaggaccugugccacaugcacaccggcguggugguggagaagaagaagagaggcggcaaggaggagaucaccccccacugcgcccugauggacugcaucauguacgacgccgccgugagcggcggccugaacauccccgugcugagagccgugcugcccagagacaugguguucagaaccagcagccccaagguggugcugugaggacuagucccuguucccagagcccacuuuuuuuucuuuuuuugaaauaaaauagccugucuuucagaucucaaaggcucuuuucagagccaccaaaaaaaaaaaaaaaaaaaaaaaaaaaaaaaaaaaaaaaaaaaaaaaaaaaaaaaaaaaaaaaaagaauu

SEQ ID NO: 19513 - RNA, 2002 nt, Artificial Sequence
  mRNA product Design a-1 (hSL-A64-N5) comprising derived and/or modified sequence from LASV(LASV035-NIG-2009;Clade II)__AIT17589__SP-HsALB_NP(2-569) (opt4)
aggagagucccgcagucggcguccagcggcucugcuuguucgugugugugucguugcaggccuuauucaagcuuaccaugaagugggugaccuucaucagccugcuguuccuguucagcagcgccuacagcagcgccagcaaggaggugaagagcuuccuguggacccagagccugagaagagagcugagcggcuacugcagcagcaucaagcugcagguggugaaggacgcccaggcccugcugcacggccuggacuucagcgaggugagcaacgugcagagacugaugagaaagcagaagagagacgacagcgaccugaagagacugagagaccugaaccaggccgugaacaaccugguggagcugaagagcacccagcagaagagcauccugagagugggcacccugaccagcgacgaccugcugacccuggccgccgaccuggagaagcugaagagcaaggugaucagaaccgagagaccccugagcagcggcguguacaugggcaaccugagcgcccagcagcuggagcagagaagagcccugcugaacaugaucggcauggugggcggcgcccagggcacccagcccggcagagacggcguggugagagugugggacgugaagaaccccgaccugcugaacaaccaguucggcaccaugcccagccugacccuggccugccugaccaagcagggccagguggaccugaacgacgccgugcuggcccugaccgaccugggccugaucuacaccgccaaguaccccaacagcagcgaccuggacagacugagccagagccaccccauccugaacaugguggacaccaagaagagcagccugaacaucagcggcuacaacuucagccugggcgccgccgugaaggccggcgccugcaugcuggacggcggcaacaugcuggagaccaucaaggugaccccccagaccauggacggcauccugaagagcauccugaaggugaagagaagccugggcauguucgugagcgacacccccggcgagagaaaccccuacgagaacauccuguacaagaucugccugagcggcgacggcuggcccuacaucgccagcagaaccagcaucgugggcagagccugggagaacaccaccguggaccuggagagcgacggcaagccccagaaggugggcaccaccggcagcaacaagagccugcagagcgccggcuuccccaccggccugaccuacagccagcugaugacccugaaggacagcaugaugcagcuggaccccagcgccaagaccuggaucgacaucgagggcagacccgaggaccccguggagaucgcccuguaccagcccaugagcggcugcuacauccacuucuucagagagcccaccgaccugaagcaguucaagcaggacgccaaguacagccacggcaucgacguggccgaccuguuccccgcccagcccggccugaccagcgccgugaucgaggcccugcccagaaacauggugcugaccugccagggcagcgacgacaucaagaagcugcuggacagccagggcagaagagacaucaagcugaucgacaucgcccugagcaaggccgacagcagaaaguucgagaacgccgugugggaccagugcaaggaccugugccacaugcacaccggcguggugguggagaagaagaagagaggcggcaaggaggagaucaccccccacugcgcccugauggacugcaucauguacgacgccgccgugagcggcggccugaacauccccgugcugagagccgugcugcccagagacaugguguucagaaccagcagccccaagguggugcugugaggacuagucccuguucccagagcccacuuuuuuuucuuuuuuugaaauaaaauagccugucuuucagaucucaaaggcucuuuucagagccaccaaaaaaaaaaaaaaaaaaaaaaaaaaaaaaaaaaaaaaaaaaaaaaaaaaaaaaaaaaaaaaaaagaauu

SEQ ID NO: 19514 - RNA, 2002 nt, Artificial Sequence
  mRNA product Design a-1 (hSL-A64-N5) comprising derived and/or modified sequence from LASV(LASV1000-NIG-2009;Clade II)__AIT17783__SP-HsALB_NP(2-569) (opt4)
aggagagucccgcagucggcguccagcggcucugcuuguucgugugugugucguugcaggccuuauucaagcuuaccaugaagugggugaccuucaucagccugcuguuccuguucagcagcgccuacagcagcgccagcaaggaggugaagagcuuccuguggacccagagccugagaagagagcugagcggcuacugcagcaacaucaagcugcagguggugaaggacgcccaggcccugcugcacggccuggacuucagcgaggugagcaacgugcagagacugaugagaaagcagaagagagacgacagcgaccugaagagacugagagaccugaaccaggccgugaacaaccugguggagcugaagagcacccagcagaagagcauccugagagugggcacccugaccagcgacgaccugcugacccuggccgccgaccuggagaagcugaagagcaaggugaucagaaccgagagaccccugagcagcggcguguacaugggcaaccugagcacccagcagcuggagcagagaagagcccugcugaacaugaucggcauggugggcggcgcccagggcacccagcccggcagagacggcguggugagagugugggacgugaagaaccccgaccugcugaacaaccaguucggcaccaugcccagccugacccuggccugccugaccaagcagggccagguggaccugaacgacguggugcuggcccugaccgaccugggccugaucuacaccgccaaguaccccaacagcagcgaccuggacagacugagccagagccaccccauccugaacaugguggacaccaagaagagcagccugaacaucagcggcuacaacuucagccugggcgccgccgugaaggccggcgccugcaugcuggacggcggcaacaugcuggagaccaucaaggugaccccccagaccauggacggcauccugaagagcauccugaaggugaagaagagccugggcauguucgugagcgacacccccggcgagagaaaccccuacgagaacauccuguacaagaucugccugagcggcgacggcuggcccuacaucgccagcagaaccagcaucgugggcagagccugggagaacaccaccguggaccuggagagcgacggcaagccccagaaggugggcaccgccggcagcaacaagagccugcagagcgccggcuuccccaccggccugaccuacagccagcugaugacccugaaggacagcaugaugcagcuggaccccagcgccaagaccuggaucgacaucgagggcagacccgaggaccccguggagaucgcccuguaccagcccgugagcggcugcuacauccacuucuucagagagcccaccgaccugaagcaguucaagcaggacgccaaguacagccacggcaucgacguggccgaccuguuccccgcccagcccggccugaccagcgccgugaucgaggcccugcccagaaacauggugcugaccugccagggcagcgacgacaucaagagacugcuggacagccagggcagaagagacaucaagcugaucgacaucgcccugagcaaggccgacagcagaagauucgagaacgccgugugggaccagugcaaggaccugugccacaugcacaccggcguggugguggagaagaagaagagaggcggcaaggaggagaucaccccccacugcgcccugauggacugcaucauguacgacgccgccgugagcggcggccugaacauccccgugcugagagccgugcugcccagagacaugguguucagaaccagcagccccaagguggugcugugaggacuagucccuguucccagagcccacuuuuuuuucuuuuuuugaaauaaaauagccugucuuucagaucucaaaggcucuuuucagagccaccaaaaaaaaaaaaaaaaaaaaaaaaaaaaaaaaaaaaaaaaaaaaaaaaaaaaaaaaaaaaaaaaagaauu

SEQ ID NO: 19515 - RNA, 2002 nt, Artificial Sequence
  mRNA product Design a-1 (hSL-A64-N5) comprising derived and/or modified sequence from LASV(LASV221-NIG-2010;Clade II)__AIT17625__SP-HsALB_NP(2-569) (opt4)
aggagagucccgcagucggcguccagcggcucugcuuguucgugugugugucguugcaggccuuauucaagcuuaccaugaagugggugaccuucaucagccugcuguuccuguucagcagcgccuacagcagcgccagcaaggaggugaagagcuuccuguggacccagagccugagaagagagcugagcggcuacugcagcagcaucaagcugcagguggugaaggacgcccaggcccugcugcacggccuggacuucagcgaggugagcaacgugcagagacugaugagaaagcagagaagagacgacagcgaccugaagagacugagagaccugaaccaggccgugaacaaccugguggagcugaagagcacccagcagaagagcauccugagagugggcacccugaccagcgacgaccugcugacccuggccgccgaccuggagaagcugaagagcaaggugaucagaaccgagagaccccugagcagcggcguguacaugggcaaccugagcacccagcagcuggagcagagaagagcccugcugaacaugaucggcauggugggcggcgcccagggcacccagcccggcagagacggcguggugagagugugggacgugaagaaccccgaccugcugaacaaccaguucggcaccaugcccagccugacccuggccugccugaccaagcagggccagguggaccugaacgacgccgugcuggcccugaccgaccugggccugaucuacaccgccaaguaccccaacagcagcgaccuggacagacugagccagagccaccccauccugaacaugguggacaccaagaagagcagccugaacaucagcggcuacaacuucagccugggcgccgccgugaaggccggcgccugcaugcuggacggcggcaacaugcuggagaccaucaaggugaccccccagaccguggacggcauccugaagagcauccugaaggugaagagaagccugggcauguucgugagcgacacccccggcgagagaaaccccuacgagaacauccuguacaagaucugccugagcggcgacggcuggcccuacaucgccagcagaaccagcaucgugggcagagccugggagaacaccaccguggaccuggagagcgacggcaagccccagaaggugggcaccgccggcagcaacaagagccugcagagcgccggcuuccccaccggccugaccuacagccagcugaugacccugaaggacagcaugaugcagcuggaccccagcgccaagaccuggaucgacaucgagggcagacccgaggaccccguggagaucgcccuguaccagcccaugagcggcugcuacauccacuucuucagagagcccaccgaccugaagcaguucaagcaggacgccaaguacagccacggcaucgacguggccgaccuguuccccgcccagcccggccugaccagcgccgugaucgaggcccugcccagaaacauggugcugaccugccagggcagcgacgacaucaagagacugcuggacagccagggcagaagagacaucaagcugaucgacaucgcccugagcaaggccgacagcagaaaguucgagaacgccgugugggaccagugcaaggaccugugccacaugcacaccggcguggugguggagaagaagaagagaggcggcaaggaggagaucaccccccacugcgcccugauggacugcaucauguacgacgccgccgugagcggcggccugaacauccccgugcugagagccgugcugcccagagacaugguguucagaaccagcagccccaagguggugcugugaggacuagucccuguucccagagcccacuuuuuuuucuuuuuuugaaauaaaauagccugucuuucagaucucaaaggcucuuuucagagccaccaaaaaaaaaaaaaaaaaaaaaaaaaaaaaaaaaaaaaaaaaaaaaaaaaaaaaaaaaaaaaaaaagaauu

SEQ ID NO: 19516 - RNA, 2002 nt, Artificial Sequence
  mRNA product Design a-1 (hSL-A64-N5) comprising derived and/or modified sequence from LASV(LASV237-NIG-2010;Clade II)__AIT17639__SP-HsALB_NP(2-569) (opt4)
aggagagucccgcagucggcguccagcggcucugcuuguucgugugugugucguugcaggccuuauucaagcuuaccaugaagugggugaccuucaucagccugcuguuccuguucagcagcgccuacagcagcgccagcaaggaggugaagagcuuccuguggacccagagccugagaagagagcugagcggcuacugcagcaacaucaagcugcagguggugaaggacgcccaggcccugcugcacggccuggacuucagcgaggugagcaacgugcagagacugaugagaaagcagaagagagacgacagcgaccugaagagacugagagaccugaaccaggccgugaacaaccugguggagcugaagagcacccagcagaagagcauccugagagugggcacccugaccagcgacgaccugcugacccuggccgccgaccuggagaagcugaagagcaaggugaucagaaccgagagaccccugagcagcggcguguacaugggcaaccugagcacccagcagcuggagcagagaagagcccugcugaacaugaucggcauggugggcggcgcccagggcacccagcccggcagagacggcguggugagagugugggacgugaagaaccccgaccugcugaacaaccaguucggcaccaugcccagccugacccuggccugccugaccaagcagggccagguggaccugaacgacgccgugcuggcccugaccgaccugggccugaucuacaccgccaaguaccccaacagcagcgaccuggacagacugagccagagccaccccauccugaacaugguggacaucaagaagagcagccugaacaucagcggcuacaacuucagccugggcgccgccgugaaggccggcgccugcaugcuggacggcggcaacaugcuggagaccaucaaggugaccccccagaccauggacggcauccugaagagcauccugaaggugaagagaagccugggcauguucgugagcgacacccccggcgagagaaaccccuacgagaacauccuguacaagaucugccugagcggcgacggcuggcccuacaucgccagcagaaccagcaucgugggcagagccugggagaacaccaccguggaccuggagagcgacggcaagccccagaaggugggcagcgccggcagcaacaagagccugcagagcgccggcuuccccaccggccugaccuacagccagcugaugacccugaaggacagcaugaugcagcuggaccccagcgccaagaccuggaucgacaucgagggcagacccgaggaccccguggagaucgcccuguaccagcccaugagcggcugcuacauccacuucuucagagagcccaccgaccugaagcaguucaagcaggacgccaaguacagccacggcaucgacguggccgaccuguuccccgcccagcccggccugaccagcgccgugaucgaggcccugcccagaaacauggugcugaccugccagggcagcgacgacaucaagagacugcuggacagccagggcagaagagacaucaagcugaucgacaucgcccugagcaaggccgacagcagaagauucgagaacgccgugugggaccagugcaaggaccugugccacaugcacaccggcguggugguggagaagaagaagagaggcggcaaggaggagaucaccccccacugcgcccugauggacugcaucauguacgacgccgccgugagcggcggccugaacauccccgugcugagagccgugcugcccagagacaugguguucagaaccagcagccccaagguggugcugugaggacuagucccuguucccagagcccacuuuuuuuucuuuuuuugaaauaaaauagccugucuuucagaucucaaaggcucuuuucagagccaccaaaaaaaaaaaaaaaaaaaaaaaaaaaaaaaaaaaaaaaaaaaaaaaaaaaaaaaaaaaaaaaaagaauu

SEQ ID NO: 19517 - RNA, 2002 nt, Artificial Sequence
  mRNA product Design a-1 (hSL-A64-N5) comprising derived and/or modified sequence from LASV(LASV253-NIG-2011;Clade II)__AIT17671__SP-HsALB_NP(2-569) (opt4)
aggagagucccgcagucggcguccagcggcucugcuuguucgugugugugucguugcaggccuuauucaagcuuaccaugaagugggugaccuucaucagccugcuguuccuguucagcagcgccuacagcagcgccagcaaggaggugaagagcuuccuguggacccagagccugagaagagagcugagcggcuacugcagcagcaucaagcugcagguggugaaggacgcccaggcccugcugcacggccuggacuucagcgaggugagcaacgugcagagacugaugagaaagcagaagagagacgacagcgaccugaagagacugagagaccugaaccaggccgugaacaaccugguggagcugaagagcacccagcagaagagcgugcugagagugggcacccugaccagcgacgaccugcugacccuggccgccgaccuggagaagcugaagagcaaggugaucagaaccgagagaccccugagcagcggcguguacaugggcaaccugagcacccagcagcuggagcagagaagagcccugcugaacaugaucggcauggugggcggcgcccagggcacccagcccggcagagacggcguggugagagugugggacgugaagaaccccgaccugcugaacaaccaguucggcaccaugcccagccugacccuggccugccugaccaagcagggccagguggaccugaacgacguggugcuggcccugaccgaccugggccugaucuacaccgccaaguaccccaacagcagcgaccuggacagacugagccagagccaccccauccugaacaugguggacaccaagaagagcagccugaacaucagcggcuacaacuucagccugggcgccgccgugaaggccggcgccugcaugcuggacggcggcaacaugcuggagaccaucaaggugaccccccagaccauggacggcauccugaagagcauccugaaggugaagaagagccugggcauguucgugagcgacacccccggcgagagaaaccccuacgagaacauccuguacaagaucugccugagcggcgacggcuggcccuacaucgccagcagaaccagcaucgugggcagagccugggagaacaccaccguggaccuggagagcgacggcaagccccagaaggugggcaccgccggcagcaacaagagccugcagagcgccggcuuccccaccggccugaccuacagccagcugaugacccugaaggacagcaugaugcagcuggaccccagcgccaagaccuggaucgacaucgagggcagacccgaggaccccguggagaucgcccuguaccagcccaugagcggcugcuacauccacuucuucagagagcccaccgaccugaagcaguucaagcaggacgccaaguacagccacggcaucgacgugaccgaccuguuccccgcccagcccggccugaccagcgccgugaucgaggcccugcccagaaacauggugcugaccugccagggcagcgacgacaucaagagacugcuggacagccagggcagaagagacaucaagcugaucgacaucgcccugagcaaggccgacagcagaagauucgagaacgccgugugggaccagugcaaggaccugugccacaugcacaccggcguggugguggagaagaagaagagaggcggcaaggaggagaucaccccccacugcgcccugauggacugcaucauguacgacgccgccgugagcggcggccugaacauccccgugcugagagccgugcugcccagagacaugguguucagaaccagcagccccaagguggugcugugaggacuagucccuguucccagagcccacuuuuuuuucuuuuuuugaaauaaaauagccugucuuucagaucucaaaggcucuuuucagagccaccaaaaaaaaaaaaaaaaaaaaaaaaaaaaaaaaaaaaaaaaaaaaaaaaaaaaaaaaaaaaaaaaagaauu

SEQ ID NO: 19518 - RNA, 2002 nt, Artificial Sequence
  mRNA product Design a-1 (hSL-A64-N5) comprising derived and/or modified sequence from LASV(LASV254-NIG-2011;Clade II)__AIT17675__SP-HsALB_NP(2-569) (opt4)
aggagagucccgcagucggcguccagcggcucugcuuguucgugugugugucguugcaggccuuauucaagcuuaccaugaagugggugaccuucaucagccugcuguuccuguucagcagcgccuacagcagcgccagcaaggaggugaagagcuuccuguggacccagagccugagaagagagcugagcggcuacugcagcagcaucaagcugcagguggugaaggacgcccaggcccugcugcacggccuggacuucagcgaggugagcaacgugcagagacugaugagaaagcagaagagagacgacagcgaccugaagagacugagagaccugaaccaggccgugaacaaccugguggagcugaagagcacccagcagaagagcgugcugagagugggcacccugaccagcgacgaccugcugacccuggccgccgaccuggagaagcugaagagcaaggugaucagaaccgagagaccccugagcagcggcguguacaugggcaaccugagcacccagcagcuggagcagagaagagcccugcugaacaugaucggcauggugggcggcgcccagggcacccagcccggcagagacggcguggugagagugugggacgugaagaaccccgaccugcugaacaaccaguucggcaccaugcccagccugacccuggccugccugaccaagcagggccagguggaccugaacgacgccgugcuggcccugaccgaccugggccugaucuacaccgccaaguaccccaacagcagcgaccuggacagacugagccagagccaccccauccugaacaugguggacaccaagaagagcagccugaacaucagcggcuacaacuucagccugggcgccgccgugaaggccggcgccugcaugcuggacggcggcaacaugcuggagaccaucaaggugaccccccagaccauggacggcauccugaagagcauccugaaggugaagaagagccugggcauguucgugagcgacacccccggcgagagaaaccccuacgagaacauccuguacaagaucugccugagcggcgacggcuggcccuacaucgccagcagaaccagcaucgugggcagagccugggagaacaccaucguggaccuggagagcgacggcaagccccagaaggugggcaccgccggcagcaacaagagccugcagagcgccggcuuccccaccggccugaccuacagccagcugaugacccugaaggacagcaugaugcagcuggaccccagcgccaagaccuggaucgacaucgagggcagacccgaggaccccguggagaucgcccuguaccagcccaugagcggcugcuacauccacuucuucagagagcccaccgaccugaagcaguucaagcaggacgccaaguacagccacggcaucgacguggccgaccuguuccccgcccagcccggccugaccagcgccgugaucgaggcccugcccagaaacauggugcugaccugccagggcagcgacgacaucaagagacugcuggacagccagggcagaagagacaucaagcugaucgacaucgcccugagcaaggccgacagcagaagauucgagaacgccgugugggaccagugcaaggaccugugccacaugcacaccggcguggugguggagaagaagaagagaggcggcaaggaggagaucaccccccacugcgcccugauggacugcaucauguacgacgccgccgugagcggcggccugaacauccccgugcugagagccgugcugcccagagacaugguguucagaaccagcagccccaagguggugcugugaggacuagucccuguucccagagcccacuuuuuuuucuuuuuuugaaauaaaauagccugucuuucagaucucaaaggcucuuuucagagccaccaaaaaaaaaaaaaaaaaaaaaaaaaaaaaaaaaaaaaaaaaaaaaaaaaaaaaaaaaaaaaaaaagaauu

SEQ ID NO: 19519 - RNA, 2002 nt, Artificial Sequence
  mRNA product Design a-1 (hSL-A64-N5) comprising derived and/or modified sequence from LASV(Nig08-04;Clade II)__ADU56611__SP-HsALB_NP(2-569) (opt4)
aggagagucccgcagucggcguccagcggcucugcuuguucgugugugugucguugcaggccuuauucaagcuuaccaugaagugggugaccuucaucagccugcuguuccuguucagcagcgccuacagcagcgccagcaaggaggugaagagcuuccuguggacccagagccugagaagagagcugagcggcuacugcagcaacaucaagcugcagguggugaaggacgcccaggcccugcugcacggccuggacuucagcgaggugagcaacgugcagagacugaugagaaagcagaagagagacgacggcgaccugaagagacugagagaccugaaccaggccgugaacaaccugguggagcugaagagcacccagcagaagagcgugcugagagugggcacccugaccagcgacgaccugcugacccuggccgccgaccuggagaagcugaagagcaaggugaucagaaccgagagaccccugagcagcggcguguacaugggcaaccugagcacccagcagcuggagcagagaaaggcccugcugagcaugaucggcauggugggcggcgcccagggcacccagcccggcagagacggcguggugagagugugggacgugaagaaccccgaccugcugaacaaccaguucggcaccaugcccagccugacccuggccugccugaccaagcagggccagguggaccugaacgacgccgugcuggcccugaccgaccugggccugaucuacaccgccaaguaccccaacagcagcgaccuggacagacugagccagagccaccccauccugaacaugguggacaccaagaagagcagccugaacaucagcggcuacaacuucagccugggcgccgccgugaaggccggcgccugcaugcuggacggcggcaacaugcuggagaccaucaaggugaccccccagaccauggacggcauccugaagagcauccugaaggugaagagaagccugggcauguucgugagcgacacccccggcgagagaaaccccuacgagaacauccuguacaagaucugccugagcggcgacggcuggcccuacaucgccagcagaaccagcaucgugggcagagccugggagaacaccaccguggaccuggagagcgacggcaagccccagaaggugggcaccgccggcagcaacaagagccugcagagcgccggcuuccccaccggccugaccuacagccagcugaugacccugaaggacagcaugaugcagcuggaccccagcgccaagaccuggaucgacaucgagggcagacccgaggaccccguggagaucgcccuguaccagcccaugagcggcugcuacauccacuucuucagagagcccaccgaccugaagcaguucaagcaggacgccaaguacagccacggcaucgacgugaccgaccuguucagcgcccagcccggccugaccagcgccgugaucgaggcccugcccagaaacauggugcugaccugccagggcagcgacgacaucaagaagcugcuggacagccagggcagaagagacaucaagcugaucgacaucagccugaacaaggccgacagcagaagauucgagaacgccgugugggaccagugcaaggaccugugccacaugcacaccggcguggugguggagaagaagaagagaggcggcaaggaggagaucaccccccacugcgcccugauggacugcaucauguucgacgccgccgugagcggcggccugaacauccccauccugagagccgugcugcccagagacaugguguucagaaccagcagccccaagguggugcugugaggacuagucccuguucccagagcccacuuuuuuuucuuuuuuugaaauaaaauagccugucuuucagaucucaaaggcucuuuucagagccaccaaaaaaaaaaaaaaaaaaaaaaaaaaaaaaaaaaaaaaaaaaaaaaaaaaaaaaaaaaaaaaaaagaauu

SEQ ID NO: 19520 - RNA, 2005 nt, Artificial Sequence
  mRNA product Design a-1 (hSL-A64-N5) comprising derived and/or modified sequence from LASV(GA391;Clade III)__AAA46284__SP-HsALB_NP(2-570) (opt4)
aggagagucccgcagucggcguccagcggcucugcuuguucgugugugugucguugcaggccuuauucaagcuuaccaugaagugggugaccuucaucagccugcuguuccuguucagcagcgccuacagcagcgccagcaaggaggugagaagcugccuguggacccagagccugagaagagagcugagcggcuacugcagcaacaucaagcugcagguggugaaggacgcccaggcccugcugcacggccuggacuucagcgaggugagcaacgugcagagacugaugagaaagcagaagagagacgacggcgaccugaagagacugagagaccugaaccaggccgugaacaaccugguggagcugaagagcacccagcagaagagcgugcugagagugggcacccugagcagcgacgaccugcugauccuggccgccgaccuggagaagcugaagagcaaggugaccagaaccgagagaccccugagcagcggcguguacaugggcaaccugagcagccagcagcuggaccagagaagagcccugcugaacaugaucggcaugaccggcgugagcggcggcggcaagggcgccagcaacggcaucgugagagugugggacgugaagaacgccgagcugcugaacaaccaguucggcaccaugcccagccugacccuggccugccugaccaagcagggccagguggaccugaacgacgccgugcaggcccugaccgaccugggccugaucuacaccgccaaguaccccaacagcagcgaccuggacagacugagccagagccaccccauccugaacaugaucgacaccaagaagagcagccugaacaucagcggcuacaacuucagccugggcgccgccgugaaggccggcgccugcaugcuggacggcggcaacaugcuggagaccaucaaggugagcccccagaccauggacggcauccugaagagcauccugaaggugaagaagagccugggcauguucgugagcgacacccccggcgagagaaaccccuacgagaacauccuguacaagaucugccugagcggcgacggcuggagcuacaucgccagcagaaccagcaucgugggcagagccugggagaacaccgugguggaccuggagcaggacaacaagccccagaagaucggcaacggcggcagcaacaagagccugcagagcgccggcuucgccgccggccugaucuacagccagcugaugacccugaaggacuucaagugcuucaaccugauccccaacgccaagaccuggauggacaucgagggcagacccgaggaccccguggagaucgcccuguaccagcccagcagcggcugcuacgugcacuucuucagagagcccaccgaccugaagcaguucaagcaggacgccaaguacagccacggcagagacgugaccgaccuguucgccgcccagcccggccugaccagcgccgugaucgaggcccugcccagaaacauggugaucaccugccagggcagcgaggacaucagaaagcugcuggagagccagggcagaagagacaucaagcugaucgacaucacccugagcaaggccgacagcagaaaguucgagaacgccgugugggaccaguucaaggaccugugccacaugcacaccggcguggugguggagaagaagaagagaggcggcaaggaggagaucaccccccacugcgcccugauggacugcaucauguucgacgccgccgugagcggcggccuggacgccaaggugcugagaguggugcugcccagagacaugguguucagaaccagcacccccaagguggugcugugaggacuagucccuguucccagagcccacuuuuuuuucuuuuuuugaaauaaaauagccugucuuucagaucucaaaggcucuuuucagagccaccaaaaaaaaaaaaaaaaaaaaaaaaaaaaaaaaaaaaaaaaaaaaaaaaaaaaaaaaaaaaaaaaagaauu

SEQ ID NO: 19521 - RNA, 2002 nt, Artificial Sequence
  mRNA product Design a-1 (hSL-A64-N5) comprising derived and/or modified sequence from LASV(Nig08-A19;Clade III)__ADU56619__SP-HsALB_NP(2-569) (opt4)
aggagagucccgcagucggcguccagcggcucugcuuguucgugugugugucguugcaggccuuauucaagcuuaccaugaagugggugaccuucaucagccugcuguuccuguucagcagcgccuacagcagcgccagcaaggaggugaagagcuuccuguggacccagagccugagaagagagcugagcggcuacugcagcaacaucaagcugcagguggugaaggacgcccaggcccugcugcacggccuggacuucagcgaggugagcaacgugcagagacugaugagaaagcagaagagagacgacggcgaccugaagagacugagagaccugaaccaggccgugaacaaccugguggagcugaagagcacccagcagaagagcgugcugagagugggcacccugagcagcgacgaccugcuggugcuggccgccgaccuggagaagcugaagagcaagguggugagaaccgagagaccccugagcagcggcaucuacaugggcaaccugagcagccagcagcuggaccagagaaaggcccugcugaacaugaucggcaugaccggcggcaacggcggcagaaacaccaccagcgacggcaucgugagagugugggacgugaagaacgccgagcugcugaacaaccaguucggcaccaugcccagccugacccuggccugccugaccaagcagggccagguggaccugaacgacgccgugcaggcccugaccgaccugggccugaucuacaccgccaaguaccccaacagcagcgaccuggacagacuggcccagagccaccccauccugaacaugaucgacaccaagaagagcagccugaacaucagcggcuacaacuucagccugggcgccgccgugaaggccggcgccugcaugcuggacggcggcaacaugcuggagaccaucaaggugagcccccagaccauggacggcauccugaagagcauccugaaggugaagagaagccugggcauguucaucagcgacacccccggcgagagaaaccccuacgagaacauccuguacaagaucugccugagcggcgacggcuggcccuacaucgccagcagaaccagcaucgugggcagagccugggagaacaccgugguggaccuggagagcgacaacaagccccagaagaccggcaacggcggcagcaacaagagccugcagagcgccggcuucgccgccggccugaccuacagccagcugaugacccugaaggacagcaugcugcagcuggaccccaacgccaagaccuggauggacaucgagggcagacccgaggaccccguggagaucgcccuguaccagcccagcagcggcugcuacauccacuucuucagagagcccaccgaccugaagcaguucaagcaggacgccaaguacagccacggcaucgacgugaccgaccuguucgccgcccagcccggccugaccagcgccgugaucgaggcccugcccagaaacauggugaucaccugccagggcagcgaggacaucagaaagcugcuggagagccagggcagaagagacaucaagcugaucgacaucagccugagcaagguggacagcagaaaguucgagaacgccgugugggaccaguucaaggaccugugccacaugcacaccggcaucgugguggagaagaagaagagaggcggcaaggaggagaucaccccccacugcgcccugauggacugcaucauguucgacgccgccgugagcggcggcguggacgccaaggugcugagagccgugcugcccagagacaugguguucagaaccagcacccccaagguggugcugugaggacuagucccuguucccagagcccacuuuuuuuucuuuuuuugaaauaaaauagccugucuuucagaucucaaaggcucuuuucagagccaccaaaaaaaaaaaaaaaaaaaaaaaaaaaaaaaaaaaaaaaaaaaaaaaaaaaaaaaaaaaaaaaaagaauu

SEQ ID NO: 19522 - RNA, 2002 nt, Artificial Sequence
  mRNA product Design a-1 (hSL-A64-N5) comprising derived and/or modified sequence from LASV(G1180-SLE-2010;Clade IV)__AIT17169__SP-HsALB_NP(2-569) (opt4)
aggagagucccgcagucggcguccagcggcucugcuuguucgugugugugucguugcaggccuuauucaagcuuaccaugaagugggugaccuucaucagccugcuguuccuguucagcagcgccuacagcagcgccagcaaggagaucaagagcuuccuguggacccagagccugagaagagagcugagcggcuacugcagcaacaucaagcugcagguggugaaggacgcccaggcccugcugcacggccuggacuucagcgaggugagcaacgugcagagacugaugagaaaggagagaagagacgacaacgaccugaagagacugagagaccugaaccaggccgugaacaaccugguggagcugaagagcacccagcagaagagcauccugagagugggcacccugaccagcgacgaccugcugauccuggccgccgaccuggagaagcugaagagcaaggugaucagaaccgagagaccccugagcgccggcguguacaugggcaaccugagcagccagcagcuggaccagagaagagcccugcugagcaugaucggcaugagcagcggcaaccagagagcccaggccggcagagacggcguggugagagugugggacgugaagaacguggagcugcugaacaaccaguucggcaccaugcccagccugacccuggccugccugaccaagcagggccagguggaccugaacgacgccgugcaggcccugaccgaccugggccugaucuacaccgccaaguaccccaacaccagcgaccuggacagacugacccagagccaccccauccugaacaugaucgacaccaagaagagcagccugaacaucagcggcuacaacuucagccugggcgccgccgugaaggccggcgccugcaugcuggacggcggcaacaugcuggagaccaucaaggugagcccccagaccauggacggcauccugaagagcauccugaaggugaagaaggcccugggcauguucaucagcgacacccccggcgagagaaaccccuacgagaacauccuguacaagaucugccugagcggcgacggcuggcccuacaucgccagcagaaccagcaucaccggcagagccugggagaacaccgugguggaccuggagagcgacggcaagccccagaaggccggcagcaacaacagcaacaagagccugcagagcgugggcuucaccgccggccugaccuacagccagcugaugacccugaaggacgccaugcugcagcuggaccccaacgccaagaccuggauggacaucgagggcagacccgaggaccccguggagaucgcccuguaccagcccagcagcggcugcuacauccacuucuucagagagcccaccgaccugaagcaguucaagcaggacgccaaguacagccacggcaucgacgugaccgaccuguucgccgcccagcccggccugaccagcgccgugaucgacgcccugcccagaaacauggugaucaccugccagggcagcgacgacaucagaaagcugcuggagagccagggcagaaaggacaucaagcugaucgacaucgcccugagcaagaccgacagcagaaaguacgagaacgccgugugggaccaguacaaggaccugugccacaugcacaccggcguggugguggagaagaagaagagaggcggcaaggaggagaucaccccccacugcgcccugauggacugcaucauguucgacgccgccgugagcggcggccugaacaccagcgugcugagagccgugcugcccagagacaugguguucagaaccagcacccccagaguggugcugugaggacuagucccuguucccagagcccacuuuuuuuucuuuuuuugaaauaaaauagccugucuuucagaucucaaaggcucuuuucagagccaccaaaaaaaaaaaaaaaaaaaaaaaaaaaaaaaaaaaaaaaaaaaaaaaaaaaaaaaaaaaaaaaaagaauu

SEQ ID NO: 19523 - RNA, 2002 nt, Artificial Sequence
  mRNA product Design a-1 (hSL-A64-N5) comprising derived and/or modified sequence from LASV(G1442-SLE-2011;Clade IV)__AIT17181__SP-HsALB_NP(2-569) (opt4)
aggagagucccgcagucggcguccagcggcucugcuuguucgugugugugucguugcaggccuuauucaagcuuaccaugaagugggugaccuucaucagccugcuguuccuguucagcagcgccuacagcagcgccagcaaggaggugaagagcuuccuguggacccagagccugagaagagagcugagcggcuacugcagcaacaucaagcugcagguggugaaggacgcccaggcccugcugcacggccuggacuucagcgaggugagcaacgugcagagacugaugagaaagcagagaagagacgacaacgaccugaagagacugagagaccugaaccaggccgugaacaaccugguggagcugaagagcacccagcagaagagcgugcugagagugggcacccugaccagcgacgaccugcuggugcuggccgccgaccuggagaagcugaagagcaaggugaucagaaccgagagaccccugagcgccggcguguacaugggcaaccugagcagccagcagcuggaccagagaagagcccugcugaacaugaucggcaugagcggcggcauccagggcaccagaaccggcagagacggcguggugagagugugggacgugaagaacgccgaccugcugaacaaccaguucggcaccaugcccagccugacccuggccugccugaccaagcagggccagguggaccugaacgacguggugcaggcccugaccgaccugggccugaucuacaccgccaaguaccccaacgccagcgaccuggacagacugacccagagccaccccauccugaacaugaucgacaccaagaagagcagccugaacaucagcggcuacaacuucagccugggcgccgccgugaaggccggcgccugcaugcuggacggcggcaacaugcuggagaccaucaaggugagcccccagaccauggacggcauccugaagagcauccugaaggugaagaagacccugggcauguucaucagcgacacccccggcgagagaaaccccuacgagaacauccuguacaagaucugccugagcggcgacggcuggcccuacaucgccagcagaaccagcaucaccggcagagccugggagaacaccgugguggaccuggagagcgacggcaagccccagaaggccggcagcaacaacagcaacaagagccugcagagcgccggcuucgccgccggccugaccuacagccagcugaugacccugaaggacgccaugcugcagcuggaccccaacgccaagaccuggauggacaucgagggcagacccgaggaccccguggagaucgcccuguaccagcccagcagcggcugcuacauccacuucuucagagagcccaccgaccugaagcaguucaagcaggacgccaaguacagccacggcaucgacgugaccgaccuguucgccgcccagcccggccugaccagcgccgugaucgaggcccugcccagaaacauggugaucaccugccagggcagcgacgacaucaagaagcugcuggagagccagggcagaaaggacaucaagcugaucgacaucgcccugagcaagaccgacagcagaaaguacgagaacgccgugugggaccaguacaaggaccugugccacaugcacaccggcguggugguggagaagaagaagagaggcggcaaggaggagaucaccccccacugcgcccugauggacugcaucauguucgacgccgccgugagcggcggccugaacacccuggugcugagagccgugcugcccagagacaugguguucagaaccagcacccccagaguggugcugugaggacuagucccuguucccagagcccacuuuuuuuucuuuuuuugaaauaaaauagccugucuuucagaucucaaaggcucuuuucagagccaccaaaaaaaaaaaaaaaaaaaaaaaaaaaaaaaaaaaaaaaaaaaaaaaaaaaaaaaaaaaaaaaaagaauu

SEQ ID NO: 19524 - RNA, 2002 nt, Artificial Sequence
  mRNA product Design a-1 (hSL-A64-N5) comprising derived and/or modified sequence from LASV(G3010-SLE-2013;Clade IV)__AIT17345__SP-HsALB_NP(2-569) (opt4)
aggagagucccgcagucggcguccagcggcucugcuuguucgugugugugucguugcaggccuuauucaagcuuaccaugaagugggugaccuucaucagccugcuguuccuguucagcagcgccuacagcagcgccagcaaggagaucaagagcuuccuguggacccagagccugagaagagagcugagcggcuacugcagcaacaucaagcugcagguggugaaggacgcccaggcccugcugcacggccuggacuucagcgaggugagcaacgugcagagacugaugagaaaggagagaagagacgacaacgaccugaagagacugagagaccugaaccaggccgugaacaaccugguggagcugaagagcacccagcagaagagcauccugagagugggcacccugaccagcgacgaccugcugauccuggccgccgaccuggagaagcugaagagcaaggugaccagaaccgagagaccccugagcgccggcguguacaugggcaaccugagcagccagcagcuggaccagagaagagcccugcugagcaugaucggcaugagcagcggcgugcagggcgccagagccggcagagacggcguggugagagugugggacgugaagaacgccgagcugcugaacaaccaguucggcaccaugcccagccugacccuggccugccugaccaagcagggccagguggaccugaacgacguggugcaggcccugaccgaccugggccugaucuacaccgccaaguaccccaacaccagcgaccuggacagacugacccagagccaccccauccugaacaugaucgacaccaagaagagcagccugaacaucagcggcuacaacuucagccugggcgccgccgugaaggccggcgccugcaugcuggacggcggcaacaugcuggagaccaucaaggugagcccccagaccauggacggcauccugaagagcauccugaaggugaagaaggcccugggcauguucaucagcgagacccccggcgagagaaaccccuacgagaacauccuguacaagaucugccugagcggcgacggcuggcccuacaucgccagcagaaccagcaucaccggcagagccugggagaacaccgugguggaccuggagagcgacggcaagccccagaaggccggcagcaacaacagcaacaagagccugcagagcgccggcuucaccgccggccugaccuacagccagcugaugacccugaaggacgccaugcugcagcuggaccccaacgccaagaccuggauggacaucgagggcagacccgaggaccccguggagguggcccuguaccagcccagcagcggcugcuacauccacuucuucagagagcccaccgaccugaagcaguucaagcaggacgccaaguacagccacggcaucgacgugaccgaccuguucgccgcccagcccggccugaccagcgccgugaucgacgcccugcccagaaacauggugaucaccugccagggcagcgacgacaucaagaagcugcuggagagccagggcagaaaggacaucaagcugaucgacaucgcccugagcaagaccgacagcagaaaguacgagaacgccgugugggaccaguacaaggaccugugccacaugcacaccggcguggugguggagaagaagaagagaggcggcaaggaggagaucaccccccacugcgcccugauggacugcaucauguucgacgccgccgugagcggcggccugaacaccagcgugcugagagccgugcugcccagagacaugguguucagaaccagcacccccagaguggugcugugaggacuagucccuguucccagagcccacuuuuuuuucuuuuuuugaaauaaaauagccugucuuucagaucucaaaggcucuuuucagagccaccaaaaaaaaaaaaaaaaaaaaaaaaaaaaaaaaaaaaaaaaaaaaaaaaaaaaaaaaaaaaaaaaagaauu

SEQ ID NO: 19525 - RNA, 2002 nt, Artificial Sequence
  mRNA product Design a-1 (hSL-A64-N5) comprising derived and/or modified sequence from LASV(G502-SLE-2009;Clade IV)__AIT17127__SP-HsALB_NP(2-569) (opt4)
aggagagucccgcagucggcguccagcggcucugcuuguucgugugugugucguugcaggccuuauucaagcuuaccaugaagugggugaccuucaucagccugcuguuccuguucagcagcgccuacagcagcgccagcaaggagaucaagagcuuccuguggacccagagccugagaagagagcugagcggcuacugcagcaacaucaagcugcagguggugaaggacgcccaggcccugcugcacggccuggacuucagcgaggugagcaacgugcagagacugaugagaaaggagagaagagacgacaacgaccugaagagacugagagaccugaaccaggccgugaacaaccugguggagcugaagagcacccagcagaagagcauccugagagugggcacccugaccagcgacgaccugcugauccuggccgccgaccuggagaagcugaagagcaaggugaucagaaccgagagaccccugagcgccggcguguacaugggcaaccugagcagccagcagcuggaccagagaagagcccugcugagcaugaucggcaugagcggcggcaaccagggcgugagagccggcaaggacggcguggugagagugugggacgugaagaacgccgagcugcugaacaaccaguucggcaccaugcccagccugacccuggccugccugaccaagcagggccagguggaccugaacgacgccgugcaggcccugaccgaccugggccugaucuacaccgccaaguaccccaacaccagcgaccuggacagacugacccagagccaccccauccugaacaugaucgacaccaagaagagcagccugaacaucagcggcuacaacuucagccugggcgccgccgugaaggccggcgccugcaugcuggacggcggcaacaugcuggagaccaucaaggugagcccccagaccauggacggcauccugaagagcauccugaaggugaagaaggcccugggcauguucaucagcgacacccccggcgagagaaaccccuacgagaacauccuguacaagaucugccugagcggcgacggcuggcccuacaucgccagcagaaccagcaucaccggcagagccugggagaacaccgugguggaccuggagagcgacggcaagccccagaaggccggcagcaacaacagcaacaagagccugcagagcgccggcuucaccgccggccugaccuacagccagcugaugacccugaaggacgccaugcugcagcuggaccccaacaccaagaccuggauggacaucgagggcagacccgaggaccccguggagaucgcccuguaccagcccagcagcggcugcuacauccacuucuucagagagcccaccgaccugaagcaguucaagcaggacgccaaguacagccacggcaucgacgugaccgaccuguucgccgcccagcccggccugaccagcgccgugaucgacgcccugcccagaaacauggugaucaccugccagggcagcgacgacaucagaaagcugcuggagagccagggcagaaaggacaucaagcugaucgacaucgcccugaacaagaccgacagcagaaaguacgagaacgccgugugggaccaguacaaggaccugugccacaugcacaccggcguggugguggagaagaagaagagaggcggcaaggaggagaucaccccccacugcgcccugauggacugcaucauguucgacgccgccgugagcggcggccugaacaccagcgugcugagagccgugcugcccagagacaugguguucagaaccagcacccccagaguggugcugugaggacuagucccuguucccagagcccacuuuuuuuucuuuuuuugaaauaaaauagccugucuuucagaucucaaaggcucuuuucagagccaccaaaaaaaaaaaaaaaaaaaaaaaaaaaaaaaaaaaaaaaaaaaaaaaaaaaaaaaaaaaaaaaaagaauu

SEQ ID NO: 19526 - RNA, 2002 nt, Artificial Sequence
  mRNA product Design a-1 (hSL-A64-N5) comprising derived and/or modified sequence from LASV(G733-SLE-2010;Clade IV)__AIT17155__SP-HsALB_NP(2-569) (opt4)
aggagagucccgcagucggcguccagcggcucugcuuguucgugugugugucguugcaggccuuauucaagcuuaccaugaagugggugaccuucaucagccugcuguuccuguucagcagcgccuacagcagcgccagcaaggagaucaagagcuuccuguggacccagagccugagaagagagcugagcggcuacugcagcaacaucaagcugcagguggugaaggacgcccaggcccugcugcacggccuggacuucagcgaggugagcaacgugcagagacugaugagaaaggagagaagagacgacaacgaccugaagagacugagagaccugaaccaggccgugaacaaccugguggagcugaagagcacccagcagaagagcgugcugagagugggcacccugaccagcgacgagcugcuggugcuggccgccgaccuggagaagcugaagagcaaggugaucagaaccgagagaccccugagcgccggcguguacaugggcaaccugagcagccagcagcuggaccagagaagagcccugcugagcaugaucggcaugagcggcggcaaccagggcgccagaaccggcagagacggcguggugagagugugggacgugaagaacgccgagcugcugaacaaccaguucggcaccaugcccagccugacccuggccugccugaccaagcagggccagguggaccugaacgacgccgugcaggcccugaccgaccugggccugaucuacaccgccaaguaccccaacaccagcgaccuggacagacugacccagagccaccccauccugaacaugaucgacaccaagaagagcagccugaacaucagcggcuacaacuucagccugggcgccgccgugaaggccggcgccugcaugcuggacggcggcaacaugcuggagaccaucaaggugagcccccagaccauggacggcauccugaagagcauccugaaggugaagaaggcccugggcauguucaucagcgacacccccggcgagagaaaccccuacgagaacauccuguacaagaucugccugagcggcgacggcuggcccuacaucgccagcagaaccagcaucaccggcagagccugggagaacaccgugguggaccuggagagcgacggcaagccccagaaggccggcagcaacaacagcaacaagagccugcagagcgccggcuucaccgccggccugaccuacagccagcugaugacccugaaggacgccaugcugcagcuggaccccaacgccaagaccuggauggacaucgagggcagacccgaggaccccguggagaucgcccuguaccagcccagcagcggcugcuacauccacuucuucagagagcccaccgaccugaagcaguucaagcaggacgccaaguacagccacggcaucgacgugaccgaccuguucgccgcccagcccggccugaccagcgccgugaucgacgcccugcccagaaacauggugaucaccugccagggcagcgacgacaucagaaagcugcuggagagccagggcagaaaggacaucaagcugaucgacaucgcccugagcaagaucgacagcagaaaguacgagaacgccgugugggaccaguacaaggaccugugccacaugcacaccggcguggugguggagaagaagaagagaggcggcaaggaggagaucaccccccacugcgcccugauggacugcaucauguucgacgccgccgugagcggcggccugaacagccuggugcugagagccgugcugcccagagacaugguguucagaaccagcacccccagaguggugcugugaggacuagucccuguucccagagcccacuuuuuuuucuuuuuuugaaauaaaauagccugucuuucagaucucaaaggcucuuuucagagccaccaaaaaaaaaaaaaaaaaaaaaaaaaaaaaaaaaaaaaaaaaaaaaaaaaaaaaaaaaaaaaaaaagaauu

SEQ ID NO: 19527 - RNA, 2002 nt, Artificial Sequence
  mRNA product Design a-1 (hSL-A64-N5) comprising derived and/or modified sequence from MOPV/LASV reassortant(IGS-1;Clade IV)__AFY05578__SP-HsALB_NP(2-569) (opt4)
aggagagucccgcagucggcguccagcggcucugcuuguucgugugugugucguugcaggccuuauucaagcuuaccaugaagugggugaccuucaucagccugcuguuccuguucagcagcgccuacagcagcgccagcaaggagaucaagagcuuccuguggacccagagccugagaagagagcugagcggcuacugcagcaacaucaagcugcagguggugaaggacgcccaggcccugcugcacggccuggacuucagcgaggugagcaacgugcagagacugaugagaaaggagagaagagacgacaacgaccugaagagacugagagaccugaaccaggccgugaacaaccugguggagcugaagagcacccagcagaagagcauccugagagugggcacccugaccagcgacgaccugcugauccuggccgccgaccuggagaagcugagaagcaaggugaucagaaccgagagaccccugagcgccggcguguacaugggcaaccugagcagccagcagcuggaccagagaagagcccugcugaacaugaucggcaugagcggcggcaaccagggcgccagagccggcagagacggcguggugagagugugggacgugaagaacgccgagcugcugagcaaccaguucggcaccaugcccagccugacccuggccugccugaccaagcagggccagguggaccugaacgacgccgugcaggcccugaccgaccugggccugaucuacaccgccaaguaccccaacaccagcgaccuggacagacugacccagagccaccccauccugaacaugaucgacaccaagaagagcagccugaacaucagcggcuacaacuucagccugggcgccgccgugaaggccggcgccugcaugcuggacggcggcaacaugcuggagaccaucaaggugagcccccagaccauggacggcauccugaagagcauccugaaggugaagaaggcccugggcauguucaucagcgacacccccggcgagagaaaccccuacgagaacauccuguacaagaucugccugagcggcgacggcuggcccuacaucgccagcagaaccagcaucaccggcagagccugggagaacaccgugguggaccuggagagcgacggcaagccccagaaggccgacagcaacaacagcagcaagagccugcagagcgccggcuucaccgccggccugaccuacagccagcugaugacccugaaggacgccaugcugcagcuggaccccaacgccaagaccuggauggacaucgagggcagacccgaggaccccguggagaucgcccuguaccagcccagcagcggcugcuacauccacuucuucagagagcccaccgaccugaagcaguucaagcaggacgccaaguacagccacggcaucgacgugaccgaccuguucgccacccagcccggccugaccagcgccgugaucgacgcccugcccagaaacauggugaucaccugccagggcagcgacgacaucagaaagcugcuggagagccagggcagaaaggacaucaagcugaucgacaucgaccugagcaagaccgacagcagaaaguacgagaacgccgugugggaccaguacaaggaccugugccacaugcacaccggcguggugguggagaagaagaagagaggcggcaaggaggagaucaccccccacugcgcccugauggacugcaucauguucgacgccgccgugagcggcggccugaacaccagcgugcugagagccgugcugcccagagacaugguguucagaaccagcacccccagaguggugcugugaggacuagucccuguucccagagcccacuuuuuuuucuuuuuuugaaauaaaauagccugucuuucagaucucaaaggcucuuuucagagccaccaaaaaaaaaaaaaaaaaaaaaaaaaaaaaaaaaaaaaaaaaaaaaaaaaaaaaaaaaaaaaaaaagaauu

SEQ ID NO: 19528 - RNA, 2002 nt, Artificial Sequence
  mRNA product Design a-1 (hSL-A64-N5) comprising derived and/or modified sequence from LASV(LM765-SLE-2012;Clade IV)__AIT17815__SP-HsALB_NP(2-569) (opt4)
aggagagucccgcagucggcguccagcggcucugcuuguucgugugugugucguugcaggccuuauucaagcuuaccaugaagugggugaccuucaucagccugcuguuccuguucagcagcgccuacagcagcgccagcaaggagaucaagagcuuccuguggacccagagccugagaagagagcugagcggcuacugcagcaacaucaagcugcagguggugaaggacgcccaggcccugcugcacggccuggacuucagcgaggugagcaacgugcagagacugaugagaaaggagagaagagacgacaacgaccugaagagacugagagaccugaaccaggccgugaacaaccugguggagcugaagagcacccagcagaagagcauccugagagugggcacccugaccagcgacgaccugcugauccuggccgccgaccuggagaagcugaagagcaaggugaccagaaccgagagaccccugagcgccggcguguacaugggcaaccugagcagccagcagcuggaccagagaagagcccugcuggacaugaucggcaugagcggcagcaaccagggcgccagagccggcagagacggcguggugagagugugggacgugaagaacgccgagcugcugaacaaccaguucggcaccaugcccagccugacccuggccugccugaccaagcagggccagguggaccugaacgacgccgugcaggcccugaccgaccugggccugaucuacaccgccaaguaccccaacaccagcgaccuggacagacugacccagagccaccccauccugaacaugaucgacaccaagaagagcagccugaacaucagcggcuacaacuucagccugggcgccgccgugaaggccggcgccugcaugcuggacggcggcaacaugcuggagaccaucaaggugagcccccagaccauggacggcauccugaagagcauccugaaggugaagaaggcccugggcauguucaucagcgacgcccccggcgagagaaaccccuacgagaacauccuguacaagaucugccugagcggcgacggcuggcccuacaucgccagcagaaccagcaucaccggcagagccugggagaacaccgugguggaccuggagagcgacggcaagccccagaaggccggcagcaacggcagcaacaagagccugcagagcgccggcuucaccgccggccugaccuacagccagcugaugacccugaaggacgccaugcugcagcuggaccccaacgccaagaccuggauggacaucgagggcagacccgaggaccccguggagaucgcccuguaccagcccagcagcggcugcuacauccacuucuucagagagcccaccgaccugaagcaguucaagcaggacgccaaguacagccacggcaucgacgugaccgaccuguucgccgcccagcccggccugaccagcgccgugaucgacgcccugcccagaaacauggugaucaccugccagggcagcgacgacaucagaaagcuguucgagagccagggcagaaaggacaucaagcugaucgacaucgcccugagcaagaccgacagcagaaaguacgagaacgccgugugggaccaguacaaggaccugugccacaugcacaccggcaucgugguggagaagaagaagagaggcggcaaggaggagaucaccccccacugcgcccugauggacugcaucauguucgacgccgccgugagcggcggccugaacaccagcgugcugagagccgugcugcccagagacaugguguucagaaccagcacccccagaguggugcugugaggacuagucccuguucccagagcccacuuuuuuuucuuuuuuugaaauaaaauagccugucuuucagaucucaaaggcucuuuucagagccaccaaaaaaaaaaaaaaaaaaaaaaaaaaaaaaaaaaaaaaaaaaaaaaaaaaaaaaaaaaaaaaaaagaauu

SEQ ID NO: 19529 - RNA, 2002 nt, Artificial Sequence
  mRNA product Design a-1 (hSL-A64-N5) comprising derived and/or modified sequence from LASV(LM776-SLE-2012;Clade IV)__AIT17825__SP-HsALB_NP(2-569) (opt4)
aggagagucccgcagucggcguccagcggcucugcuuguucgugugugugucguugcaggccuuauucaagcuuaccaugaagugggugaccuucaucagccugcuguuccuguucagcagcgccuacagcagcgccagcaaggagaucaagagcuuccuguggacccagagccugagaagagagcugagcagcuacugcagcaacaucaagcugcagguggugaaggacgcccaggcccugcugcacggccuggacuucagcgaggugagcaacgugcagagacugaugagaaaggagagaagagacgacaacgaccugaagagacugagagaccugaaccaggccgugaacaaccugguggagcugaagagcacccagcagaagagcauccugagagugggcacccugaccagcgacgaccugcugauccuggccgccgaccuggagaagcugaagagcaaggugaccagaaccgagagaccccugagcgccggcguguacaugggcaaccugagcagccagcagcuggaccagagaagagcccugcugagcaugaucggcaugagcggcagcaaccagggcgccagagccggcagagacggcguggugagagugugggacgugaagaacgccgagcugcugaacaaccaguucggcaccaugcccagccugacccuggccugccugaccaagcagggccagguggaccugaacgacgccgugcaggcccugaccgaccugggccugaucuacaccgccaaguaccccaacaccagcgaccuggacagacugacccagagccaccccauccugaacaugaucgacaccaagaagagcagccugaacaucagcggcuacaacuucagccugggcgccgccgugaaggccggcgccugcaugcuggacggcggcaacaugcuggagaccaucaaggugagcccccagaccauggacggcauccugaagagcauccugaaggugaagaaggcccugggcauguucaucagcgacacccccggcgagagaaaccccuacgagaacauccuguacaagaucugccugagcggcgacggcuggcccuacaucgccagcagaaccagcaucaccggcagagccugggagaacaccgugguggaccuggagagcgacggcaagccccagaaggccggcagcaacaacagcaacaagagccugcagagcgccggcuucaccgccggccugaccuacagccagcugaugacccugaaggacgccaugcugcagcuggaccccaacgccaagaccuggauggacaucgagggcagacccgaggaccccguggagguggcccuguaccagcccagcagcggcugcuacauccacuucuucagagagcccaccgaccugaagcaguucaagcaggacgccaaguacagccacggcaucgacgugaccgaccuguucgccgcccagcccggccugaccagcgccgugaucgacgcccugcccagaaacauggugaucaccugccagggcagcgacgacaucagaaagcugcuggagagccagggcagaaaggacaucaagcugaucgacaucgcccugagcaagaccgacagcagaaaguacgagaacgccgugugggaccaguacaaggaccugugccacaugcacaccggcguggugguggagaagaagaagagaggcggcaaggaggagaucaccccccacugcgcccugauggacugcaucauguucgacgccgccgugagcggcggccugaacaccagcgugcugagagccgugcugcccagagacaugguguucagaaccagcacccccagaguggugcugugaggacuagucccuguucccagagcccacuuuuuuuucuuuuuuugaaauaaaauagccugucuuucagaucucaaaggcucuuuucagagccaccaaaaaaaaaaaaaaaaaaaaaaaaaaaaaaaaaaaaaaaaaaaaaaaaaaaaaaaaaaaaaaaaagaauu

SEQ ID NO: 19530 - RNA, 2002 nt, Artificial Sequence
  mRNA product Design a-1 (hSL-A64-N5) comprising derived and/or modified sequence from LASV(Mad39;Clade IV)__ANH09723__SP-HsALB_NP(2-569) (opt4)
aggagagucccgcagucggcguccagcggcucugcuuguucgugugugugucguugcaggccuuauucaagcuuaccaugaagugggugaccuucaucagccugcuguuccuguucagcagcgccuacagcagcgccagcaaggagaucaagagcuuccuguggacccagagccugagaagagagcugagcggcuacugcagcaacaucaagcugcagguggugaaggacgcccaggcccugcugcacggccuggacuucagcgaggugagcaacgugcagagacugaugagaaagcagagaagagacgacaacgaccugaagagacugagagaccugaaccaggccgugaacaaccugguggagcugaagagcacccagcagaagagcgugcugagagugggcacccugaccagcgacgaccugcugacccuggccgccgaccuggagaagcugaagagcaaggugaccagaaccgagagaccccugaccgccggcguguacaugggcaaccugagcagccagcagcuggaccagagaagagcccugcugaacaugaucggcaugagcggcggcaaccagggcgccagaaccggcagagacggcguggugagagugugggacgugaagaacgccgagcugcugaacaaccaguucggcaccaugcccagccugacccuggccugccugaccaagcagggccagguggaccugaacgacguggugcaggcccugaccgaccugggccugaucuacaccgccaaguaccccaacaccagcgaccuggacagacugacccagagccaccccauccugaacaugaucgacaccaacaagagcagccugaacaucagcggcuacaacuucagccugggcgccgccgugaaggccggcgccugcaugcuggacggcggcaacaugcuggagaccaucaaggugagcccccagaccauggacggcauccugaagagcauccugaaggugaagaagagccugggcauguucaucagcgacacccccggcgagagaaaccccuacgagaacauccuguacaagaucugccugagcggcgacggcuggcccuacaucgccagcagaaccagcaucaccggcagagccugggagaacaccgugguggaccuggagagcggcggcaagccccagaaggccggcagcaacaacagcaacaagagccugcagagcgccggcuucgccgccggccugaccuacagccagcugaugacccugaaggacgccaugcugcagcuggaccccaacgccaagaccuggauggacaucgagggcagacccgaggaccccguggagaucgcccuguaccagcccaucagcggcugcuacauccacuucuucagagagcccaccgaccugaagcaguucaagcaggacgccaaguacagccacggcaucgacgugaccgaccuguucgccgcccagcccggccugaccagcgccgugaucgaggcccugcccagaaacauggugaucaccugccagggcagcgacgacaucagaaagcuguucgagagccagggcagaaaggacaucaagcugaucgacaucgcccugagcaagaccgacagcagaaaguacgagaacgccgugugggaccaguacaaggaccugugccacaugcacaccggcguggugguggagaagaagaagaagggcggcaaggaggagaucaccccccacugcgcccugauggacugcaucauguucgacgccgccgugagcggcggccugaacacccuggugcugagagccgugcugcccagagacaugguguucagaaccagcacccccaagguggugcugugaggacuagucccuguucccagagcccacuuuuuuuucuuuuuuugaaauaaaauagccugucuuucagaucucaaaggcucuuuucagagccaccaaaaaaaaaaaaaaaaaaaaaaaaaaaaaaaaaaaaaaaaaaaaaaaaaaaaaaaaaaaaaaaaagaauu

SEQ ID NO: 19531 - RNA, 2002 nt, Artificial Sequence
  mRNA product Design a-1 (hSL-A64-N5) comprising derived and/or modified sequence from LASV(Z0947-SLE-2011;Clade IV)__AIT17841__SP-HsALB_NP(2-569) (opt4)
aggagagucccgcagucggcguccagcggcucugcuuguucgugugugugucguugcaggccuuauucaagcuuaccaugaagugggugaccuucaucagccugcuguuccuguucagcagcgccuacagcagcgccagcaaggagaucaagagcuuccuguggacccagagccugagaagagagcugagcggcuacugcagcaacaucaagcugcagguggugaaggacgcccaggcccugcugcacggccuggacuucagcgaggugagcaacgugcagagacugaugagaaaggagagaagagacgacaacgaccugaagagacugagagaccugaaccaggccgugaacaaccugguggagcugaagagcacccagcagaagagcauccugagagugggcacccugaccagcgacgaccugcugauccuggccgccgaccuggagaagcugaagagcaaggugaccagaaccgagagaccccugagcgccggcguguacaugggcaaccugagcagccagcagcuggaccagagaagagcccugcugaacaugaucggcaugagcggcagcaaccagggcgccagaaccggcagagacggcguggugagagugugggacgugaagaacgccgagcugcugaacaaccaguucggcaccaugcccagccugacccuggccugccugaccaagcagggccagguggaccugaacgacgccgugcaggcccugaccgaccugggccugaucuacaccgccaaguaccccaacaccagcgaccuggacagacugacccagagccaccccauccugaacaugaucgacaccaagaagagcagccugaacaucagcggcuacaacuucagccugggcgccgccgugaaggccggcgccugcaugcuggacggcggcaacaugcuggagaccaucaaggugagcccccagaccauggacggcauccugaagagcauccugaaggugaagaaggcccugggcauguucaucagcgacgcccccggcgagagaaaccccuacgagaacauccuguacaagaucugccugagcggcgacggcuggcccuacaucgccagcagaaccagcaucaccggcagagccugggagaacaccgugguggaccuggagagcgacggcaagccccagaaggccggcagcaacggcagcaacaagagccugcagagcgccggcuucaccgccggccugaccuacagccagcugaugacccugaaggacgccaugcugcagcuggaccccaacgccaagaccuggauggacaucgagggcagacccgaggaccccguggagaucgcccuguaccagcccagcagcggcugcuacauccacuucuucagagagcccaccgaccugaagcaguucaagcaggacgccaaguacagccacggcaucgacgugaccgaccuguucgccgcccagcccggccugaccagcgccgugaucgacgcccugcccagaaacauggugaucaccugccagggcagcgacgacaucagaaagcuguucgagagccagggcagaaaggacaucaagcugaucgacaucgcccugagcaagaccgacagcagaaaguacgagaacgccgugugggaccaguacaaggaccugugccacaugcacaccggcaucgugguggagaagaagaagagaggcggcaaggaggagaucaccccccacugcgcccugauggacugcaucauguucgacgccgccgugagcggcggccugaacaccagcgugcugagagccgugcugcccagagacaugguguucagaaccagcacccccagaguggugcugugaggacuagucccuguucccagagcccacuuuuuuuucuuuuuuugaaauaaaauagccugucuuucagaucucaaaggcucuuuucagagccaccaaaaaaaaaaaaaaaaaaaaaaaaaaaaaaaaaaaaaaaaaaaaaaaaaaaaaaaaaaaaaaaaagaauu

SEQ ID NO: 19532 - RNA, 2002 nt, Artificial Sequence
  mRNA product Design a-1 (hSL-A64-N5) comprising derived and/or modified sequence from LASV(Josiah;Clade IV)__NP_694869__SP-HsALB_NP(2-569) (opt5)
aggagagucccgcagucggcguccagcggcucugcuuguucgugugugugucguugcaggccuuauucaagcuuaccaugaagugggugaccuucaucagccugcucuuucuguucuccucugccuacagcagcgccuccaaggagaucaaaucuuuccuguggacccagagccucagacgggaacuguccggcuacugcucuaacauuaagcugcaaguggucaaagacgcucaggcccugcuccacgggcuggauuuuagcgagguuuccaaugugcagcgccuuaugagaaaggaacggcgcgacgauaacgaccugaaaagacuccgggaucugaaucaggcggugaacaaucuggucgagcucaagucuacacaacaaaagagcauccugcgcgugggaacgcuuaccuccgacgaucugcucauucuggcugccgaccuugaaaaacuuaagagcaaaguuaucagaacagagcggccccucucugccggcguguauauggggaaccuguccagccagcagcuggaucagcgcagagcucuccugaauaugauuggaaugucuggcgggaaccagggagcccgggcuggccgcgacggcgucgugagaguuugggaugugaagaaugccgagcuucugaacaaucaguucgggaccaugccuucccucacacuggcgugucuuaccaaacagggacaagucgaccugaacgaugccgugcaggcucucacagaccugggccugaucuacaccgccaaguauccgaauacgagcgaccucgaucggcugacccagucucaucccauccuuaacaugauugacacaaagaaauccagccugaauaucuccggguacaacuuuucucucggagcugccgugaaggcgggcgccugcaugcuggaugggggaaacaugcuugaaaccauuaaagucagcccucaaacaauggacggcauccugaaguccauucucaaaguuaagaaagcucugggcauguucaucagcgauacccccggggagcgcaauccuuaugaaaacauucuguacaagaucugucucucuggagacggcuggcccuauaucgccuccagaacgagcauuacagggcgggcuugggagaauaccgugguggaucuggagucugacggaaagccucagaaagccgauagcaacaauuccucuaagagccuucaguccgccggcuuuacagcugggcugaccuacagccagcucaugacccugaaagacgcgaugcugcaacuugauccgaacgccaagacauggauggacaucgaaggaagacccgaggacccugucgaaauugcucucuaccagcccucuuccggcugcuauauccacuucuuucgcgagccuacggaucugaaacaguucaagcaggacgccaaguacagccauggcauugaugugaccgaccuguuugccacacaacccgggcucaccucugcuguuaucgaugcccugccgcggaauauggugaucacaugucagggauccgacgauauuagaaaacuucuggaaagccagggccgcaaggacaucaaacucauugauaucgcgcuguccaagaccgacucucggaaauaugagaacgcugucugggaucaguacaaggaccugugccacaugcauacgggggugguuguggagaagaaaaagagaggaggcaaagaagagauuacaccucacugugcccuuauggauugcaucauguucgacgccgcugucagcgggggccucaauaccuccgugcugcgcgccguccugccccgggacaugguguuuagaaccucuacaccucgcguugugcucugaggacuagucccuguucccagagcccacuuuuuuuucuuuuuuugaaauaaaauagccugucuuucagaucucaaaggcucuuuucagagccaccaaaaaaaaaaaaaaaaaaaaaaaaaaaaaaaaaaaaaaaaaaaaaaaaaaaaaaaaaaaaaaaaagaauu

SEQ ID NO: 19533 - RNA, 2002 nt, Artificial Sequence
  mRNA product Design a-1 (hSL-A64-N5) comprising derived and/or modified sequence from LASV(LP;Clade I)__AAF86702__SP-HsALB_NP(2-569) (opt5)
aggagagucccgcagucggcguccagcggcucugcuuguucgugugugugucguugcaggccuuauucaagcuuaccaugaagugggugaccuucaucagccugcucuuucuguucuccucugccuacagcagcaacuccaaggagaucaaaucuuuccuguggacccagagccucagacgggaacuguccggcuacugcucuaauauuaagcuccaaguggucaaagacgcccaggcucugcuccacgggcuggauuuuagcgagguuuccaacgugcagcgccuuaugagaaagcagaaacgggacgaugccgaccugaagcgccucagagaucugaaucaagcggugaacaaucuggucgaacucaagucuacacagcagaaaaacgugcugcggguuggaacgcuuagcuccgacgaucugaucacccucgcugccgaccuggagaaacuuaaaagcaaggugauucgcacagaaagaccccugucuuccggcgucuauauggggaaucucagcucucagcaacuggaucagcggcgcgcccugcucuccaugaucggaaugagcggcgggccucagggaaacagaaccggcggcgacggggugguucgggugugggaugucaaaaaugcugagcugcuuaacaaucaguucggaacaaugccgucucugacccucgccugucugacaaagcaaggccagguggaccuuaacgaugcugugcaggcccugaccgaccucgggcugauuuacacggcgaaguaucccaauuccagcgaccuggauaugcucacccaaucccauccuauccugggaauggucgacacaaagaagucuagccuuaacaucuccggcuacaauuuuagccugggggccgcuguuaaagccggagcuugcaugcucgauggcggcaacaugcuggagaccauuaaggugucuccccagacaauggacgggauccuuaaauccauucugaaggugaaacgcagccucggaauguucaucucugauaccccuggcgaaagaaaccccuaugagaauauucuguacaagaucugucugagcggggaaggauggccuuauauugccucccggacgucuaucacaggccgcgcgugggagaacacccucgucgaccuggagagcgauaauaagccgcccaaacuuaacuccgccgggagcaauaagucucugcaggcugccggacucaacgcuggccugacauacucccagcugaugacccuuaaagacugcaugcuccaacuggauccuagcucuaagaccuggaucgacauugaaggcagacccgaggauccuguggaaaucgcccuguuucagcccuccagcggguguuacauucacuucuuucgggagccgacagaccucaaacaguucaagcaggacgccaaguauucccauggaaucgauguuacggaccuguuuucuacccaaccuggccuuacaagcgcugugauugaagcgcugcccagaaauaugguccuuaccugccagggguccgaugacaucaaaaagcugcuggagucucagggacgccgggauaucaaacuuauugacaucagccucuccaaggccgauagcagaaaauucgagaacgcugugugggaccaguacaaggaucugugucacaugcauacaggcguuguggucgaaaagaaaaagcgcgggggcaaagaggaaauuaccccucacugcgcccugcucgacuguaucauguuugaugccgcuacgacaggaucucugaauauuaccacccuucgggccgugcugcccagagacauggucuuccgcacauccacccccaaggugguucucugaggacuagucccuguucccagagcccacuuuuuuuucuuuuuuugaaauaaaauagccugucuuucagaucucaaaggcucuuuucagagccaccaaaaaaaaaaaaaaaaaaaaaaaaaaaaaaaaaaaaaaaaaaaaaaaaaaaaaaaaaaaaaaaaagaauu

SEQ ID NO: 19534 - RNA, 2002 nt, Artificial Sequence
  mRNA product Design a-1 (hSL-A64-N5) comprising derived and/or modified sequence from LASV(803213;Clade II)__AAF86704__SP-HsALB_NP(2-569) (opt5)
aggagagucccgcagucggcguccagcggcucugcuuguucgugugugugucguugcaggccuuauucaagcuuaccaugaagugggugaccuucaucagccugcucuuucuguucuccucugccuacagcagcgccuccaaggaggugaaaucuuuccuguggacccagagccucagacgggaacuguccggcuacugcucuaacaucaaacuucaagucguuaaggacgcucaggcccugcuccacgggcuggauuuuagcgaggugaauaacgugcagcgccuuaugagaaagcagaaacgggacgauggagaccugaagcgccucagagaucugaaucaagcggucaacaaucugguggaacucaaguccacacagcagaaaucuauucugcggguuggcacgcuuaccagcgacgaucugcucacacuggcugccgaccuugagaagcugaaauccaaggugauccgcaccgaaagaccccucagcucuggggucuauaugggaaaccuguccacacagcaacuggagcagcggcgcgcccuccugaauaugauuggcauggugggaggagcucagggcacccagccuggcagagaugggguugugcgggucugggacgugaaaaacccggaucuucugaauaaccaauucggaacaaugcccagccucacccuggccugucuuacgaagcagggccagguggaccugaaugaugcuguccucgcccugaccgaccuggggcucaucuacacagcgaaguauccuaacucuuccgaccuggaucgccuuagccaaucucaucccauucugaauaugguugacaccaaaaaguccagccucaacaucuccggauacaauuuuucucugggcgccgcugugaaagccggggcuugcaugcuugauggaggcaacaugcuggagacaaucaaggugaccccucagacgauggacggcauucucaaaagcauccugaaggucaaaagaucccuggggauguucgugagcgauacacccggagaacggaacccuuaugagaauauucucuacaagaucugucugucuggcgacggguggccguauauugccucccgcaccagcaucguugggagagcgugggaaaacacaaccguggaucuugagucugacggcaagccccagaaagucgggaccgccggaagcaauaagucccugcagucugcuggcuuuccuacaggccucacguacagccaacugaugacccugaaagauuccaugaugcagcuugaccccagcgccaagacauggauugauaucgaggggcggccugaagaccccguggagaucgcucucuaccagccgaugucuggaugcuauauucacuucuuuagagaaccuaccgaccugaaacaguucaagcaagaugccaaguacucccauggcaucgacguugccgaucuguuucccgcucagccugggcucacaagcgcggugauugaggcccugccccgcaacaugguccuuaccugucagggaucugacgauaucaaaaagcugcucgacucccagggccggagagauauuaaacugaucgacaucagccuguccaagguggauucucgcaaauucgaaaaugcugucugggaccaaugcaaggaucuuugucacaugcauacgggggugguuguggagaagaaaaagcggggcggaaaagaggaaauuacaccccacugcgcccucauggacuguaucauguuugaugccgcugucagcggcgggcugaacauuccugugcugagagccguucucccgcgcgacaugguguuccggaccuccucucccaaggucgugcugugaggacuagucccuguucccagagcccacuuuuuuuucuuuuuuugaaauaaaauagccugucuuucagaucucaaaggcucuuuucagagccaccaaaaaaaaaaaaaaaaaaaaaaaaaaaaaaaaaaaaaaaaaaaaaaaaaaaaaaaaaaaaaaaaagaauu

SEQ ID NO: 19535 - RNA, 2005 nt, Artificial Sequence
  mRNA product Design a-1 (hSL-A64-N5) comprising derived and/or modified sequence from LASV(GA391;Clade III)__CAA36646__SP-HsALB_NP(2-570) (opt5)
aggagagucccgcagucggcguccagcggcucugcuuguucgugugugugucguugcaggccuuauucaagcuuaccaugaagugggugaccuucaucagccugcucuuucuguucuccucugccuacagcagcgccuccaaggaggugagaucuuuccuguggacccagagccuccggcgcgaacuguccggcuacugcucuaacaucaaacuucaagucguuaaggacgcucaggcccugcuccacgggcuggauuuuagcgagguguccaaugugcagagacuuaugcggaaacagaagcgcgacgauggagaccugaaaagacuccgggaucugaaccaagcggucaauaaccugguggaacucaagucuacacagcagaaaagcguucugcgcgugggcacgcuuuccagcgacgaucugcucauucuggcugccgaccuugagaaacugaagucuaaagucaccagaacagaacggccccucuccagcgggguguauaugggaaaucugucuucccagcaacuggaucagcgcagagcccuccugaacaugaucggcaugaccgggguuagcggaggcggcaagggggcuucugacggaauugugcgggucugggaugugaaaaaugccgagcuucugaacaaucaguucggcacaaugccuucccucacccuggcuugucuuacaaagcaggggcaaguggaccugaacgaugccguccaggcgcucaccgaccugggacugaucuacacggccaaguauccgaauagcuccgaccucgaucgccugucucagagccaucccauucuuaacaugaucgacaccaaaaaguccagccugaauaucucuggcuacaacuuuucccucggggcugccguuaaagcuggagccugcaugcuggauggcggcaauaugcuugagacaauuaaggugagcccucaaaccauggacgggauccugaaaucuauucucaaggugaaaaagagccugggaauguucgucuccgauacacccggcgaaagaaacccuuaugagaacauccuguacaagauuugucucucuggggacggauggcccuauaucgcgagccggaccuccauugugggccgcgccugggaaaauacgguuguggaucuggagcaggacaacaaaccucagaagaucgggaauggaggcagcaacaaaucucuucaguccgcuggcuuugccgcugggcugacauacagccaacucaugacccugaaggauuucaaaugcuuuaaucugaucccgaacgccaagacauggauggacauugagggaagacccgaagauccugucgagaucgcccuuuaccagcccucuuccggcuguuaugugcacuucuuucgggaaccuaccgaccucaagcaguucaaacaggacgcuaaguacagccaugggauugauguuaccgaccuguuugcggcccaacccggacugacauccgcugugaucgaggcccucccgagaaauauggucauuacgugccagggcucugaagauauccgcaaacugcuugagagccaggggcggagagacaucaagcugauugauaucacccucuccaaagccgacucucgcaaguucgagaacgcugugugggaucaguuuaaggaccugugucacaugcauacaggcgucgugguugaaaagaagaaacggggaggcaaggaggaaauuaccccucacugcgcccugauggauuguaucauguucgacgcggcugugagcgggggacuugaugccaaaguccucagagugguucugccccgcgacaugguguuccggacauccaccccuaaggucgugcugugaggacuagucccuguucccagagcccacuuuuuuuucuuuuuuugaaauaaaauagccugucuuucagaucucaaaggcucuuuucagagccaccaaaaaaaaaaaaaaaaaaaaaaaaaaaaaaaaaaaaaaaaaaaaaaaaaaaaaaaaaaaaaaaaagaauu

SEQ ID NO: 19536 - RNA, 2002 nt, Artificial Sequence
  mRNA product Design a-1 (hSL-A64-N5) comprising derived and/or modified sequence from LASV(AV;Clade V)__CCA30315__SP-HsALB_NP(2-569) (opt5)
aggagagucccgcagucggcguccagcggcucugcuuguucgugugugugucguugcaggccuuauucaagcuuaccaugaagugggugaccuucaucagccugcucuuucuguucuccucugccuacagcagcgccuccaaggaggugaaaucuuuccuguggacccagagccucagacgggaacuguccggcuacugcucuaacaucaaacuucaagucguuaaggacgcucaggcccugcuccacgggcuggauuuuagcgagguguccaaugugcagcgccuuaugagaaagcagcggcgcgacgauucugaccugaaaagacuccgggaucugaaccaagcggucaauaaccugguggaacucaagagcacacagcagaaguccguucugcgcgugggaacgcuuagcucugacgaucugcucacccuggcugccgaccuugagaaacugaaguccaaagucacaagaaccgaacggccccucagcucuggcguguauauggggaaucuguccagccagcaacuggaucagcgcagagcccuccugaaccuuauuggaaugacaaauggcucucaggggucccaggcuggacgggacggcguugugcgcgucugggaugugaagaacgccgagcugcucaauaaccaauucggcaccaugccuagccugacacuugcuugucugaccaaacagggacagguggaccucaaugaugucguucaagcccugacggaccuggggcucaucuacaccgcgaaguauccgaacacauccgaccuggauagacuuacccagucucaucccauucugaauaugaucgacacaaagaaaagcucccucaacauuagcggcuacaauuuuucucugggggccgcugugaaggccggagcuugcaugcuugauggcgggaacaugcuggagaccaucaaaguguccccucagagcauggacggaauccucaagucuauucugaaagucaagcgggcccugggcauguucgugagcgauacgcccggcgaacgcaacccuuaugagaauauccucuacaaaauuugucuguccggggacggauggcccuauaucgcgucuagaacaagcauuguuggccgggccugggaaaacaccguggucgaucuugagacagacgggaagccucagaagaucggauccggcaauagcaacaaaucucugcaauccgcuggguuuagcgccggacucaccuacucucagcugaugacccugaaggaugcuaugcuucagcucgacccgaaugccaaaacauggauggauauugagggcagacccgaagacccuguggagguugcccuguaccagcccaucuccggcugcuauauccacuucuuucgcgaaccuacggaccugaagcaauucaaacaggaugcuaaguacagccaugggauugacaucgcggaucucuuugccgcucagcccggacugaccuccgccgugauugaggcccuuccgcggaacauggucaucacaugucagggcucugaagacauuaagaaacugcucgagagccaagggagaaaggauaucaaacugaucgacauugcucuguccaagaucgauucucgcaaauucgagaaugccgugugggaccaguauaaggaucuuugccacaugcauaccggagucgugguugaaaagaaaaagcggggcgggaaagaggaaauuacaccucacugugcgcucauggacugcaucauguuugaugcugccgugagcggcggacugaacacccugguccucagagccgugcugccccgcgacaugguuuuccggacguccacaccuagagugguccuuugaggacuagucccuguucccagagcccacuuuuuuuucuuuuuuugaaauaaaauagccugucuuucagaucucaaaggcucuuuucagagccaccaaaaaaaaaaaaaaaaaaaaaaaaaaaaaaaaaaaaaaaaaaaaaaaaaaaaaaaaaaaaaaaaagaauu

SEQ ID NO: 19537 - RNA, 2002 nt, Artificial Sequence
  mRNA product Design a-1 (hSL-A64-N5) comprising derived and/or modified sequence from LASV(Togo/2016/7082;Clade VI)__AMR44578__SP-HsALB_NP(2-569) (opt5)
aggagagucccgcagucggcguccagcggcucugcuuguucgugugugugucguugcaggccuuauucaagcuuaccaugaagugggugaccuucaucagccugcucuuucuguucuccucugccuacagcagcaacuccaaggaggugaaaucuuuccuguggacccagagccucagacgggaacuguccggcuacugcucuaauaucaaacuucaagucguuaaagacgcccaggcucugcuccacgggcuggauuuuagcgagguguccaacgugcagcgccuuaugagaaagcagaaacgggacgauggagaccugaagcgccucagagaucugaaucaagccgucaacaaucugguggaacucaagucuguucagcagaaaagcauucugcgggugggcacacuuacguccgacgaucugcucacccuggcggcugaccuugagaagcugaaaagcaaggucacacgcaccgaaagaccccucucuuccgggguguauaugggaaaccugagcucucagcaacuggaucagcggcgcgcccuccuguccaugaucggcaugagcgggggaaaucagaacucucagccuaaaggcgacggcguugugagagucugggaugugaagaaugccgaccuucugaacaaucaauucgggacaaugccgucccucacccuggcuugucuuacaaagcagggacagguggaucugaacgacgccguccaagcucucaccgaccugggccugauuuacacggccaaauaucccaauagcuccgaucucgaccggcugucucagagccauccuauccuuaacaugauugauaccaagaaauccagccugaauaucucuggguacaacuuuucccucggagcggccaucaagacaggcgcuugcaugcuggacgggggaaacaugcuugagaccauuaaaguuacaccccagaccauggauggcauccucaagagcauucugaaagugaagcgcucucugggcauguucaucagcgacacgccuggggagagaaaucccuaugaaaacauucuguacaagaucugucucuccggagauggcuggccuuauauugccucucggacagcuaucaucgggcgcgccugggagaauaccguggucgaccuggaaagcgauuccaaaccgcagaagauuggaagcaacggcucuaauaaaucccuucaaagcgcgggguuugcccccggacugacauacucucagcucaugacccugaaggacuccaugcugcagcuugauccuaacgcuaaaaccuggaucgacauugagggcagacccgaggacccuguggaaguugcccucuuccagcccaucagcggcugcuacauucacuuuuuccgggagccgacagaucugaagcaauuuaagcaggacgcuaaauauucccaugggaucgaugugacggaccuguucgccgcccagccuggacucaccucugcugucaucgaagcgcugcccagaaauauggugcuuacaugucagggcagcgaugacauuaagaaacugcucgauucccaagggcgccgggacaucaagcugauugauguuucucugaacaaaaucgacagcagaaaguuugagaaugccgugugggaucaguacaaggaccuuugccacaugcauaccggagucguggucgaaaagaagaaaaagggcgggaaagaggagauuacaccucacugugcucuccuggauugcaucauguucgacgccgccguguccggcggacugaacgcuaccguucuccgcgccgugcugccccgggacauggucuuuagaacgagcucucccaaggugguucuuugaggacuagucccuguucccagagcccacuuuuuuuucuuuuuuugaaauaaaauagccugucuuucagaucucaaaggcucuuuucagagccaccaaaaaaaaaaaaaaaaaaaaaaaaaaaaaaaaaaaaaaaaaaaaaaaaaaaaaaaaaaaaaaaaagaauu

SEQ ID NO: 19538 - RNA, 2002 nt, Artificial Sequence
  mRNA product Design a-1 (hSL-A64-N5) comprising derived and/or modified sequence from LASV(KAK-428;Clade n.d. (VII))__ANH09741__SP-HsALB_NP(2-569) (opt5)
aggagagucccgcagucggcguccagcggcucugcuuguucgugugugugucguugcaggccuuauucaagcuuaccaugaagugggugaccuucaucagccugcucuuucuguucuccucugccuacagcagcaacuccaaggaggugaaaucuuuccuguggacccagagccucagacgggaacuguccggcuacugcacaaauaucaaacuucaagucguuaaggacgcccaggcucugcuccacgggcuggauuuuucugaggugagcaacgugcagcgccuuaugagaaagcagaaacgggacgauaaugaccugaagcgccucagagaucugaaccaagccgucaauaaccugguggaacucaaguccguucagcagaaaucugugcugaaggucggaacgcuuaauagcgacgaucugcucacccuggcggcugaccuugagaaacugaaguccaaagugguucggacagaacgcccccucagcucuggcguguauauggggaaccuguccagccagcaacuggaucagagacgggcccuccugaauaugauuggaauggccggcgggucucagggaaaccagccuucccgcgacggcgucgugagagugugggaugucaagaaugcugaccuucugaacaaucaauucggcaccaugccgagccucacacuggccugucuuaccaagcaggggcagguugaucugaacgacguggugcucgcucugacagaccugggacucaucuacaccgccaaauaucccaauucuuccgaucuggaccggcuuagccaaaaccauccuguccugaacaugauugaugugaauaaguccucucucaacaucagcggcuacaauuuuucccugggggcggccguuaaagcuggagccugcaugcuugacggcgggaacaugcuggagacgauuaagaucagcccccagaccguggauggaauccucaaaucuauucugaaggucaaacgcgcucugggcauguucguguccgacacaccuggcgagagaaaucccuaugaaaacauccucuacaagguuugucugagcgggaauggauggccuuauauugccucucggaccagcaucgugggccgcgcgugggagaacacagucguggaucuugaauccaauaagaaccagccgaaagucgggaauaacggaucuaauaagaugcugcagagcuccggcuuugccaccgggcucacguacagccaacugaugacacugagagacucuaugcuucagcucgaucccaccgcuaaaacauggauugacaucgagggacggccugaggaucccguggaacuggcccuguuccagccuuccagcggcugcuacauucacuuuuucagagagcccaccgaccucaagcaguuuaaacaagacgcuaaguauucucauggcaucgauguuaacgaccuguucuccgcccagccggggcuuaccagcgccgugcuggaagcucucccucgcaauaugguccugacaugucagggauccgaugacauccggaagcugcuugauucucaggacagaaaagauauuaagcucaucgacauuagccuguccaaagcggaugcccgcaaguuugagaacgacgugugggaucaauucaaagaccugugccacaugcauacgggcaucguuguggaaaagaagaaaaagggagggaaacaggagaugacaccccacugugcucuccuggauugcauuauguuugacgccgccgucucuggcgggcuuaacgugccuacccugcgggcugugcuccccaccgacaugguuuucagaacaaucaccacgaaggucgugcugugaggacuagucccuguucccagagcccacuuuuuuuucuuuuuuugaaauaaaauagccugucuuucagaucucaaaggcucuuuucagagccaccaaaaaaaaaaaaaaaaaaaaaaaaaaaaaaaaaaaaaaaaaaaaaaaaaaaaaaaaaaaaaaaaagaauu

SEQ ID NO: 19539 - RNA, 2002 nt, Artificial Sequence; identical to SEQ ID NO: 19533
  mRNA product Design a-1 (hSL-A64-N5) comprising derived and/or modified sequence from LASV(Pinneo-NIG-1969;Clade I)__AIT17837__SP-HsALB_NP(2-569) (opt5)

SEQ ID NO: 19540 - RNA, 2002 nt, Artificial Sequence
  mRNA product Design a-1 (hSL-A64-N5) comprising derived and/or modified sequence from LASV(ISTH0009-NIG-2011;Clade II)__AIT17405__SP-HsALB_NP(2-569) (opt5)
aggagagucccgcagucggcguccagcggcucugcuuguucgugugugugucguugcaggccuuauucaagcuuaccaugaagugggugaccuucaucagccugcucuuucuguucuccucugccuacagcagcguguccaaggaggucaaaucuuuccuguggacccagagccucagacgggaacuguccggcuacugcucuaacaucaaacuucaaguugugaaggacgcccaggcucugcuccacgggcuggauuuuagcgagguguccaauguccagcgccuuaugagaaagcagaaacgggacgauucugaccugaagcgccucagagaucugaaccaagccgugaauaaccugguugaacucaagagcacacagcagaaauccauucugcgggugggaacgcuuaccagcgacgaucugcucacacuggcggcugaccuugagaagcugaaaucuaaggucauccgcaccgaaagaccccucuccagcggcguguauauggggaaucugucuacacagcaacuggagcagcggcgcgcccuccugaacaugauuggaaugguuggcggggcccagggaacccagccuggcagagauggcgugguccgggugugggacgugaaaaauccggaucuucugaacaaucaauucgggacaaugcccucccucacccuggcuugucuuacgaagcagggacaggucgaccugaacgaugccguucucgcucugaccgaccugggccucaucuacacagccaaguauccuaauagcucugaccuggaucgccuuucccaaagccaucccauucugaacaugguggacaucaaaaaguccucucucaauaucagcggguacaacuuuucccugggagcggccgugaaagcuggcgccugcaugcuugaugggggaaauaugcuggagaccauuaaggucacaccucagaccauggacggcauccucaaaagcauucugaaggugaaaagaucucugggcauguucguuuccgauacgcccggggaacggaacccuuaugagaacauccucuacaagauuugucugagcggagacggcuggccguauaucgcuucucgcacaagcauuguggggagagccugggaaaauaccacagucgaucuugaguccgacggaaagccccagaaagugggcucugcggggagcaacaagucccugcagagcgccggauuuccuaccggccucaccuacucucaacugaugacacugaaagauuccaugaugcagcuugaccccagcgcuaagacguggaucgauaucgagggccggccugaagaccccguugagauugcccucuaccagccgaugucugggugcuauauccacuucuuuagagaaccuaccgaccugaaacaguucaagcaagaugcuaaguacucccauggaauugacguggccgaucuguuucccgcccagccuggccucacaagcgcugucaucgaggcgcugccccgcaauauggugcuuaccugucagggguccgacgauauuaaacggcugcucgacucucagggaagacgcgauaucaagcugaucgacauugcccugagcaaagcugauucccggagauucgaaaacgccgucugggaccaaugcaaggaucuuugucacaugcauacaggcgugguuguggagaaaaagaagcgcgggggcaaagaggaaaucacgccccacugcgcccucauggacuguauuauguaugaugcugccgucucuggaggccugaauaucccugugcugcgggcgguucucccgagagacaugguguuucgcaccagcucccccaaggucgugcugugaggacuagucccuguucccagagcccacuuuuuuuucuuuuuuugaaauaaaauagccugucuuucagaucucaaaggcucuuuucagagccaccaaaaaaaaaaaaaaaaaaaaaaaaaaaaaaaaaaaaaaaaaaaaaaaaaaaaaaaaaaaaaaaaagaauu

SEQ ID NO: 19541 - RNA, 2002 nt, Artificial Sequence
  mRNA product Design a-1 (hSL-A64-N5) comprising derived and/or modified sequence from LASV(ISTH2010-NIG-2012;Clade II)__AIT17483__SP-HsALB_NP(2-569) (opt5)
aggagagucccgcagucggcguccagcggcucugcuuguucgugugugugucguugcaggccuuauucaagcuuaccaugaagugggugaccuucaucagccugcucuuucuguucuccucugccuacagcagcgccuccaaggaggugaaaucuuuccuguggacccagagccucagacgggaacuguccggcuacugcucuaacaucaaacuucaagucguuaaggacgcucaggcccugcuccacgggcuggauuuuagcgagguguccaaugugcagcgccuuaugagaaagcagaaacgggacgauucugaccugaagcgccucagagaucugaaccaagcggucaauaaccugguggaacucaagagcacacagcagaaauccauucugcggguuggaacgcuuaccagcgacgaucugcucacacuggcugccgaccuugagaagcugaaaucuaaggugauccgcaccgaaagaccccucuccagcggcgucuauauggggaaucugucuacacagcaacuggagcagcggcgcgcccuccugaaccuuauuggaauggugggcggggcucagggaacccagccuggcagagauggcguugugcgggucugggacgugaaaaauccggaucugcucaacaaucaauucgggacaaugcccucccugacccuugccugucugacgaagcagggacagguggaccucaacgaugcuguccuggcccugaccgaccucggccugaucuacacagcgaaguauccuaauagcucugaccuugaucgccugucccaaagccaucccauucucaacaugguugacaccaaaaaguccucucugaauaucagcggguuuaacuucucccuuggagccgcugugaaagccggcgcuugcaugcuggaugggggaaauaugcucgagacaaucaaggugaccccucagacgauggacggcauucugaaaagcauccugaaggucaaaaagucucucggcauguuuguguccgauacacccggggaaagaaacccuuacgagaacauucuguauaagaucugucuuagcggagacggcuggccguacauugccucucggaccagcaucguugggcgcgcgugggaaaauacaaccguggaucuggaguccgacggaaaaccccacaaggucggcaccgccgggucuaacaaaagccuccaguccgcuggauucccuacaggccugacguauagccagcugaugacccuuaaggauucuaugaugcaacucgaccccuccgccaaaacauggauugauaucgagggcagaccugaagaccccguggagaucgcucuguaccagccgaugagcgggugcuacauucacuuuuuccgggaaccuaccgaccugaagcaguuuaagcaggaugccaaauauucucauggaaucgacguugccgaucucuuccccgcucaaccuggccugacauccgcggugauugaggcccuucccagaaauaugguccugaccugucaggggagcgacgauaucaagcgccuccuggacucccagggacggagagauauuaaacugaucgacaucgcucuuucuaaggccgauagccgccgguuugaaaacgccgugugggaccagugcaaagaucucugucauaugcacacgggcgucgugguugagaagaagaaaagagggggcaaggaggaaauuacaccccacugcgcucugauggacuguaucauguacgaugccgcgguguccggaggccugaauauuccuguccuccgcgcugugcugccgcgggacaugguuuucagaaccucuagccccaaagugguccuuugaggacuagucccuguucccagagcccacuuuuuuuucuuuuuuugaaauaaaauagccugucuuucagaucucaaaggcucuuuucagagccaccaaaaaaaaaaaaaaaaaaaaaaaaaaaaaaaaaaaaaaaaaaaaaaaaaaaaaaaaaaaaaaaaagaauu

SEQ ID NO: 19542 - RNA, 2002 nt, Artificial Sequence
  mRNA product Design a-1 (hSL-A64-N5) comprising derived and/or modified sequence from LASV(Lassa virus/H.sapiens-wt/NGA/2015/ISTH_0543;Clade II)__AVO03640__SP-HsALB_NP(2-569) (opt5)
aggagagucccgcagucggcguccagcggcucugcuuguucgugugugugucguugcaggccuuauucaagcuuaccaugaagugggugaccuucaucagccugcucuuucuguucuccucugccuacagcagcgccuccaaggaggugaaaucuuuccuguggacccagagccucagacgggaacuguccggcuacugcucuaacaucaaacuucaagucguuaaggacgcucaggcccugcuccacgggcuggauuuuagcgagguguccaaugugcagcgccuuaugagaaagcagaaacgggacgauucugaccugaagcgccucagagaucugaaccaagcggucaauaaccugguggaacucaagagcacacagcagaaauccauucugcggguuggaacgcuuaccagcgacgaucugcucacacuggcugccgaccuugagaagcugaaaucuaaggugauccgcaccgaaagaccccucuccagcggcgucuauauggggaaucugucuacacagcaacuggagcagcggcgcgcccuccugaacaugauuggaauggugggcggggcucagggaacccagccuggcagagauggcguugugcgggucugggacgugaaaaauccggaucuucugaacaaucaauucgggacaaugcccucccucacccuggccugucuuacgaagcagggacagguggaccugaacgaugcuguccucgcccugaccgaccugggccucaucuacacagcgaaguauccuaauagcucugaccuggaucgccuuucccaaagccaucccauucugaacaugguugacaccaaaaaguccucucucaauaucagcggguacaacuuuucccugggagccgcugugaaagccggcgcuugcaugcuugaugggggaaauaugcuggagacaaucaaggugaccccucagacgauggacggcauucucaaaagcauccugaaggucaaaaagucucugggcauguucguguccgauacacccggggaaagaaacccuuaugagaacauucucuacaagaucugucugagcggagacggcuggccguauauugccucucggaccagcaucguugggcgcgcgugggaaaauacaaccguggaucuugaguccgacggaaaaccccagaaggucggcucugccgggagcaacaaaucccugcagagcgcuggauuuccuaccggccucacauacucucaacugaugacgcugaaggauuccaugaugcagcuugaccccagcgccaaaaccuggauugauaucgagggcagaccugaagaccccguggagaucgcucucuaccagccgaugucugggugcuauauucacuucuuucgggaaccuacagaccugaagcaguucaagcaagaugccaaauacucccauggaaucgacguugccgaucuguuucccgcucagccuggccucaccagcgcggugauugaggcccugcccagaaauaugguccuuacaugucagggguccgacgauaucaagcgccugcucgacucucagggacggaaagauauuaagcugaucgacaucgcucugagcaaagccgauuccagacgcuucgaaaacgccgugugggaccaaugcaaggaucuuugucacaugcauaccggcgucgugguugagaagaaaaagagagggggcaaagaggaaauuacgccccacugcgcucucauggacuguaucauguaugaugccgcggugucuggaggccugaauauuccuguccugcgggcugugcucccgcgcgacaugguuuuucggacaagcucccccaaggugguccugugaggacuagucccuguucccagagcccacuuuuuuuucuuuuuuugaaauaaaauagccugucuuucagaucucaaaggcucuuuucagagccaccaaaaaaaaaaaaaaaaaaaaaaaaaaaaaaaaaaaaaaaaaaaaaaaaaaaaaaaaaaaaaaaaagaauu

SEQ ID NO: 19543 - RNA, 2002 nt, Artificial Sequence
  mRNA product Design a-1 (hSL-A64-N5) comprising derived and/or modified sequence from LASV(Lassa virus/H.sapiens-wt/NGA/2016/ISTH_0009;Clade II)__AVO03572__SP-HsALB_NP(2-569) (opt5)
aggagagucccgcagucggcguccagcggcucugcuuguucgugugugugucguugcaggccuuauucaagcuuaccaugaagugggugaccuucaucagccugcucuuucuguucuccucugccuacagcagcgccuccaaggaggugaaaucuuuccuguggacccagagccucagacgggaacuguccggcuacugcucuaacaucaaacuucaagucguuaaggacgcucaggcccugcuccacgggcuggauuuuagcgagguguccaaugugcagcgccuuaugagaaagcagaaacgggacgauucugaccugaagcgccucagagaucugaaccaagcggucaauaaccugguggaacucaagagcacacagcagaaauccauucugcggguuggaacgcuuaccagcgacgaucugcucacacuggcugccgaccuugagaagcugaaaucuaaggugauccgcaccgaaagaccccucuccagcggcgucuauauggggaaucugucuacacagcaacuggagcagcggcgcgcccuccugaacaugauuggaauggugggcggggcucagggaacccagccuggcagagauggcguugugcgggucugggacgugaaaaauccggaucuucugaacaaucaauucgggacaaugcccucccucacccuggccugucuuacgaagcagggacagguggaccugaacgaugcuguccucgcccugaccgaccugggccucaucuacacagcgaaguauccuaauagcucugaccuggaucgccuuucccaaagccaucccauucugaacaugguugacaccaaaaaguccucucucaauaucagcggguacaacuuuucccugggagccgcugugaaagccggcgcuugcaugcuugaugggggaaauaugcuggagacaaucaaggugaccccucagacgauggacggcauucucaaaagcauccugaaggucaaaaagucucugggcauguucguguccgauacacccggggaaagaaacccuuaugagaacauucucuacaagaucugucugagcggagacggcuggccguauauugccucucggaccagcaucguugggcgcgcgugggaaaauacaaccguggaucuugaguccgacggaaaaccccagaaggucggcucugccgggagcaacaaaucccugcagagcgcuggauuuccuaccggccucacauacucucaacugaugacgcugaaggauuccaugaugcagcuugaccccagcgccaaaaccuggauugauaucgagggcagaccugaagaccccguggagaucgcucucuaccagccgaugucugggugcuauauucacuucuuucgggaaccuacagaccugaagcaguucaagcaagaugccaaauacucccauggaaucgacguugccgaucuguuucccgcucagccuggccucaccagcgcggugauugaggcccugcccagaaauaugguccuuacaugucagggguccgacgauaucaagcgccugcucgacucucagggacggagagauauuaaacugaucgacaucgcucugagcaaggccgauucccgccgguucgaaaacgccgugugggaccaaugcaaagaucuuugucacaugcauaccggcgucgugguugagaagaagaaaagagggggcaaggaggaaauuacgccccacugcgcucucauggacuguaucauguaugaugccgcggugucuggaggccugaauauuccuguccugcgcgcugugcucccgcgggacaugguuuuuagaacaagcucccccaaagugguccugugaggacuagucccuguucccagagcccacuuuuuuuucuuuuuuugaaauaaaauagccugucuuucagaucucaaaggcucuuuucagagccaccaaaaaaaaaaaaaaaaaaaaaaaaaaaaaaaaaaaaaaaaaaaaaaaaaaaaaaaaaaaaaaaaagaauu

SEQ ID NO: 19544 - RNA, 2002 nt, Artificial Sequence
  mRNA product Design a-1 (hSL-A64-N5) comprising derived and/or modified sequence from LASV(Lassa virus/H.sapiens-wt/NGA/2016/ISTH_0017;Clade II)__AVO03568__SP-HsALB_NP(2-569) (opt5)
aggagagucccgcagucggcguccagcggcucugcuuguucgugugugugucguugcaggccuuauucaagcuuaccaugaagugggugaccuucaucagccugcucuuucuguucuccucugccuacagcagcgccuccaaggaggugaaaucuuuccuguggacccagagccucagacgggaacuguccggcuacugcucuagcaucaaacuucaagucguuaaggacgcucaggcccugcuccacgggcuggauuuuuccgaggugucuaacgugcagcgccuuaugagaaagcagaaacgggacgauagcgaccugaagcgccucagagaucugaaucaagcggucaacaaucugguggaacucaaguccacacagcagaaaagcauucugcggguuggaacgcuuaccucugacgaucugcucacacuggcugccgaccuugagaagcugaaauccaaggugauccgcaccgaaagaccccucagcucuggcgucuauauggggaaccuguccacacagcaacuggagcagcggcgcgcccuccugaauaugauuggaauggcuggcggggcccagggaacccagccuggcagagauggcgugguucgggugugggacgucaaaaacccggaucuucugaauaaccaauucgggacaaugcccagccucacccuggcuugucuuacgaagcagggacagguggaccugaaugaugccgugcucgcgcugaccgaccugggccucaucuacacagccaaguauccuaacucuuccgaccuggaucgccuuagccaaucccaucccauucugaauauggucgacaccaaaaagucuagccucaacaucuccggguacaauuuuagccugggagcugccguuaaagcuggcgccugcaugcuugaugggggaaacaugcuggagacaaucaaggugaccccucagacgauggacggcauucucaaaucuauccugaaggugaaaagaucccugggcauguucgucagcgaugcgcccggggaacggaauccuuaugagaacauucucuacaagaucugucugucuggagacggcuggccguauauugccagccgcacauccaucguggggagagcuugggaaaacaccacaguugaucuugagucugacggaaagccccagaaagugggcgccaccgggagcaauaagucccugcagagcgcuggauuuccuaccggccucacauacucucaacugaugacgcugaaagauuccaugaugcagcuugaccccagcgccaagaccuggauugauaucgagggccggccugaagaccccgucgagguggcccucuaccagccgguuucugggugcuauauccacuucuuuagagaaccuacagaccugaaacaguucaagcaagaugcuaaguacucccauggaauugacguggcggaucuguuucccgcccagccuggccucaccagcgcugucaucgaggcccugccccgcaacauggugcuuacaugucagggguccgacgauauuaaaaagcugcucgacucucagggacggaaagauaucaagcugauugacaucgcccugagcaaagcugauuccagacgcuucgaaaaugccgucugggaccaaugcaaggaucuuugucacaugcauaccggcgugguuguggagaagaaaaagagagggggcaaagaggaaaucacgccccacugcgcgcucauggacuguauuauguaugaugcugccgucucuggaggccugaacaucccugugcugcgggccguucucccgcgcgacaugguguuucggacaagcucccccaaggucgugcugugaggacuagucccuguucccagagcccacuuuuuuuucuuuuuuugaaauaaaauagccugucuuucagaucucaaaggcucuuuucagagccaccaaaaaaaaaaaaaaaaaaaaaaaaaaaaaaaaaaaaaaaaaaaaaaaaaaaaaaaaaaaaaaaaagaauu

SEQ ID NO: 19545 - RNA, 2002 nt, Artificial Sequence
  mRNA product Design a-1 (hSL-A64-N5) comprising derived and/or modified sequence from LASV(Lassa virus/H.sapiens-wt/NGA/2018/ISTH_0959;Clade II)__AVV65100__SP-HsALB_NP(2-569) (opt5)
aggagagucccgcagucggcguccagcggcucugcuuguucgugugugugucguugcaggccuuauucaagcuuaccaugaagugggugaccuucaucagccugcucuuucuguucuccucugccuacagcagcgccuccaaggaggugaaaucuuuccuguggacccagagccucagacgggaacuguccggcuacugcucuaacaucaaacuucaagucguuaaggacgcucaggcccugcuccacgggcuggauuuuagcgagguguccaaugugcagcgccuuaugagaaagcagaaacgggacgauucugaccugaagcgccucagagaucugaaccaagcggucaauaaccugguggaacucaagagcacccagcagaaauccauucugcggguuggaacgcuuaccagcgacgaucugcucacacuggcugccgaccuugagaagcugaaaucuaaggugauccgcaccgaaagaccccucuccagcggcgucuauauggggaaucugucuacacagcaacuggagcagcggcgcgcccuccugaaccuuauuggaauggugggcggggcucagggaacccagccuggcagagauggcguugugcgggucugggacgugaaaaauccggaucugcucaacaaucaauucgggacaaugcccucccugacccuugccugucugacgaagcagggacagguggaccucaacgaugucguucuggcucugaccgaccucggccugaucuacacagccaaguauccuaauagcucugaccuugaucgccugucccaaagccaucccauucucaacaugguggacaccaaaaaguccucucugaauaucagcggguuuaacuucucccuuggagcggccgugaaagcuggcgccugcaugcuggaugggggaaauaugcucgagacaaucaaggucaccccucagacgauggacggcauucugaaaagcauccugaaggugaaaaagucucucggcauguuuguuuccgauacacccggggaaagaaacccuuacgagaacauucuguauaagaucugucuuagcggagacggcuggccguacauugcuucucggaccagcaucguggggcgcgccugggaaaauacaaccgucgaucuggaguccgacggaaaaccccacaaggugggcaccgcggggucuaacaaaagccuccaguccgccggauucccuacaggccugacguauagccagcugaugacccuuaaggauucuaugaugcaacucgaccccuccgcuaaaacauggauugauaucgagggcagaccugaagaccccguugagaucgcccuguaccagccgaugagcgggugcuacauucacuuuuuccgggaaccuaccgaccugaagcaguuuaagcaggaugcuaaauauucucauggaaucgacguggccgaucucuuccccgcccaaccuggccugacauccgcugucauugaggcgcuucccagaaauauggugcugaccugucaggggagcgacgauaucaagcgccuccuggacucccagggacggaaagauauuaagcugaucgacaucgcccuuucuaaaacggauagcagacgcuuugaaaacgcugucugggaccagugcaaggaucucugucauaugcacacaggcgugguuguggagaagaaaaagagagggggcaaagaggaaauuacaccccacugcgcccugauggacuguaucauguacgaugccgcugucuccggaggccugaauauuccugugcuccgggccguucugccgcgcgacaugguguuccggaccucuagccccaaggucgugcuuugaggacuagucccuguucccagagcccacuuuuuuuucuuuuuuugaaauaaaauagccugucuuucagaucucaaaggcucuuuucagagccaccaaaaaaaaaaaaaaaaaaaaaaaaaaaaaaaaaaaaaaaaaaaaaaaaaaaaaaaaaaaaaaaaagaauu

SEQ ID NO: 19546 - RNA, 2002 nt, Artificial Sequence
  mRNA product Design a-1 (hSL-A64-N5) comprising derived and/or modified sequence from LASV(LASV003-NIG-2008;Clade II)__AIT17581__SP-HsALB_NP(2-569) (opt5)
aggagagucccgcagucggcguccagcggcucugcuuguucgugugugugucguugcaggccuuauucaagcuuaccaugaagugggugaccuucaucagccugcucuuucuguucuccucugccuacagcagcgccuccaaggaggugaaaucuuuccuguggacccagagccucagacgggaacuguccggcuacugcucuagcaucaaacuucaagucguuaaggacgcucaggcccugcuccacgggcuggauuuuuccgaggugucuaacgugcagcgccuuaugagaaagcagaaacgggacgauagcgaccugaagcgccucagagaucugaaucaagcggucaacaaucugguggaacucaaguccacccagcagaaaagcguucugcgggugggaacgcuuaccucugacgaucugcucacacuggcugccgaccuugagaagcugaaauccaaggucauucgcaccgaaagaccccucagcucuggcguguauauggggaaccuguccgcccagcaacuggagcagcggcgcacacuccugaauaugaucggaaugguuggcggggcucagggaacccagccuggcagagauggcgugguccgggugugggacgugaaaaacccggaucuucugaauaaccaauucgggacaaugcccagccucacccuggccugucuuacgaagcagggacaggucgaccugaaugauguugugcucgcucugaccgaccugggccucauuuacacagccaaguauccuaacucuuccgaccuggaucgccuuagccaaucccaucccauccugucuaugguggacaccaaaaagagcucccucaauauuagcggguacaacuuuucucugggagcggccgucaaagcuggcgccugcaugcuugaugggggaaauaugcuggagacaaucaaggugaccccucagacgauggacggcauccucaaauccauucugaagguuaaaaagagccugggcauguucgugucugauacacccggggaaagaaacccuuaugagaauauccucuacaagauuugucugagcggagacggcuggccguauaucgcuucccggaccucuauugucgggcgcgccugggaaaacacaaccguggaucuugagagcgacggaaaaccccagaagguuggcaccgcgggguccaacaaaagccugcagucugccggauuuccuacaggccucacguacucccaacugaugacccugaaggauagcaugaugcagcuugaccccucugcuaaaacauggaucgauauugagggcagaccugaagaccccguggagaucgcccucuaccagccgauguccgggugcuauauccacuucuuucgggaaccuaccgaccugaagcaguucaagcaagaugcuaaauacagccauggaauugacgucacagaucuguuucccgcccagccuggccucaccuccgccgugaucgaggcucugcccagaaauaugguccuuacgugucaggggucugacgauauuaagcgccugcucgacagccagggacggagagauaucaaacugauugacaucgcgcuguccaaggccgauucucgccgguucgaaaacgcugugugggaccaaugcaaagaucuuugucacaugcauacaggcguuguggucgagaagaagaaaagagggggcaaggaggaaaucacaccccacugcgcccucauggacuguauuauguaugaugccgcugugagcggaggccugaauaucccuguucugcgcgccgugcucccgcgggacauggucuuuagaaccuccagccccaaaguggugcugugaggacuagucccuguucccagagcccacuuuuuuuucuuuuuuugaaauaaaauagccugucuuucagaucucaaaggcucuuuucagagccaccaaaaaaaaaaaaaaaaaaaaaaaaaaaaaaaaaaaaaaaaaaaaaaaaaaaaaaaaaaaaaaaaagaauu

SEQ ID NO: 19547 - RNA, 2002 nt, Artificial Sequence
  mRNA product Design a-1 (hSL-A64-N5) comprising derived and/or modified sequence from LASV(LASV035-NIG-2009;Clade II)__AIT17589__SP-HsALB_NP(2-569) (opt5)
aggagagucccgcagucggcguccagcggcucugcuuguucgugugugugucguugcaggccuuauucaagcuuaccaugaagugggugaccuucaucagccugcucuuucuguucuccucugccuacagcagcgccuccaaggaggugaaaucuuuccuguggacccagagccucagacgggaacuguccggcuacugcucuagcaucaaacuucaagucguuaaagacgcucaggcccugcuccacgggcuggauuuuuccgaggugucuaacgugcagcgccuuaugagaaagcagaaacgggacgauagcgaccugaagcgccucagagaucugaaucaagcggucaacaaucugguggaacucaaguccacacagcagaaaagcauucugcggguuggaacgcuuaccucugacgaucugcucacacuggcugccgaccuugagaagcugaaauccaaggugauccgcaccgaaagaccccucagcucuggcgucuauauggggaaccuguccgcccagcaacuggagcagcggcgcgcucuccugaauaugauuggaauggugggcggggcccagggaacacagccuggcagagauggcguugugcgggucugggacgugaaaaacccggaucuucugaauaaccaauucgggaccaugcccagccucacacuggcuugucuuaccaagcagggacagguggaccugaaugaugccguccucgcgcugacggaccugggccucaucuacaccgccaaguauccuaacucuuccgaccuggaucgccuuagccaaucccaucccauucugaauaugguugacacaaagaagucuagccucaacaucuccggguacaauuuuagccugggagcugccgugaaagcuggcgccugcaugcuugaugggggaaacaugcuggagaccaucaaggugacaccucagaccauggacggcauucucaaaucuauccugaaggucaaaagaucccugggcauguucgugagcgauacgcccggggaacggaauccuuaugagaacauucucuacaagaucugucugucuggagacggcuggccguauauugcgagccgcacauccaucguugggagagccugggaaaacaccacaguggaucuugagucugacggaaagccccagaaagucggcaccaccgggagcaauaagucccugcagagcgcuggauuuccuacaggccucacguacucucaacugaugacccugaaagauuccaugaugcagcuugaccccagcgccaagacauggauugauaucgagggccggccugaagaccccguggagaucgcucucuaccagccgaugucugggugcuauauucacuucuuuagagaaccuaccgaccugaaacaguucaagcaagaugccaaguacucccauggaaucgacguugccgaucuguuucccgcucagccuggccucacaagcgcggugauugaggcccugccccgcaacaugguccuuaccugucagggguccgacgauaucaaaaagcugcucgacucucagggacggagagauauuaaacugaucgacaucgcucugagcaaggccgauucccgcaaauucgaaaaugccgugugggaccaaugcaaggaucuuugucacaugcauacgggcgucgugguugagaagaaaaagagagggggcaaagaggaaauuacaccccacugcgcucucauggacuguaucauguaugaugccgcggugucuggaggccugaacauuccuguccugcgggcugugcucccgcgcgacaugguuuuucggaccagcucccccaaggugguccugugaggacuagucccuguucccagagcccacuuuuuuuucuuuuuuugaaauaaaauagccugucuuucagaucucaaaggcucuuuucagagccaccaaaaaaaaaaaaaaaaaaaaaaaaaaaaaaaaaaaaaaaaaaaaaaaaaaaaaaaaaaaaaaaaagaauu

SEQ ID NO: 19548 - RNA, 2002 nt, Artificial Sequence
  mRNA product Design a-1 (hSL-A64-N5) comprising derived and/or modified sequence from LASV(LASV1000-NIG-2009;Clade II)__AIT17783__SP-HsALB_NP(2-569) (opt5)
aggagagucccgcagucggcguccagcggcucugcuuguucgugugugugucguugcaggccuuauucaagcuuaccaugaagugggugaccuucaucagccugcucuuucuguucuccucugccuacagcagcgccuccaaggaggugaaaucuuuccuguggacccagagccucagacgggaacuguccggcuacugcucuaacaucaaacuucaagucguuaaggacgcucaggcccugcuccacgggcuggauuuuagcgagguguccaaugugcagcgccuuaugagaaagcagaaacgggacgauucugaccugaagcgccucagagaucugaaccaagcggucaauaaccugguggaacucaagagcacacagcagaaauccauucugcggguuggaacgcuuaccagcgacgaucugcucacacuggcugccgaccuugagaagcugaaaucuaaggugauccgcaccgaaagaccccucuccagcggcgucuauauggggaaucugucuacacagcaacuggagcagcggcgcgcccuccugaacaugauuggaauggugggcggggcucagggaacccagccuggcagagauggcguugugcgggucugggacgugaaaaauccggaucuucugaacaaucaauucgggacaaugcccucccucacccuggccugucuuacgaagcagggacagguggaccugaacgaugucguucucgcucugaccgaccugggccucaucuacacagccaaguauccuaauagcucugaccuggaucgccuuucccaaagccaucccauucugaacaugguggacaccaaaaaguccucucucaauaucagcggguacaacuuuucccugggagcggccgugaaagcuggcgccugcaugcuugaugggggaaauaugcuggagacaaucaaggucaccccucagacgauggacggcauucucaaaagcauccugaaggugaaaaagucucugggcauguucguuuccgauacacccggggaaagaaacccuuaugagaacauucucuacaagaucugucugagcggagacggcuggccguauauugcuucucggaccagcaucguggggcgcgccugggaaaauacaaccgucgaucuugaguccgacggaaaaccccagaaggugggcaccgcggggucuaacaaaagccugcaguccgccggauuuccuacaggccucacguacagccaacugaugacccugaaggauucuaugaugcagcuugaccccuccgcuaaaacauggauugauaucgagggcagaccugaagaccccguugagaucgcccucuaccagccggugagcgggugcuauauucacuucuuucgggaaccuaccgaccugaagcaguucaagcaagaugcuaaauacucucauggaaucgacgucgccgaucuguuucccgcccagccuggccucacauccgcugugauugaggcgcugcccagaaauaugguccuuaccugucaggggagcgacgauaucaagcgccugcucgacucccagggacggagagauauuaaacugaucgacaucgcccugucuaaggcugauagccgccgguucgaaaacgccgugugggaccaaugcaaagaucuuugucacaugcauacgggcguuguggucgagaagaagaaaagagggggcaaggaggaaauuacaccccacugcgcccucauggacuguaucauguaugaugcugccguguccggaggccugaauauuccuguucugcgcgcggugcucccgcgggacauggucuuuagaaccucuagccccaaaguggugcugugaggacuagucccuguucccagagcccacuuuuuuuucuuuuuuugaaauaaaauagccugucuuucagaucucaaaggcucuuuucagagccaccaaaaaaaaaaaaaaaaaaaaaaaaaaaaaaaaaaaaaaaaaaaaaaaaaaaaaaaaaaaaaaaaagaauu

SEQ ID NO: 19549 - RNA, 2002 nt, Artificial Sequence
  mRNA product Design a-1 (hSL-A64-N5) comprising derived and/or modified sequence from LASV(LASV221-NIG-2010;Clade II)__AIT17625__SP-HsALB_NP(2-569) (opt5)
aggagagucccgcagucggcguccagcggcucugcuuguucgugugugugucguugcaggccuuauucaagcuuaccaugaagugggugaccuucaucagccugcucuuucuguucuccucugccuacagcagcgccuccaaggaggugaaaucuuuccuguggacccagagccucagacgggaacuguccggcuacugcucuagcaucaaacuucaagucguuaaggacgcucaggcccugcuccacgggcuggauuuuuccgaggugucuaacgugcagcgccuuaugagaaagcagcggcgcgacgauagcgaccugaaaagacuccgggaucugaaucaagcggucaacaaucugguggaacucaaguccacacagcaaaagagcauucugcgcguuggaacgcuuaccucugacgaucugcucacacuggcugccgaccuugagaaacugaaguccaaagugaucagaaccgaacggccccucagcucuggcgucuauauggggaaccuguccacacagcagcuggagcagcgcagagcccuccugaauaugauuggaauggugggcggggcucagggaacccagccuggccgggauggcguugugcgcgucugggacgugaagaacccggaucuucugaauaaccaauucgggacaaugcccagccucacccuggccugucuuacgaaacagggacagguggaccugaaugaugcuguccucgcccugaccgaccugggccucaucuacacagcgaaguauccuaacucuuccgaccuggauagacuuagccaaucccaucccauucugaauaugguugacaccaagaaaucuagccucaacaucuccggguacaauuuuagccugggagccgcugugaaggccggcgcuugcaugcuugaugggggaaacaugcuggagacaaucaaagugaccccucagacggucgacggcauucucaagucuauccugaaagugaagcggucccugggcauguucguuagcgauacacccggggaacgcaauccuuaugagaacauucucuacaaaaucugucugucuggagacggcuggccguauauugccagcagaaccuccaucguggggcgggcgugggaaaacacaaccgucgaucuugagucugacggaaagccccagaaggugggcaccgccgggagcaauaaaucccugcagagcgcuggauuuccuacaggccucacguacucucaacugaugacccugaaggauuccaugaugcagcuugaccccagcgccaaaacauggauugauaucgagggcagaccugaagaccccguugagaucgcucucuaccagccgaugucugggugcuauauucacuucuuucgcgaaccuaccgaccugaagcaguucaaacaagaugccaaguacucccauggaaucgacguggccgaucuguuucccgcucagccuggccucacaagcgcggucauugaggcccugccccggaacauggugcuuaccugucagggguccgacgauaucaagagacugcucgacucucagggacgccgggauauuaaacugaucgacaucgcucugagcaaggccgauuccagaaaauucgaaaaugccgucugggaccaaugcaaggaucuuugucacaugcauacgggcgugguuguggagaaaaagaagcgcgggggcaaagaggaaauuacaccccacugcgcucucauggacuguaucauguaugaugccgcggucucuggaggccugaacauuccugugcugcgggcuguucucccgagagacaugguguuucgcaccagcucccccaaggucgugcugugaggacuagucccuguucccagagcccacuuuuuuuucuuuuuuugaaauaaaauagccugucuuucagaucucaaaggcucuuuucagagccaccaaaaaaaaaaaaaaaaaaaaaaaaaaaaaaaaaaaaaaaaaaaaaaaaaaaaaaaaaaaaaaaaagaauu

SEQ ID NO: 19550 - RNA, 2002 nt, Artificial Sequence
  mRNA product Design a-1 (hSL-A64-N5) comprising derived and/or modified sequence from LASV(LASV237-NIG-2010;Clade II)__AIT17639__SP-HsALB_NP(2-569) (opt5)
aggagagucccgcagucggcguccagcggcucugcuuguucgugugugugucguugcaggccuuauucaagcuuaccaugaagugggugaccuucaucagccugcucuuucuguucuccucugccuacagcagcgccuccaaggaggugaaaucuuuccuguggacccagagccucagacgggaacuguccggcuacugcucuaacaucaaacuucaagucguuaaggacgcucaggcccugcuccacgggcuggauuuuagcgagguguccaaugugcagcgccuuaugagaaagcagaaacgggacgauucugaccugaagcgccucagagaucugaaccaagcggucaauaaccugguggaacucaagagcacacagcagaaauccauucugcggguuggaacgcuuaccagcgacgaucugcucacacuggcugccgaccuugagaagcugaaaucuaaggugauccgcaccgaaagaccccucuccagcggcgucuauauggggaaucugucuacacagcaacuggagcagcggcgcgcccuccugaacaugauuggaauggugggcggggcucagggaacccagccuggcagagauggcguugugcgggucugggacgugaaaaauccggaucuucugaacaaucaauucgggacaaugcccucccucacccuggccugucuuacgaagcagggacagguggaccugaacgaugcuguccucgcccugaccgaccugggccucaucuacacagcgaaguauccuaauagcucugaccuggaucgccuuucccaaagccaucccauucugaacaugguugacaucaaaaaguccucucucaauaucagcggguacaacuuuucccugggagccgcugugaaagccggcgcuugcaugcuugaugggggaaauaugcuggagaccauuaaggugacaccucagaccauggacggcauccucaaaagcauucugaaggucaaaagaucucugggcauguucguguccgauacgcccggggaacggaacccuuaugagaacauccucuacaagauuugucugagcggagacggcuggccguauaucgccucucgcacaagcauuguugggagagcgugggaaaauaccacaguggaucuugaguccgacggaaagccccagaaagucggcucugccgggagcaacaagucccugcagagcgcuggauuuccuaccggccucaccuacucucaacugaugacacugaaagauuccaugaugcagcuugaccccagcgccaagacguggaucgauaucgagggccggccugaagaccccguggagauugcucucuaccagccgaugucugggugcuauauccacuucuuuagagaaccuaccgaccugaaacaguucaagcaagaugccaaguacucccauggaauugacguugccgaucuguuucccgcucagccuggccucacaagcgcggugaucgaggcccugccccgcaauaugguccuuaccugucagggguccgacgauauuaaacggcugcucgacucucagggaagacgcgauaucaagcugaucgacauugcucugagcaaagccgauucccggagauucgaaaacgccgugugggaccaaugcaaggaucuuugucacaugcauacaggcgucgugguugagaaaaagaagcgcgggggcaaagaggaaaucacgccccacugcgcucucauggacuguauuauguaugaugccgcggugucuggaggccugaauaucccuguccugcgggcugugcucccgagagacaugguuuuucgcaccagcucccccaaggugguccugugaggacuagucccuguucccagagcccacuuuuuuuucuuuuuuugaaauaaaauagccugucuuucagaucucaaaggcucuuuucagagccaccaaaaaaaaaaaaaaaaaaaaaaaaaaaaaaaaaaaaaaaaaaaaaaaaaaaaaaaaaaaaaaaaagaauu

SEQ ID NO: 19551 - RNA, 2002 nt, Artificial Sequence
  mRNA product Design a-1 (hSL-A64-N5) comprising derived and/or modified sequence from LASV(LASV253-NIG-2011;Clade II)__AIT17671__SP-HsALB_NP(2-569) (opt5)
aggagagucccgcagucggcguccagcggcucugcuuguucgugugugugucguugcaggccuuauucaagcuuaccaugaagugggugaccuucaucagccugcucuuucuguucuccucugccuacagcagcgccuccaaggaggugaaaucuuuccuguggacccagagccucagacgggaacuguccggcuacugcucuagcaucaaacuucaagucguuaaggacgcucaggcccugcuccacgggcuggauuuuuccgaggugucuaacgugcagcgccuuaugagaaagcagaaacgggacgauagcgaccugaagcgccucagagaucugaaucaagcggucaacaaucugguggaacucaaguccacccagcagaaaagcguucugcgggugggaacgcuuaccucugacgaucugcucacacuggcugccgaccuugagaagcugaaauccaaggucauucgcaccgaaagaccccucagcucuggcguguauauggggaaccuguccacacagcaacuggagcagcggcgcgcccuccugaauaugaucggaaugguuggcggggcucagggaacccagccuggcagagauggcgugguccgggugugggacgugaaaaacccggaucuucugaauaaccaauucgggacaaugcccagccucacccuggccugucuuacgaagcagggacaggucgaccugaaugauguugugcucgcucugaccgaccugggccucauuuacacagccaaguauccuaacucuuccgaccuggaucgccuuagccaaucccaucccauccugaauaugguggacaccaaaaagucuagccucaacauuuccggguacaauuuuagccugggagcggccgucaaagcuggcgccugcaugcuugaugggggaaacaugcuggagacaaucaaggugaccccucagacgauggacggcauccucaaaucuauucugaagguuaaaaagucccugggcauguucgugagcgauacacccggggaaagaaauccuuaugagaacauccucuacaagauuugucugucuggagacggcuggccguauaucgcuagccggaccuccauugucgggcgcgccugggaaaacacaaccguggaucuugagucugacggaaaaccccagaagguuggcaccgcggggagcaauaaaucccugcagagcgccggauuuccuacaggccucacguacucucaacugaugacccugaaggauuccaugaugcagcuugaccccagcgcuaaaacauggaucgauauugagggcagaccugaagaccccguggagaucgcccucuaccagccgaugucugggugcuauauccacuucuuucgggaaccuaccgaccugaagcaguucaagcaagaugcuaaauacucccauggaauugacgucacagaucuguuucccgcccagccuggccucaccagcgccgugaucgaggcucugcccagaaacaugguccuuacgugucagggguccgacgauauuaagcgccugcucgacucucagggacggagagauaucaaacugauugacaucgcgcugagcaaggccgauucccgccgguucgaaaaugcugugugggaccaaugcaaagaucuuugucacaugcauacaggcguuguggucgagaagaagaaaagagggggcaaggaggaaaucacaccccacugcgcccucauggacuguauuauguaugaugccgcugugucuggaggccugaacaucccuguucugcgcgccgugcucccgcgggacauggucuuuagaaccagcucccccaaaguggugcugugaggacuagucccuguucccagagcccacuuuuuuuucuuuuuuugaaauaaaauagccugucuuucagaucucaaaggcucuuuucagagccaccaaaaaaaaaaaaaaaaaaaaaaaaaaaaaaaaaaaaaaaaaaaaaaaaaaaaaaaaaaaaaaaaagaauu

SEQ ID NO: 19552 - RNA, 2002 nt, Artificial Sequence
  mRNA product Design a-1 (hSL-A64-N5) comprising derived and/or modified sequence from LASV(LASV254-NIG-2011;Clade II)__AIT17675__SP-HsALB_NP(2-569) (opt5)
aggagagucccgcagucggcguccagcggcucugcuuguucgugugugugucguugcaggccuuauucaagcuuaccaugaagugggugaccuucaucagccugcucuuucuguucuccucugccuacagcagcgccuccaaggaggugaaaucuuuccuguggacccagagccucagacgggaacuguccggcuacugcucuagcaucaaacuucaagucguuaaggacgcucaggcccugcuccacgggcuggauuuuuccgaggugucuaacgugcagcgccuuaugagaaagcagaaacgggacgauagcgaccugaagcgccucagagaucugaaucaagcggucaacaaucugguggaacucaaguccacacagcagaaaagcguucugcgggugggaacgcuuaccucugacgaucugcucacacuggcugccgaccuugagaagcugaaauccaaggucauucgcaccgaaagaccccucagcucuggcguguauauggggaaccuguccacacagcaacuggagcagcggcgcgcccuccugaauaugaucggaaugguuggcggggcucagggaacccagccuggcagagauggcgugguccgggugugggacgugaaaaacccggaucuucugaauaaccaauucgggacaaugcccagccucacccuggccugucuuacgaagcagggacaggucgaccugaaugaugcuguucucgcccugaccgaccugggccucauuuacacagcgaaguauccuaacucuuccgaccuggaucgccuuagccaaucccaucccauccugaauaugguggacaccaaaaagucuagccucaacauuuccggguacaauuuuagccugggagccgcugugaaagccggcgcuugcaugcuugaugggggaaacaugcuggagacaaucaaggucaccccucagacgauggacggcauccucaaaucuauucugaaggugaaaaagucccugggcauguucguuagcgauacacccggggaaagaaauccuuaugagaacauccucuacaagauuugucugucuggagacggcuggccguauaucgccagccggaccuccauuguggggcgcgcgugggaaaacacaaucgucgaucuugagucugacggaaaaccccagaaggugggcaccgccgggagcaauaaaucccugcagagcgcuggauuuccuaccggccucacauacucucaacugaugacgcugaaggauuccaugaugcagcuugaccccagcgccaaaaccuggauugauaucgagggcagaccugaagaccccguugagaucgcucucuaccagccgaugucugggugcuauauucacuucuuucgggaaccuacagaccugaagcaguucaagcaagaugccaaauacucccauggaaucgacguggccgaucuguuucccgcucagccuggccucaccagcgcggucauugaggcccugcccagaaacauggugcuuacaugucagggguccgacgauaucaagcgccugcucgacucucagggacggagagauauuaaacugaucgacaucgcucugagcaaggccgauucccgccgguucgaaaaugccgucugggaccaaugcaaagaucuuugucacaugcauaccggcgugguuguggagaagaagaaaagagggggcaaggaggaaauuacgccccacugcgcucucauggacuguaucauguaugaugccgcggucucuggaggccugaacauuccugugcugcgcgcuguucucccgcgggacaugguguuuagaacaagcucccccaaagucgugcugugaggacuagucccuguucccagagcccacuuuuuuuucuuuuuuugaaauaaaauagccugucuuucagaucucaaaggcucuuuucagagccaccaaaaaaaaaaaaaaaaaaaaaaaaaaaaaaaaaaaaaaaaaaaaaaaaaaaaaaaaaaaaaaaaagaauu

SEQ ID NO: 19553 - RNA, 2002 nt, Artificial Sequence
  mRNA product Design a-1 (hSL-A64-N5) comprising derived and/or modified sequence from LASV(Nig08-04;Clade II)__ADU56611__SP-HsALB_NP(2-569) (opt5)
aggagagucccgcagucggcguccagcggcucugcuuguucgugugugugucguugcaggccuuauucaagcuuaccaugaagugggugaccuucaucagccugcucuuucuguucuccucugccuacagcagcgccuccaaggaggugaaaucuuuccuguggacccagagccucagacgggaacuguccggcuacugcucuaacaucaaacuucaagucguuaaggacgcucaggcccugcuccacgggcuggauuuuagcgagguguccaaugugcagcgccuuaugagaaagcagaaacgggacgauggagaccugaagcgccucagagaucugaaccaagcggucaauaaccugguggaacucaagucuacccagcagaaaagcguucugcgggugggcacgcuuaccuccgacgaucugcucacacuggcugccgaccuugagaagcugaaaagcaaggucauucgcaccgaaagaccccucucuuccgggguguauaugggaaaucugagcacacagcaacuggagcagcggaaagcccuccugucuaugaucggcaugguugggggagcucagggcacccagccuggccgcgaugggguggucagagugugggacgugaagaacccggaucuucugaauaaccaauucggaacaaugcccucccucacccuggccugucuuacgaagcagggccaggucgaccugaaugaugcuguucucgcccugaccgaccuggggcucauuuacacagcgaaauauccuaacagcucugaccuggaucggcuuucccaaagccaucccauccugaauaugguggacaccaagaaauccucucucaacauuagcggauacaauuuuucccugggcgccgcugugaaggccggggcuugcaugcuugauggaggcaacaugcuggagacaaucaaagucaccccucagacgauggacggcauccucaagagcauucugaaagugaagcgcucucuggggauguucguuuccgauacacccggagaaagaaauccuuaugagaacauccucuacaagauuugucugagcggcgacggguggccguauaucgccucucggaccagcauugugggacgcgcgugggaaaacacaaccgucgaucuugaguccgacggcaaaccccagaagguggggaccgccggaucuaauaaaagccugcaguccgcuggcuuuccuacaggccucacguacagccaacugaugacccugaaggauucuaugaugcagcuugaccccuccgccaaaacauggaucgauauugaggggagaccugaagaccccguugagaucgcucucuaccagccgaugagcggaugcuauauccacuucuuucgggaaccuaccgaccugaagcaguucaagcaagaugccaaauacucucauggcauugacgugacagaucuguuuuccgcccagcccgggcucaccagcgcugucaucgaggcgcugccuagaaacauggugcuuacgugucagggauccgacgauauuaagaaacugcucgacucucagggccgccgggauaucaagcugauugacaucagccugaauaaagccgauuccagacgcuucgaaaacgcugucugggaccaaugcaaggaucuuugucacaugcauacaggggugguuguggagaagaaaaagcggggcggaaaagaggaaaucacaccccacugcgcccucauggacuguauuauguuugaugccgcugucucuggcgggcugaauauccccauucugagagccgugcucccucgcgacaugguuuuccggaccagcuccccgaaggugguccugugaggacuagucccuguucccagagcccacuuuuuuuucuuuuuuugaaauaaaauagccugucuuucagaucucaaaggcucuuuucagagccaccaaaaaaaaaaaaaaaaaaaaaaaaaaaaaaaaaaaaaaaaaaaaaaaaaaaaaaaaaaaaaaaaagaauu

SEQ ID NO: 19554 - RNA, 2005 nt, Artificial Sequence
  mRNA product Design a-1 (hSL-A64-N5) comprising derived and/or modified sequence from LASV(GA391;Clade III)__AAA46284__SP-HsALB_NP(2-570) (opt5)
aggagagucccgcagucggcguccagcggcucugcuuguucgugugugugucguugcaggccuuauucaagcuuaccaugaagugggugaccuucaucagccugcucuuucuguucuccucugccuacagcagcgccuccaaggaggugagaucuugccuguggacccagagccuccggcgcgaacuguccggcuacuguucuaacaucaaacuucaagucguuaaggacgcucaggcccugcuccacgggcuggauuucagcgagguguccaaugugcagagacuuaugcggaaacagaagcgcgacgauggagaccugaaaagacuccgggaucugaaccaagcggucaauaaccugguggaacucaagucuacacagcagaaaagcguucugcgcgugggcacgcuuuccagcgacgaucugcucauucuggcugccgaccuugagaaacugaagucuaaagucaccagaacagaacggccccucuccagcgggguguauaugggaaaucugucuucccagcaacuggaucagcgcagagcccuccugaacaugaucggcaugaccgggguuagcggaggcggcaagggggcuucuaauggaauugugcgggucugggacgugaaaaacgccgagcuucugaauaaccaguuuggcacaaugccuucccucacccuggcuugccuuacaaagcaggggcaaguggaucugaaugacgccguccaggcgcucaccgaucugggacugaucuacacggccaaguauccgaacagcuccgaccucgaccgccugucucagagccaucccauucuuaauaugaucgauaccaaaaaguccagccugaacaucucuggcuacaauuucucccucggggcugccguuaaagcuggagccuguaugcuggacggcggcaacaugcuugagacaauuaaggugagcccucaaaccauggaugggauccugaaaucuauucucaaggugaaaaagagccugggaauguuugucuccgacacacccggcgaaagaaacccuuaugagaauauccuguacaagauuugccucucuggggauggauggagcuauaucgcgucccggaccagcauugugggccgcgccugggaaaacacgguuguggaccuggagcaggauaauaaaccccagaagaucgggaacggaggcucuaauaaaucccuucagagcgcuggcuucgccgcugggcugaucuacucucaacucaugacacugaaggacuuuaaauguuucaaccugauuccuaaugccaagaccuggauggauaucgagggaagaccggaagaccccgucgagauugcccuuuaccagccuuccagcggcugcuaugugcacuuuuuccgggaacccacagaucucaagcaguuuaaacaggacgcuaaguacucccaugggagagacguuaccgaucuguucgcggcccaaccuggacugaccucugcugugaucgaggcccucccccgcaacauggucauuacaugucagggcagcgaagacauccggaaacugcuugagucccaggggagacgcgauaucaagcugauugacaucacgcucucuaaagccgauagccggaaguuugagaaugcugugugggaccaguucaaggaucugugccacaugcauaccggcgucgugguugaaaagaagaaaagaggaggcaaggaggaaauuacaccgcacugugcccugauggacugcaucauguuugaugcggcuguguccgggggacuugacgccaaaguccuccgcgugguucugccucgggauaugguguucagaaccagcacacccaaggucgugcugugaggacuagucccuguucccagagcccacuuuuuuuucuuuuuuugaaauaaaauagccugucuuucagaucucaaaggcucuuuucagagccaccaaaaaaaaaaaaaaaaaaaaaaaaaaaaaaaaaaaaaaaaaaaaaaaaaaaaaaaaaaaaaaaaagaauu

SEQ ID NO: 19555 - RNA, 2002 nt, Artificial Sequence
  mRNA product Design a-1 (hSL-A64-N5) comprising derived and/or modified sequence from LASV(Nig08-A19;Clade III)__ADU56619__SP-HsALB_NP(2-569) (opt5)
aggagagucccgcagucggcguccagcggcucugcuuguucgugugugugucguugcaggccuuauucaagcuuaccaugaagugggugaccuucaucagccugcucuuucuguucuccucugccuacagcagcgccuccaaggaggugaaaucuuuccuguggacccagagccucagacgggaacuguccggcuacugcucuaacaucaaacuucaagucguuaaggacgcucaggcccugcuccacgggcuggauuuuagcgagguguccaaugugcagcgccuuaugagaaagcagaaacgggacgauggagaccugaagcgccucagagaucugaaccaagcggucaauaaccugguggaacucaagucuacacagcagaaaagcguucugcgggugggcacgcuuuccagcgacgaucugcucguccuggcugccgaccuugagaagcugaaaucuaaggugguucgcaccgaaagaccccucuccagcgggauuuauaugggaaaucugucuucccagcaacuggaucagcggaaagcccuccugaacaugaucggcaugacagggggaaauggcggccgcaacaccacaagcgacgggauugugagagucugggaugugaagaaugcugagcuucugaacaaucaguucggaaccaugccuucucucacacuggccugucuuaccaagcagggccaaguggaccugaacgaugcuguccaggcccucacggaccuggggcugaucuacaccgcgaaauaucccaauuccagcgaccucgaucggcuggcccagucccauccgauucuuaacaugaucgacacaaagaaaucuagccugaauaucuccggauacaacuuuagccucggcgcugccguuaaggcuggggccugcaugcuggauggaggcaacaugcuugagaccauuaaagugucuccucaaacaauggacggcauccugaaguccauucucaaagugaagcgcagccuggggauguucaucucugauacccccggagaaagaaauccuuaugagaacauucuguacaagaucugucucagcggcgacggguggcccuauauugcgucccggacgucuaucgucggacgcgccugggaaaauacagugguugaucuggagagcgacaacaaaccucagaagaccggcaaugggggauccaacaaaagccuucagucugcuggcuuugccgcuggccugacauacucccagcucaugacccugaaggauagcaugcugcaacuugacccgaaugccaaaaccuggauggauaucgaggggagacccgaagacccuguggagauugcccucuaccagcccucuuccggaugcuauauccacuucuuucgggaaccuacagaccugaagcaguucaagcaggaugcuaaauacagccauggcauugacgucacggaucuguuugcggcccaacccgggcucaccuccgcugugaucgaggcccugccgagaaacaugguuauuacaugucagggaucugaagacauccgcaaacuucuggagagccagggccggagagauaucaagcucauugacaucucccugucuaagguggauagccgcaaauucgagaaugccgucugggaccaguuuaaggaucugugccacaugcauaccgggauuguggucgaaaagaaaaagcggggcggaaaagaggaaaucacaccucacugugcucuuauggacugcauuauguucgaugccgcgguguccggcgggguugacgcuaaggugcucagagccguccugccccgcgauaugguguuucggaccagcacgccuaaaguugugcugugaggacuagucccuguucccagagcccacuuuuuuuucuuuuuuugaaauaaaauagccugucuuucagaucucaaaggcucuuuucagagccaccaaaaaaaaaaaaaaaaaaaaaaaaaaaaaaaaaaaaaaaaaaaaaaaaaaaaaaaaaaaaaaaaagaauu

SEQ ID NO: 19556 - RNA, 2002 nt, Artificial Sequence
  mRNA product Design a-1 (hSL-A64-N5) comprising derived and/or modified sequence from LASV(G1180-SLE-2010;Clade IV)__AIT17169__SP-HsALB_NP(2-569) (opt5)
aggagagucccgcagucggcguccagcggcucugcuuguucgugugugugucguugcaggccuuauucaagcuuaccaugaagugggugaccuucaucagccugcucuuucuguucuccucugccuacagcagcgccuccaaggagaucaaaucuuuccuguggacccagagccucagacgggaacuguccggcuacugcucuaacauuaagcugcaaguggucaaagacgcucaggcccugcuccacgggcuggauuuuagcgagguuuccaaugugcagcgccuuaugagaaaggaacggcgcgacgauaacgaccugaaaagacuccgggaucugaaucaggcggugaacaaucuggucgagcucaagucuacacaacaaaagagcauccugcgcgugggaacgcuuaccuccgacgaucugcucauucuggcugccgaccuugaaaaacuuaagagcaaaguuaucagaacagagcggccccucucugccggcguguauauggggaaccuguccagccagcagcuggaucagcgcagagcucuccugucuaugauuggaauguccagcggcaaucagcgggcccaggcugggcgcgacggagucgugagaguuugggaugugaagaacgucgagcuucugaauaaccaguucggcaccaugccuucucucacacuggccugucuuaccaaacaaggccagguggaccugaaugaugcggugcaggcccucacagaccuggggcugaucuacaccgcuaaguauccgaacacguccgaccucgaucggcugacccaaagccaucccauccuuaauaugauugacacaaagaaauccucucugaacaucagcggauacaauuuuucccucggcgccgcugucaaggccggggcgugcaugcuggauggaggcaacaugcuugaaaccauuaaaguuagcccucagacaauggacgggauccugaagucuauucucaaagugaagaaagcccugggaauguucaucuccgauacccccggcgagcgcaacccuuaugaaaauauucuguacaagaucugucucagcggcgacggguggcccuauaucgcuucuagaacgagcauuacaggacgggccugggagaacaccguggucgaucuggaguccgacggcaagccucagaaagcugggucuaauaacagcaauaagucccuucagagcgugggauuuacagccggccugaccuacucucaacucaugacccugaaagaugccaugcugcagcuugacccgaacgcuaagacauggauggauaucgaagggagacccgaggacccuguugaaauugcgcucuaccagcccuccagcggaugcuauauccacuucuuucgcgagccuacggaccugaaacaguucaagcaagaugccaaguacucucauggcauugacgugaccgaucuguuugcugcccagcccggccucacauccgccgucaucgacgcucugccgcggaauauggugaucaccugucaggggagcgaugacauuagaaaacuucuggaaucccagggacgcaaggauaucaaacucauugacaucgcccugucuaagacagauagccggaaauaugagaacgcgguuugggaccaauacaaggaucugugccacaugcauaccggcguggucguggagaagaaaaagagagggggaaaagaagagauuacgccucacugugcucuuauggacugcaucauguucgaugccgccgucuccggcgggcucaauacaucugugcugcgcgcuguucugccccgggacaugguguuuagaaccagcaccccucgcgucgugcucugaggacuagucccuguucccagagcccacuuuuuuuucuuuuuuugaaauaaaauagccugucuuucagaucucaaaggcucuuuucagagccaccaaaaaaaaaaaaaaaaaaaaaaaaaaaaaaaaaaaaaaaaaaaaaaaaaaaaaaaaaaaaaaaaagaauu

SEQ ID NO: 19557 - RNA, 2002 nt, Artificial Sequence
  mRNA product Design a-1 (hSL-A64-N5) comprising derived and/or modified sequence from LASV(G1442-SLE-2011;Clade IV)__AIT17181__SP-HsALB_NP(2-569) (opt5)
aggagagucccgcagucggcguccagcggcucugcuuguucgugugugugucguugcaggccuuauucaagcuuaccaugaagugggugaccuucaucagccugcucuuucuguucuccucugccuacagcagcgccuccaaggaggugaaaucuuuccuguggacccagagccucagacgggaacuguccggcuacugcucuaacaucaaacuucaagucguuaaggacgcucaggcccugcuccacgggcuggauuuuagcgagguguccaaugugcagcgccuuaugagaaagcagcggcgcgacgauaacgaccugaaaagacuccgggaucugaaucaagcggucaacaaucugguggaacucaagucuacacagcaaaagagcguucugcgcgugggaacgcuuaccuccgacgaucugcucguccuggcugccgaccuugagaaacuuaagagcaaagugauuagaacagaacggccccucucugccggcguuuauauggggaaccuguccagccagcagcuggaucagcgcagagcucuccugaauaugaucggaaugucuggcgggauucagggaacccggacaggccgcgacggcguggucagagugugggaugugaagaacgccgaccuucugaauaaccaguucgggaccaugccuucccucacacuggcuugucuuaccaaacaaggacaggucgaucugaaugacguugugcaggcccucacggaccugggccugaucuacaccgcgaaguauccgaacgccagcgaucucgaccggcugacacaaucucaucccauucuuaauaugaucgauaccaagaaauccagccugaacaucuccggguacaauuuuucucucggagcugccgugaaggcuggcgccugcaugcuggacgggggaaacaugcuugagacaauuaaagucagcccucagaccauggauggcauccugaaguccauucucaaagugaagaaaacgcugggcauguucaucagcgacacacccggggagcgcaacccuuaugaaaauauucuguacaagaucugucucucuggagauggcuggcccuauauugcguccagaaccagcaucacagggcgggccugggagaacaccguuguggaccuggaaucugauggaaagccucagaaagcuggcagcaauaacuccaauaagucucuucagagcgccggguuugcugccggacugaccuacucccaacucaugacacugaaagacgccaugcugcagcuugauccgaacgcuaagacguggauggacaucgagggcagacccgaggacccugucgaaauugcgcucuaccagcccagcucuggcugcuauauccacuucuuucgcgagccuaccgaucugaaacaguucaagcaagacgccaaguacucccaugggauugaugugacagaccuguuugcugcccagcccggacucaccagcgccguuaucgaagcucugccgcggaauauggugauuacaugucagggcucugaugacaucaaaaagcugcuggagucccaggggagaaaagauaucaagcucauugacaucgcccugagcaaaaccgauucccgcaaguaugaaaacgcggucugggaccaauacaaggaucugugccacaugcauacgggaguggucguggagaaaaagaaacggggcgggaaggaggaaauuacaccucacugugcucuuauggacugcaucauguucgaugccgccguuucuggcggacucaauacccuggugcugagagcuguccucccccgcgacaugguguuucggaccagcacaccuagaguugugcugugaggacuagucccuguucccagagcccacuuuuuuuucuuuuuuugaaauaaaauagccugucuuucagaucucaaaggcucuuuucagagccaccaaaaaaaaaaaaaaaaaaaaaaaaaaaaaaaaaaaaaaaaaaaaaaaaaaaaaaaaaaaaaaaaagaauu

SEQ ID NO: 19558 - RNA, 2002 nt, Artificial Sequence
  mRNA product Design a-1 (hSL-A64-N5) comprising derived and/or modified sequence from LASV(G3010-SLE-2013;Clade IV)__AIT17345__SP-HsALB_NP(2-569) (opt5)
aggagagucccgcagucggcguccagcggcucugcuuguucgugugugugucguugcaggccuuauucaagcuuaccaugaagugggugaccuucaucagccugcucuuucuguucuccucugccuacagcagcgccuccaaggagaucaaaucuuuccuguggacccagagccucagacgggaacuguccggcuacugcucuaacauuaaacuucaaguggucaaagacgcucaggcccugcuccacgggcuggauuuuagcgagguuuccaaugugcagcgccuuaugagaaaggaacggcgcgacgauaacgaccugaaaagacuccgggaucugaaucaggcggugaacaaucuggucgagcucaagucuacacaacaaaagagcauccugcgcgugggaacgcuuaccuccgacgaucugcucauucuggcugccgaccuugaaaaacuuaagagcaaaguuacaagaaccgagcggccccucucugccggcguguauauggggaaccuguccagccagcagcuggaucagcgcagagcucuccugucuaugaucggaauguccagcggcguccagggggcccgggcuggacgcgacggcgugguuagagugugggaugucaagaaugccgagcuucugaacaaucaguucggcacaaugccuucucucacccuggcgugucuuacaaaacaggggcaaguggaccugaacgaugugguccaggcccucaccgaccugggacugauuuacacggcuaaguauccgaauaccuccgaccucgaucggcugacacagagccaucccauccuuaacaugaucgacaccaagaaauccucucugaauauuagcggcuacaacuuuucccucggggccgcuguuaaggccggagcgugcaugcuggauggcgggaauaugcuugaaacaaucaaagugagcccucaaaccauggacggcauucugaagucuauccucaaagugaagaaagcccugggaauguucauuuccgagacgcccggcgaacgcaacccuuaugagaacauccuguacaagauuugucucagcggggauggauggcccuauaucgcuucuagaacaagcaucaccggccgggccugggagaauacagucguggaccuggaauccgaugggaagccucagaaagcuggaucuaacaauagcaacaagucccuucagagcgccggcuuuaccgccgggcugaccuacucucagcucaugacacugaaagacgcuaugcugcaacuugauccgaaugcgaagacguggauggacauugagggaagacccgaagauccuguugagguggcccucuaccagcccuccagcggcugcuauauccacuucuuucgcgaaccuaccgaccugaaacaguucaagcaggacgcuaaguacucucauggcauugaugucacagaccuguuugccgcccaacccgggcucaccuccgcugugaucgaugcccugccgcggaacaugguuauuacaugucagggaagcgacgauaucaaaaagcugcuggagucccagggcagaaaagacaucaagcucauugauaucgcgcugucuaaaaccgacagccgcaaguaugagaaugcugugugggaucaguacaaggaccugugccacaugcauacgggggucguggucgaaaagaagaaacggggaggcaaggaggaaauuacaccucacugugcccuuauggauugcaucauguucgacgccgcuguguccgggggccucaacaccucuguucugagagccgugcugccccgcgauauggucuuucggaccagcacaccuagagugguucucugaggacuagucccuguucccagagcccacuuuuuuuucuuuuuuugaaauaaaauagccugucuuucagaucucaaaggcucuuuucagagccaccaaaaaaaaaaaaaaaaaaaaaaaaaaaaaaaaaaaaaaaaaaaaaaaaaaaaaaaaaaaaaaaaagaauu

SEQ ID NO: 19559 - RNA, 2002 nt, Artificial Sequence
  mRNA product Design a-1 (hSL-A64-N5) comprising derived and/or modified sequence from LASV(G502-SLE-2009;Clade IV)__AIT17127__SP-HsALB_NP(2-569) (opt5)
aggagagucccgcagucggcguccagcggcucugcuuguucgugugugugucguugcaggccuuauucaagcuuaccaugaagugggugaccuucaucagccugcucuuucuguucuccucugccuacagcagcgccuccaaggagaucaaaucuuuccuguggacccagagccucagacgggaacuguccggcuacugcucuaacauuaagcugcaaguggucaaagacgcucaggcccugcuccacgggcuggauuuuagcgagguuuccaaugugcagcgccuuaugagaaaggaacggcgcgacgauaacgaccugaaaagacuccgggaucugaaucaggcggugaacaaucuggucgagcucaagucuacacaacaaaagagcauccugcgcgugggaacgcuuaccuccgacgaucugcucauucuggcugccgaccuugaaaaacuuaagagcaaaguuaucagaacagagcggccccucucugccggcguguauauggggaaccuguccagccagcagcuggaucagcgcagagcucuccugucuaugauuggaauguccggcgggaaucagggaguccgggccggcaaggacggcgugguucgcgugugggaugucaaaaacgcugagcuucugaauaaccaguucgggaccaugccuagccucacacuggccugucuuaccaagcagggacaaguggaccugaaugaugcggugcaggcccucacagaccugggccugaucuacaccgcuaaguauccgaacacgucugaccucgauagacugacccagucccaucccauccuuaauaugauugacaccaaaaagagcucccugaacaucucuggguacaauuuuagccucggagccgcugucaaagccggcgcgugcaugcuggaugggggaaacaugcuugaaacaauuaagguuuccccucaaacaauggacggcauccugaaaagcauucucaaggugaaaaaggcccugggcauguucaucucugauacccccggggagcggaacccuuaugaaaauauucuguacaagaucugucucuccggagacggcuggcccuauaucgcuagccgcacgucuauuacagggagagccugggagaacaccguggucgaucuggagagcgacggaaaaccucagaaggcuggcuccaauaacucuaauaaaagccuucaguccgccggguuuacagccggacugaccuacagccagcucaugacccugaaggaugcuaugcugcaacuugacccgaacacaaaaacguggauggauaucgaaggccggcccgaggacccuguggaaauugcgcucuaccagcccucuuccggcugcuauauccacuucuuuagagagccuaccgaccugaagcaguucaagcaggaugccaaauacagccaugggauugacguuacagaucuguuugcugcccaacccggacucaccucugccgugaucgacgcucugccgcgcaauauggucaucacaugucagggcuccgaugacauucggaaacuucuggaaagccaggggagaaaggauaucaagcucauugacaucgcccugaacaaaaccgauucccgcaaguaugagaaugcggugugggaccaguacaaggaucugugccacaugcauacgggaguuguggucgagaaaaagaaacggggcgggaaggaagagauuacaccucacugugcucuuauggacugcaucauguucgaugccgccgugucuggcggacucaacaccagcguccugagagcugugcugccccgcgacaugguuuuucggaccuccacaccuagagugguccucugaggacuagucccuguucccagagcccacuuuuuuuucuuuuuuugaaauaaaauagccugucuuucagaucucaaaggcucuuuucagagccaccaaaaaaaaaaaaaaaaaaaaaaaaaaaaaaaaaaaaaaaaaaaaaaaaaaaaaaaaaaaaaaaaagaauu

SEQ ID NO: 19560 - RNA, 2002 nt, Artificial Sequence
  mRNA product Design a-1 (hSL-A64-N5) comprising derived and/or modified sequence from LASV(G733-SLE-2010;Clade IV)__AIT17155__SP-HsALB_NP(2-569) (opt5)
aggagagucccgcagucggcguccagcggcucugcuuguucgugugugugucguugcaggccuuauucaagcuuaccaugaagugggugaccuucaucagccugcucuuucuguucuccucugccuacagcagcgccuccaaggagaucaaaucuuuccuguggacccagagccucagacgggaacuguccggcuacugcucuaacauuaagcugcaaguggucaaagacgcucaggcccugcuccacgggcuggauuuuagcgagguuuccaaugugcagcgccuuaugagaaaggaacggcgcgacgauaacgaccugaaaagacuccgggaucugaaucaggcggugaacaaucuggucgagcucaagucuacacaacaaaagagcgugcugcgcguuggaacgcuuaccuccgacgaacugcucgugcuggcugccgaucuugagaaacuuaagagcaaagucaucagaacagagcggccccucucugccggcguguauauggggaaccuguccagccagcagcuggaccagcgcagagcucuccugucuaugauuggaauguccggcgggaaucagggagcccggaccggccgcgauggcguugugagagucugggacgugaagaacgcugaacuucugaauaaccaguucgggacaaugccuagccucacccuggccugucuuacaaaacagggacaaguggaucugaaugacgcgguccaggcccucaccgaucugggccugaucuacacggcuaaguauccgaacaccucugaccucgaccggcugacacagucccaucccauucuuaauaugaucgauaccaagaaaagcucccugaacaucucuggguacaauuuuagccucggagccgcuguuaaggccggcgcgugcaugcuggacgggggaaacaugcuugagacaauuaaaguguccccucaaaccauggauggcauccucaagagcauucugaaagugaagaaagcccugggcauguucaucucugacacgcccggggaacgcaacccuuaugagaauauucuguacaagaucugucucuccggagauggcuggcccuauauugcuagcagaacaucuaucaccgggcgggccugggagaacacagucguggaccuggaaagcgauggaaagccucagaaagcuggcuccaauaacucuaauaagagccuucaguccgccggguuuaccgccggacugaccuacagccagcucaugacacugaaagacgcuaugcugcaacuugauccgaacgcgaagacguggauggacaucgagggcagacccgaagauccuguugagauugcccucuaccagcccucuuccggcugcuauauccacuucuuucgcgaaccuaccgaccugaaacaguucaagcaggacgcuaaguacagccaugggauugaugugacagaccuguuugccgcccaacccggacucaccucugcugucaucgaugcccugccgcggaauauggugauuacaugucagggcuccgacgauaucagaaaacuucuggagagccaggggcgcaaggacaucaaacucauugauaucgcgcuguccaagauugacucucggaaauaugagaacgcuguuugggaucaguacaaggaccugugccacaugcauaccggaguggucguggaaaagaaaaagagaggcgggaaagaggaaaucacgccucacugugcccuuauggauugcauuauguucgacgccgcugucagcggcggacucaauucccuggugcugcgcgccguucucccccgggauaugguguuuagaacaucuaccccucgcgucgugcugugaggacuagucccuguucccagagcccacuuuuuuuucuuuuuuugaaauaaaauagccugucuuucagaucucaaaggcucuuuucagagccaccaaaaaaaaaaaaaaaaaaaaaaaaaaaaaaaaaaaaaaaaaaaaaaaaaaaaaaaaaaaaaaaaagaauu

SEQ ID NO: 19561 - RNA, 2002 nt, Artificial Sequence
  mRNA product Design a-1 (hSL-A64-N5) comprising derived and/or modified sequence from MOPV/LASV reassortant(IGS-1;Clade IV)__AFY05578__SP-HsALB_NP(2-569) (opt5)
aggagagucccgcagucggcguccagcggcucugcuuguucgugugugugucguugcaggccuuauucaagcuuaccaugaagugggugaccuucaucagccugcucuuucuguucuccucugccuacagcagcgccuccaaggagaucaaaucuuuccuguggacccagagccucagacgggaacuguccggcuacugcucuaacauuaaacuucaaguggucaaggacgcucaggcccugcuccacgggcuggauuuuagcgagguuuccaaugugcagcgccuuaugagaaaggaacggcgcgacgauaacgaccugaaaagacuccgggaucugaaucaggcggugaacaaucuggucgagcucaagucuacacaacaaaagagcauccugcgcgugggaacgcuuaccuccgacgaucugcucauucuggcugccgaccuugaaaaacugagaagcaagguuauccggacagagcgcccccucucugccggcguguauauggggaaccuguccagccagcagcuggaucagagacgggcucuccugaauaugauuggaaugucuggcgggaaccagggagcccgcgcuggcagagacggcgucgugcggguuugggaugugaaaaaugccgagcuucuguccaaccaguucgggaccaugccuagccucacacuggcgugucuuaccaagcagggacaagucgaccugaaugaugccgugcaggcucucacagaccugggccugaucuacaccgccaaauauccgaacacgucugaccucgaucgccugacccagucccaucccauccuuaauaugauugacacaaagaaaagcucccugaacaucucuggguacaauuuuagccucggagcugccgugaaggcgggcgccugcaugcuggaugggggaaacaugcuugaaaccauuaaggucuccccucaaacaauggacggcauccugaaaagcauucucaagguuaaaaaggcucugggcauguucaucucugauacccccggggagagaaacccuuaugaaaauauucuguacaaaaucugucucuccggagacggcuggcccuauaucgccagccggacgucuauuacagggagagcuugggagaacaccgugguggaucuggagagcgacggaaagccucagaaggccgauuccaauaacucuagcaaaucccuucagagcgccggcuuuacagcugggcugaccuacucucagcucaugacccugaaggacgcgaugcugcaacuugauccgaaugccaaaacauggauggacaucgaaggacgccccgaggacccugucgaaauugcucucuaccagcccuccagcggcugcuauauccacuucuuucgggagccuacggaucugaagcaguucaaacaggacgccaaguacucucauggcauugaugugaccgaccuguuugccacacaacccgggcucaccuccgcuguuaucgaugcccugccgagaaacauggugaucacaugucagggaagcgacgauauucgcaaacuucuggaaucccagggccggaaggacaucaagcucauugauaucgaccugucuaaaaccgauagcagaaaguaugagaaugcggucugggaccaguacaaagaucugugccacaugcauacgggggugguuguggagaagaagaaacgcggaggcaaggaagagauuacaccucacugugcucuuauggacugcaucauguucgacgccgccgucuccgggggccucaacaccucugugcugcgggcuguccugcccagagauaugguguuucgcaccagcacaccucggguugugcucugaggacuagucccuguucccagagcccacuuuuuuuucuuuuuuugaaauaaaauagccugucuuucagaucucaaaggcucuuuucagagccaccaaaaaaaaaaaaaaaaaaaaaaaaaaaaaaaaaaaaaaaaaaaaaaaaaaaaaaaaaaaaaaaaagaauu

SEQ ID NO: 19562 - RNA, 2002 nt, Artificial Sequence
  mRNA product Design a-1 (hSL-A64-N5) comprising derived and/or modified sequence from LASV(LM765-SLE-2012;Clade IV)__AIT17815__SP-HsALB_NP(2-569) (opt5)
aggagagucccgcagucggcguccagcggcucugcuuguucgugugugugucguugcaggccuuauucaagcuuaccaugaagugggugaccuucaucagccugcucuuucuguucuccucugccuacagcagcgccuccaaggagaucaaaucuuuccuguggacccagagccucagacgggaacuguccggcuacugcucuaacauuaagcugcaaguggucaaagacgcucaggcccugcuccacgggcuggauuuuagcgagguuuccaaugugcagcgccuuaugagaaaggaacggcgcgacgauaacgaccugaaaagacuccgggaucugaaucaggcggugaacaaucuggucgagcucaagucuacacaacaaaagagcauccugcgcgugggaacgcuuaccuccgacgaucugcucauucuggcugccgaccuugaaaaacuuaagagcaaaguuacaagaaccgagcggccccucucugccggcguguauauggggaaccuguccagccagcagcuggaucagcgcagagcucuccuggacaugaucggaaugucuggcuccaaucagggggcccgggcuggacgcgauggcgucgugagaguuugggacgugaagaacgccgagcuucugaauaaccaguucggcacaaugccuagccucacccuggcgugucuuacaaaacaggggcaagucgaucugaaugacgccgugcaggcucucaccgaccugggacugauuuacacggccaaguauccgaacaccucugaucucgaccggcugacacagucccaucccauccuuaauaugaucgauaccaagaaaagcucccugaacauuucuggcuacaauuuuagccucggggcugccgugaaggcgggagccugcaugcuggacggcgggaacaugcuugaaacaaucaaagucuccccucaaaccauggauggcauucucaagagcauccugaaaguuaagaaagcucugggaauguucauuucugacgcccccggcgagcgcaacccuuaugaaaauauccuguacaagauuugucucuccggggauggauggcccuauaucgcuagcagaacgucuaucacaggccgggccugggagaacaccgugguggaccuggagagcgaugggaagccucagaaagccggauccaauggcucuaacaagagccuucaguccgcuggguuuacagcgggacugaccuacagccagcucaugacccugaaagacgccaugcugcaacuugauccgaaugcuaagacauggauggacauugaaggcagacccgaggacccugucgaaaucgcccucuaccagcccucuuccggcugcuauauucacuucuuucgcgagccuacggaucugaaacaguucaagcaggacgccaaguacagccaugggaucgaugugaccgaccuguuugcugcccaacccggacucacaucugcgguuauugaugcucugccgcggaacauggugaucaccugucagggcuccgacgauaucagaaaacuuuucgaaagccaggggcgcaaggacauuaaacugaucgauauugcccucuccaagacagacucucggaaauaugagaaugccgucugggaucaguacaaggaccugugccacaugcauaccggaaucgugguugagaagaaaaagagaggcgggaaagaagagauuacgccucacugugcucugauggauugcaucauguuugacgccgcugugagcggcggacuuaacacauccguccuccgcgccgugcugccccgggacauggucuucagaaccucuaccccucgcgugguucugugaggacuagucccuguucccagagcccacuuuuuuuucuuuuuuugaaauaaaauagccugucuuucagaucucaaaggcucuuuucagagccaccaaaaaaaaaaaaaaaaaaaaaaaaaaaaaaaaaaaaaaaaaaaaaaaaaaaaaaaaaaaaaaaaagaauu

SEQ ID NO: 19563 - RNA, 2002 nt, Artificial Sequence
  mRNA product Design a-1 (hSL-A64-N5) comprising derived and/or modified sequence from LASV(LM776-SLE-2012;Clade IV)__AIT17825__SP-HsALB_NP(2-569) (opt5)
aggagagucccgcagucggcguccagcggcucugcuuguucgugugugugucguugcaggccuuauucaagcuuaccaugaagugggugaccuucaucagccugcucuuucuguucuccucugccuacagcagcgccuccaaggagaucaaaucuuuccuguggacccagagccucagacgggaacuguccucuuacugcagcaacauuaaacuucaaguggucaaggacgcucaggcccugcuccacggccuggauuuuuccgagguuucuaaugugcagcgccuuaugagaaaggaacggcgcgacgauaacgaccugaaaagacuccgggaucugaaucaggcggugaacaaucuggucgagcucaagagcacacaacagaaguccauccugcgcguggggacgcuuaccagcgacgaucugcucauucuggcugccgaccuugaaaaacugaagucuaaaguuacaagaaccgagcggccccucuccgccggaguguauaugggcaaccugagcucucagcagcuggaucaacgcagagcucuccuguccaugaucgggaugagcggaucuaaucagggcgcccgggcugggcgcgacggagucgugagaguuugggaugugaagaacgccgagcuucugaauaaccaguucggcacaaugccuucccucacccuggcgugucuuacaaaacagggccaagucgaccugaaugaugccgugcaggcucucaccgaccuggggcugauuuacacggccaaguauccgaacaccagcgaccucgaucggcugacacagucccaucccauccuuaauaugaucgacaccaagaaaucuagccugaacauuuccggauacaauuuuagccucggcgcugccgugaaggcgggggccugcaugcuggauggaggcaacaugcuugaaacaaucaaagucucuccucaaaccauggacgggauucugaaguccauccucaaaguuaagaaagcucugggaauguucauuagcgauacgcccggcgagcgcaacccuuaugaaaauauccuguacaagauuugucucucuggcgacggguggcccuauaucgccagcagaacauccaucaccggacgggcuugggagaacacagugguggaucuggagucugacggcaagccucagaaagccgggagcaauaacuccaauaagagccuucagucugccggauuuaccgcuggccugaccuacucccagcucaugacacugaaagaugcgaugcugcaacuugacccgaacgccaagacguggauggauauugaagggagacccgaggacccugucgaaguggcucucuaccagcccagcucuggaugcuauauccacuucuuucgcgagccuaccgaccugaaacaguucaagcaggaugccaaguacucccauggcauugacguuacagaucuguuugccgcucaacccggccucaccagcgccgugaucgacgcgcugccgcggaauauggucauuacaugucagggguccgaugacaucagaaaacuucuggaaucucagggacgcaaggauaucaaacucauugacaucgcucugagcaagaccgauucccggaaauaugagaacgccgugugggaccaguacaaggaucugugccacaugcauacgggcguuguggucgagaagaaaaagagagggggaaaagaagagauuacaccucacugugcccuuauggacugcaucauguucgaugcugccgugucuggcgggcucaauaccagcguccugcgcgcugugcugccccgggacaugguuuuuagaaccuccacaccucgcgugguccucugaggacuagucccuguucccagagcccacuuuuuuuucuuuuuuugaaauaaaauagccugucuuucagaucucaaaggcucuuuucagagccaccaaaaaaaaaaaaaaaaaaaaaaaaaaaaaaaaaaaaaaaaaaaaaaaaaaaaaaaaaaaaaaaaagaauu

SEQ ID NO: 19564 - RNA, 2002 nt, Artificial Sequence
  mRNA product Design a-1 (hSL-A64-N5) comprising derived and/or modified sequence from LASV(Mad39;Clade IV)__ANH09723__SP-HsALB_NP(2-569) (opt5)
aggagagucccgcagucggcguccagcggcucugcuuguucgugugugugucguugcaggccuuauucaagcuuaccaugaagugggugaccuucaucagccugcucuuucuguucuccucugccuacagcagcgccuccaaggagaucaaaucuuuccuguggacccagagccucagacgggaacuguccggcuacugcucuaacauuaagcugcaaguggucaaagacgcucaggcccugcuccacgggcuggauuuuagcgagguuuccaaugugcagcgccuuaugagaaagcagcggcgcgacgauaacgaccugaaaagacuccgggaucugaaucaagcggugaacaaucuggucgaacucaagucuacacagcaaaagagcgugcugcgcguuggaacgcuuaccuccgacgaucugcucacacuggcugccgaccuugagaaacuuaagagcaaagugaccagaacagaacggccccucaccgccggcgucuauauggggaaccugucuucccagcagcuggaucagcgcagagcucuccugaauaugaucggaaugagcggcgggaaccagggagcccggacaggccgcgacggcgugguuagagugugggaugucaagaaugcugagcuucugaacaaucaguucgggaccaugccuucucucacgcuggccugucuuaccaaacaaggacagguggaccugaacgaugugguccaggcgcucacagaccugggccugauuuacaccgccaaguauccgaauacauccgaccucgaucggcugacccaaagccaucccauccuuaacaugauugacacgaauaagucuucccugaacaucagcggguacaacuuuucccucggagcugccguuaaagcuggcgccugcaugcuggaugggggaaauaugcuugagacaaucaaggugucuccucagaccauggacggcauucugaaaagcauccucaaggugaaaaagucccugggcauguucauuagcgauacacccggggaacgcaacccuuaugagaauauccuguacaaaauuugucucucuggagacggcuggcccuauaucgcguccagaaccagcauuaccgggcgggccugggaaaacacagucguggaucuggagucuggaggcaagccucagaaggcugggagcaauaacuccaauaaaucucuucagagcgccggauuugcugccggccugacguacucccaacucaugacccugaaggacgccaugcugcagcuugauccgaacgcuaaaacauggauggacaucgagggcagacccgaagauccuguugagaucgcgcucuaccagcccauuagcgggugcuauauccacuucuuucgcgaaccuaccgaccugaagcaguucaaacaagacgccaaguacucucauggaauugaugugacagaccuguuugcugcccagcccggccucaccuccgccgucaucgaggcucugccgcggaauauggugauuacgugucaggggagcgaugacaucagaaaacuuuucgaaucucagggacgcaaggauaucaagcugauugacaucgcccucuccaaaacagauagccggaaguaugagaacgcgguuugggaccaauacaaagaucugugccacaugcauaccggcguggucguggagaagaagaaaaagggcgggaaagaagagauuaccccucacugugcucugauggacugcaucauguuugaugccgccgucuccggaggccuuaauacacucgugcugagagcuguucugccccgcgacaugguguuccggaccucuacaccuaaggucgugcucugaggacuagucccuguucccagagcccacuuuuuuuucuuuuuuugaaauaaaauagccugucuuucagaucucaaaggcucuuuucagagccaccaaaaaaaaaaaaaaaaaaaaaaaaaaaaaaaaaaaaaaaaaaaaaaaaaaaaaaaaaaaaaaaaagaauu

SEQ ID NO: 19565 - RNA, 2002 nt, Artificial Sequence
  mRNA product Design a-1 (hSL-A64-N5) comprising derived and/or modified sequence from LASV(Z0947-SLE-2011;Clade IV)__AIT17841__SP-HsALB_NP(2-569) (opt5)
aggagagucccgcagucggcguccagcggcucugcuuguucgugugugugucguugcaggccuuauucaagcuuaccaugaagugggugaccuucaucagccugcucuuucuguucuccucugccuacagcagcgccuccaaggagaucaaaucuuuccuguggacccagagccucagacgggaacuguccggcuacugcucuaacauuaagcugcaaguggucaaagacgcucaggcccugcuccacgggcuggauuuuagcgagguuuccaaugugcagcgccuuaugagaaaggaacggcgcgacgauaacgaccugaaaagacuccgggaucugaaucaggcggugaacaaucuggucgagcucaagucuacacaacaaaagagcauccugcgcgugggaacgcuuaccuccgacgaucugcucauucuggcugccgaccuugaaaaacuuaagagcaaaguuacaagaaccgagcggccccucucugccggcguguauauggggaaccuguccagccagcagcuggaucagcgcagagcucuccugaauaugaucggaaugucuggcuccaaccagggggcccggacaggacgcgacggcgucgugagaguuugggaugugaagaaugcugagcuucugaacaaucaguucggcaccaugccuagccucacacuggccugucuuaccaaacaggggcaagucgaccugaacgaugcggugcaggcccucacggaccugggacugauuuacaccgcuaaguauccgaauacaucugaccucgaucggcugacccagucccaucccauccuuaacaugaucgacacaaagaaaagcucccugaauauuucuggcuacaacuuuagccucggggccgcugugaaggccggagcgugcaugcuggauggcgggaacaugcuugaaaccaucaaagucuccccucaaacgauggacggcauucucaagagcauccugaaaguuaagaaagcccugggaauguucauuucugaugcucccggcgagcgcaauccuuaugaaaacauccuguacaagauuugucucuccggggacggauggcccuauaucgccagcagaacaucuaucaccggccgggcuugggagaauacagugguggaucuggagagcgacgggaagccucagaaagccggauccaacggcucuaauaagagccuucaguccgccggguuuaccgcuggacugaccuacagccagcucaugacacugaaagaugcgaugcugcaacuugacccgaacgccaagacguggauggauauugaaggcagacccgaggacccugucgaaaucgcucucuaccagcccucuuccggcugcuauauucacuucuuucgcgagccuaccgaccugaaacaguucaagcaggaugccaaguacagccaugggaucgacgugacagaucuguuugccgcucaacccggacucaccucugccguuauugacgcgcugccgcggaauauggugaucacaugucagggcuccgaugacaucagaaaacuuuucgaaagccaggggcgcaaggauauuaaacugaucgacauugcucucuccaagaccgauucucggaaauaugagaacgccgucugggaccaguacaaggaucugugccacaugcauacgggaaucgugguugagaagaaaaagagaggcgggaaagaagagauuacaccucacugugcccugauggacugcaucauguuugaugcugccgugagcggcggacuuaauaccuccguccuccgcgcugugcugccccgggacauggucuucagaaccucuacaccucgcgugguucugugaggacuagucccuguucccagagcccacuuuuuuuucuuuuuuugaaauaaaauagccugucuuucagaucucaaaggcucuuuucagagccaccaaaaaaaaaaaaaaaaaaaaaaaaaaaaaaaaaaaaaaaaaaaaaaaaaaaaaaaaaaaaaaaaagaauu

SEQ ID NO: 19566 - RNA, 2033 nt, Artificial Sequence
  mRNA product Design a-1 (hSL-A100) comprising derived and/or modified sequence from LASV(Josiah;Clade IV)__NP_694869__SP-HsALB_NP(2-569) (opt1)
aggagagucccgcagucggcguccagcggcucugcuuguucgugugugugucguugcaggccuuauucaagcuuaccaugaagugggugaccuucaucagccugcucuuccuguucuccagcgccuacuccagcgccuccaaggagaucaagagcuuccuguggacccagucccuccgccgggagcugagcggcuacugcuccaacaucaagcuccagguggucaaggacgcccaggcgcugcugcacgggcuggacuucagcgagguguccaacgugcagcgccucaugcggaaggagcgccgggacgacaacgaccugaagcgccugcgggaccucaaccaggccgucaacaaccugguggagcucaagagcacccagcagaaguccauccugcgcgugggcacccugaccagcgacgaccugcucauccuggccgccgaccuggagaagcucaaguccaaggucauccggaccgagcgcccccugagcgccgggguguacaugggcaaccuguccagccagcagcucgaccagcggcgcgcgcugcugaacaugaucgggauguccggcggcaaccagggggcccgggccggccgcgacggggugguccgggugugggacgugaagaacgccgagcuccugaacaaccaguucggcaccaugccgagccugacgcucgcgugccugaccaagcaggggcaggucgaccugaacgacgccgugcaggcccucaccgaccugggccugaucuacaccgccaaguaccccaacacguccgaccucgaccgccugacccagagccaccccauccugaacaugaucgacaccaagaaguccagccucaacaucagcggcuacaacuucucccugggggccgcggugaaggccggcgccugcaugcuggacgggggcaacaugcucgagaccaucaaggucagcccccagacgauggacggcauccugaaguccauccugaaggugaagaaggcccucgggauguucaucagcgacaccccgggcgagcggaaccccuacgagaacauccuguacaagaucugccuguccggggacggcuggcccuacaucgccagccgcaccuccaucaccgggcgggcgugggagaacacgguggucgaccucgagagcgacggcaagccccagaaggccgacuccaacaacagcuccaagagccugcaguccgccggcuucaccgccgggcugaccuacagccagcucaugacccugaaggacgccaugcugcagcuggacccgaacgcgaagacguggauggacaucgagggccgccccgaggaccccguggagaucgcccucuaccagcccuccagcgggugcuacauccacuucuuccgggagccgaccgaccugaagcaguucaagcaggacgccaaguacucccacggcaucgacgugaccgaccuguucgccacccagcccgggcucacgagcgccgucaucgacgcgcugccccgcaacauggugaucacgugccagggcuccgacgacauccgcaagcugcucgagagccagggccggaaggacaucaagcugaucgacaucgcccugagcaagaccgacucccgcaaguacgagaacgccgugugggaccaguacaaggaccucugccacaugcacaccggggucguggucgagaagaagaagcggggcgggaaggaggagaucaccccgcacugcgcccugauggacugcaucauguucgacgcggccgugagcggcgggcugaacaccuccgugcuccgcgccguccugccccgggacaugguguuccgcaccagcacgccccgggugguccugugaggacuagucccuguucccagagcccacuuuuuuuucuuuuuuugaaauaaaauagccugucuuucagaucucaaaggcucuuuucagagccaccaaaaaaaaaaaaaaaaaaaaaaaaaaaaaaaaaaaaaaaaaaaaaaaaaaaaaaaaaaaaaaaaaaaaaaaaaaaaaaaaaaaaaaaaaaaaaaaaaaaaa

SEQ ID NO: 19567 - RNA, 2033 nt, Artificial Sequence
  mRNA product Design a-1 (hSL-A100) comprising derived and/or modified sequence from LASV(LP;Clade I)__AAF86702__SP-HsALB_NP(2-569) (opt1)
aggagagucccgcagucggcguccagcggcucugcuuguucgugugugugucguugcaggccuuauucaagcuuaccaugaagugggugaccuucaucagccugcucuuccuguucuccagcgccuacuccagcaacuccaaggagaucaagagcuuccuguggacccagucccuccgccgggagcugagcggcuacugcuccaacaucaagcuccagguggucaaggacgcccaggcccugcugcacgggcuggacuucagcgagguguccaacgugcagcgccucaugcggaagcagaagcgcgacgacgcggaccugaagcggcugcgcgaccucaaccaggccgucaacaaccugguggagcucaagagcacccagcagaagaacgugcugcgggucggcacgcuguccagcgacgaccugaucacccucgccgccgaccuggagaagcugaaguccaaggugauccgcaccgagcggccccucagcuccgggguguacaugggcaaccugagcucccagcagcuggaccagcgccgggcccuccugagcaugaucgggauguccggcggcccgcaggggaaccgcaccggcggggacggcgucgugcgggugugggacgucaagaacgcggagcugcucaacaaccaguucgggacgaugcccagccugacccuggccugccucaccaagcagggccagguggaccugaacgacgccgugcaggcccugaccgaccucggccugaucuacacggcgaaguaccccaacuccagcgaccuggacaugcucacccagagccaccccauccuggggauggucgacaccaagaaguccagccugaacaucuccggcuacaacuucagccucggggccgccgugaaggccggcgccugcaugcuggacggcgggaacaugcuggagaccaucaagguguccccgcagacgauggacggcauccucaagagcauccugaaggucaagcgcucccuggggauguucaucagcgacacccccggcgagcggaaccccuacgagaacauccucuacaagaucugccuguccggggagggcuggcccuacaucgcgagccgcaccuccaucaccggccgggccugggagaacacgcugguggaccucgagagcgacaacaagccgcccaagcugaacuccgccgggagcaacaagucccugcaggccgccggccucaacgcggggcugaccuacagccagcugaugacccugaaggacugcaugcuccagcuggaccccuccagcaagaccuggaucgacaucgagggccgccccgaggacccgguggagaucgcccuguuccagcccuccagcgggugcuacauccacuucuuccgggagcccacggaccucaagcaguucaagcaggacgccaaguacagccacggcaucgacgucaccgaccuguucuccacccagcccggccugaccagcgccgugaucgaggcccucccgcgcaacauggugcugacgugccagggguccgacgacaucaagaagcugcucgagagccagggccggcgcgacaucaagcugaucgacaucucccugagcaaggcggacucccgcaaguucgagaacgccgucugggaccaguacaaggaccucugccacaugcacaccgggguggucguggagaagaagaagcggggcgggaaggaggagaucacgccccacugcgcccugcuggacugcaucauguucgacgccgccaccaccggcagccucaacaucaccacccugcgcgcggugcugccccgggacauggucuuccgcaccuccacgcccaagguggugcucugaggacuagucccuguucccagagcccacuuuuuuuucuuuuuuugaaauaaaauagccugucuuucagaucucaaaggcucuuuucagagccaccaaaaaaaaaaaaaaaaaaaaaaaaaaaaaaaaaaaaaaaaaaaaaaaaaaaaaaaaaaaaaaaaaaaaaaaaaaaaaaaaaaaaaaaaaaaaaaaaaaaaa

SEQ ID NO: 19568 - RNA, 2033 nt, Artificial Sequence
  mRNA product Design a-1 (hSL-A100) comprising derived and/or modified sequence from LASV(803213;Clade II)__AAF86704__SP-HsALB_NP(2-569) (opt1)
aggagagucccgcagucggcguccagcggcucugcuuguucgugugugugucguugcaggccuuauucaagcuuaccaugaagugggugaccuucaucagccugcucuuccuguucuccagcgccuacuccagcgccuccaaggaggugaaguccuuccuguggacccagagccuccgccgggagcugagcggcuacugcuccaacaucaagcugcaggucgugaaggacgcccaggcgcuccugcacgggcuggacuucagcgaggugaacaacguccagcgccucaugcggaagcagaagcgcgacgacggcgaccugaagcggcugcgcgaccucaaccaggccgugaacaaccugguggagcugaaguccacccagcagaaguccauccuccgggucgggacgcugaccagcgacgaccugcucacccuggccgccgaccuggagaagcucaagagcaaggugauccgcaccgagcggccccuguccagcggcguguacauggggaaccuguccacgcagcagcucgagcagcgccgggcccugcugaacaugaucggcauggucggcggggcgcagggcacccagccggggcgcgacggcguggugcgggucugggacgugaagaaccccgaccuccugaacaaccaguucgggaccaugcccagccugacccucgccugccugacgaagcagggccagguggaccugaacgacgccguccucgcccugaccgaccugggccucaucuacaccgcgaaguaccccaacuccagcgaccuggaccgccugucccagagccacccgauccucaacaugguggacaccaagaaguccagccugaacaucagcggguacaacuucucccugggcgccgccgugaaggccggggccugcaugcucgacggcggcaacaugcuggagacgaucaaggucacgccccagaccauggacgggauccucaagagcauccugaaggugaagcggucccugggcauguucgugagcgacacccccggggagcgcaaccccuacgagaacauccuguacaagaucugccucuccggcgacggguggccguacaucgcgagccggaccuccaucgucggccgcgccugggagaacaccaccguggaccuggagagcgacggcaagccccagaagguggggaccgccggcuccaacaagagccugcaguccgccggguuccccacgggccucaccuacagccagcugaugacccugaaggacuccaugaugcagcuggaccccagcgccaagaccuggaucgacaucgaggggcggccggaggaccccgucgagaucgcgcucuaccagcccauguccggcugcuacauccacuucuuccgcgagcccacggaccugaagcaguucaagcaggacgccaaguacagccacggcaucgacguggccgaccuguucccggcccagcccgggcucaccuccgccgucaucgaggcgcugccccggaacauggugcugaccugccagggcagcgacgacaucaagaagcuccuggacucccaggggcgccgcgacaucaagcugaucgacaucagccucagcaagguggacucccggaaguucgagaacgccgucugggaccagugcaaggaccugugccacaugcacaccggcgugguggucgagaagaagaagcgcgggggcaaggaggagaucacgccccacugcgcccugauggacugcaucauguucgacgccgccgugagcggcgggcucaacaucccggugcugcgggcgguccugccccgcgacaugguguuccggaccuccagccccaaggugguccucugaggacuagucccuguucccagagcccacuuuuuuuucuuuuuuugaaauaaaauagccugucuuucagaucucaaaggcucuuuucagagccaccaaaaaaaaaaaaaaaaaaaaaaaaaaaaaaaaaaaaaaaaaaaaaaaaaaaaaaaaaaaaaaaaaaaaaaaaaaaaaaaaaaaaaaaaaaaaaaaaaaaaa

SEQ ID NO: 19569 - RNA, 2036 nt, Artificial Sequence
  mRNA product Design a-1 (hSL-A100) comprising derived and/or modified sequence from LASV(GA391;Clade III)__CAA36646__SP-HsALB_NP(2-570) (opt1)
aggagagucccgcagucggcguccagcggcucugcuuguucgugugugugucguugcaggccuuauucaagcuuaccaugaagugggugaccuucaucagccugcucuuccuguucuccagcgccuacuccagcgccuccaaggaggugcgcagcuuccuguggacccagucccuccggcgcgagcugagcggcuacugcuccaacaucaagcugcaggucgugaaggacgcccaggcgcuccugcacgggcuggacuucagcgagguguccaacguccagcggcucaugcgcaagcagaagcgggacgacggcgaccugaagcgccugcgggaccucaaccaggccgugaacaaccugguggagcucaagagcacccagcagaaguccguccugcgcguggggacccugagcuccgacgaccugcucauccuggccgccgaccuggagaagcucaagagcaaggugacccggaccgagcgcccccuguccagcggcgucuacauggggaaccuguccagccagcagcucgaccagcggcgcgcccugcugaacaugaucggcaugaccggcguguccgggggcgggaagggcgcgagcgacgggaucgugcgggucugggacgugaagaacgccgagcuccugaacaaccaguucggcacgaugccgucccugacccucgccugccugaccaagcagggccagguggaccugaacgacgccguccaggcgcucaccgaccuggggcugaucuacacggccaaguaccccaacagcagcgaccucgaccgccugucccagagccaccccauccugaacaugaucgacaccaagaaguccagccucaacaucuccggcuacaacuucagccugggggccgccgugaaggccggcgcgugcaugcuggacggcgggaacaugcucgagaccaucaaggugagcccccagaccauggacggcauccucaaguccauccugaaggucaagaagucccuggggauguucgugagcgacacgccgggcgagcggaaccccuacgagaacauccuguacaagaucugccuguccggggacggcuggcccuacaucgccagccgcaccuccaucgugggccgggccugggagaacaccgucguggaccucgagcaggacaacaagccccagaagaucgggaacggcgggagcaacaagucccugcagagcgccggcuucgccgcggggcugaccuacucccagcucaugacgcugaaggacuucaagugcuucaaccugaucccgaacgccaagaccuggauggacaucgagggccgccccgaggaccccguggagaucgcccuguaccagcccagcuccggcugcuacguccacuucuuccgggagccgaccgaccucaagcaguucaagcaggacgccaaguacagccacgggaucgacgugaccgaccuguucgccgcgcagcccggccugacgagcgccgucaucgaggcccucccccgcaacauggugaucacgugccagggguccgaggacauccggaagcugcuggagagccagggccgccgcgacaucaagcucaucgacaucacccuguccaaggccgacagccggaaguucgagaacgccgugugggaccaguucaaggaccugugccacaugcacaccggggucgugguggagaagaagaagcgcggcggcaaggaggagaucacgccccacugcgcgcucauggacugcaucauguucgacgccgccgucuccgggggccuggacgccaaggugcugcgggugguccucccgcgcgacaugguguuccggaccagcacccccaaggugguccugugaggacuagucccuguucccagagcccacuuuuuuuucuuuuuuugaaauaaaauagccugucuuucagaucucaaaggcucuuuucagagccaccaaaaaaaaaaaaaaaaaaaaaaaaaaaaaaaaaaaaaaaaaaaaaaaaaaaaaaaaaaaaaaaaaaaaaaaaaaaaaaaaaaaaaaaaaaaaaaaaaaaaa

SEQ ID NO: 19570 - RNA, 2033 nt, Artificial Sequence
  mRNA product Design a-1 (hSL-A100) comprising derived and/or modified sequence from LASV(AV;Clade V)__CCA30315__SP-HsALB_NP(2-569) (opt1)
aggagagucccgcagucggcguccagcggcucugcuuguucgugugugugucguugcaggccuuauucaagcuuaccaugaagugggugaccuucaucagccugcucuuccuguucuccagcgccuacuccagcgccuccaaggaggugaaguccuuccuguggacccagagccuccgccgggagcugagcggcuacugcuccaacaucaagcugcaggucgugaaggacgcccaggcgcuccugcacgggcuggacuucagcgagguguccaacguccagcgccucaugcggaagcagcgccgggacgacagcgaccugaagcgccugcgggaccucaaccaggccgugaacaaccugguggagcugaaguccacccagcagaaguccguccuccgcgugggcacgcugagcagcgacgaccugcucacccuggccgccgaccuggagaagcucaaguccaaggugacccggaccgagcgcccccugagcuccggggucuacaugggcaaccugagcucccagcagcucgaccagcggcgcgcccugcugaaccucaucgggaugacgaacggcagccagggcucccaggcggggcgggacggcguggugcgcgucugggacgugaagaacgccgagcugcugaacaaccaguucgggaccaugccgagccucacccuggccugccugaccaagcagggccagguggaccucaacgacgucgugcaggcccugacggaccuggggcucaucuacaccgcgaaguaccccaacaccagcgaccuggaccggcugacccagucccaccccauccucaacaugaucgacacgaagaaguccagccugaacaucagcggcuacaacuucucccugggcgccgccgugaaggccggggccugcaugcucgacggcgggaacaugcuggagaccaucaaggucagcccccaguccauggacggcauccucaagagcauccugaaggugaagcgcgcgcugggcauguucguguccgacaccccgggggagcggaaccccuacgagaacauccuguacaagaucugccucagcggcgacggguggcccuacaucgccucccgcaccagcaucgucggccgggccugggagaacacggugguggaccuggagaccgacgggaagccccagaagaucggcuccggcaacagcaacaagucccugcagagcgccggguucuccgccggccucaccuacagccagcugaugacccugaaggacgcgaugcugcagcucgacccgaacgccaagacguggauggacaucgaggggcgccccgaggaccccgucgagguggcccuguaccagcccaucuccggcugcuacauccacuucuuccgggagccgaccgaccugaagcaguucaagcaggacgccaaguacagccacgggaucgacaucgccgaccucuucgcggcccagcccggccugaccagcgccgucaucgaggcccugccccgcaacauggugaucacgugccagggcuccgaggacaucaagaagcuccuggagagccaggggcgcaaggacaucaagcugaucgacaucgcccucuccaagaucgacagccggaaguucgagaacgcggugugggaccaguacaaggaccugugccacaugcacaccggcgucgugguggagaagaagaagcgcgggggcaaggaggagaucaccccgcacugcgcccugauggacugcaucauguucgacgccgccgucuccgggggccucaacacccuggugcugcgggcggugcucccccgcgacauggucuuccggaccagcacgccccgcguggugcugugaggacuagucccuguucccagagcccacuuuuuuuucuuuuuuugaaauaaaauagccugucuuucagaucucaaaggcucuuuucagagccaccaaaaaaaaaaaaaaaaaaaaaaaaaaaaaaaaaaaaaaaaaaaaaaaaaaaaaaaaaaaaaaaaaaaaaaaaaaaaaaaaaaaaaaaaaaaaaaaaaaaaa

SEQ ID NO: 19571 - RNA, 2033 nt, Artificial Sequence
  mRNA product Design a-1 (hSL-A100) comprising derived and/or modified sequence from LASV(Togo/2016/7082;Clade VI)__AMR44578__SP-HsALB_NP(2-569) (opt1)
aggagagucccgcagucggcguccagcggcucugcuuguucgugugugugucguugcaggccuuauucaagcuuaccaugaagugggugaccuucaucagccugcucuuccuguucuccagcgccuacuccagcaacuccaaggaggugaaguccuuccuguggacccagagccuccgccgggagcugagcggcuacugcuccaacaucaagcugcaggucgugaaggacgcccaggcccuccugcacgggcuggacuucagcgagguguccaacguccagcgccucaugcggaagcagaagcgcgacgacggcgaccugaagcggcugcgcgaccucaaccaggcggugaacaaccugguggagcucaagagcguccagcagaaguccauccugcggguggggacccugaccagcgacgaccugcucacccuggccgccgaccuggagaagcucaaguccaaggugacccgcaccgagcggccccugagcuccggcgucuacauggggaaccugagcucccagcagcucgaccagcgccgggcccugcugagcaugaucggcauguccggcgggaaccagaacagccagccgaagggcgacgggguggugcgcgucugggacgugaagaacgccgaccuccugaacaaccaguucggcacgaugcccucccugacccucgcgugccugaccaagcagggccagguggaccugaacgacgccguccaggcccucaccgaccuggggcugaucuacacggccaaguaccccaacagcagcgaccucgaccggcugucccagagccaccccauccugaacaugaucgacaccaagaaguccagccucaacaucuccggcuacaacuucagccugggggcggccaucaagaccggcgccugcaugcuggacgggggcaacaugcucgagaccaucaaggugacgccgcagaccauggacggcauccugaaguccauccugaaggugaagcgcagccucgggauguucaucuccgacacccccggcgagcggaaccccuacgagaacauccuguacaagaucugccugagcggggacggcuggcccuacaucgccucccgcaccgccaucaucgggcgggcgugggagaacacggucguggaccucgagagcgacuccaagccgcagaagaucggcagcaacggcuccaacaagagccugcaguccgccggguucgcccccggccugaccuacagccagcucaugacccugaaggacuccaugcugcagcuggaccccaacgccaagaccuggaucgacaucgaggggcgccccgaggacccgguggaggucgcccucuuccagcccaucagcggcugcuacauccacuucuuccgggagcccacggaccugaagcaguucaagcaggacgcgaaguacagccacgggaucgacgugaccgaccuguucgccgcccagcccggccucaccuccgccgugaucgaggcccugccgcgcaacaugguccugaccugccagggcagcgacgacaucaagaagcuccuggacucccaggggcggcgcgacaucaagcugaucgacgugagccucaacaagaucgacucccgcaaguucgagaacgcggucugggaccaguacaaggaccugugccacaugcacacgggcgugguggucgagaagaagaagaagggcgggaaggaggagaucacgccccacugcgcccugcucgacugcaucauguucgacgccgccgugagcgggggccugaacgccaccgugcugcgggcgguccucccccgcgacaugguguuccggaccuccagccccaaggugguccugugaggacuagucccuguucccagagcccacuuuuuuuucuuuuuuugaaauaaaauagccugucuuucagaucucaaaggcucuuuucagagccaccaaaaaaaaaaaaaaaaaaaaaaaaaaaaaaaaaaaaaaaaaaaaaaaaaaaaaaaaaaaaaaaaaaaaaaaaaaaaaaaaaaaaaaaaaaaaaaaaaaaaa

SEQ ID NO: 19572 - RNA, 2033 nt, Artificial Sequence
  mRNA product Design a-1 (hSL-A100) comprising derived and/or modified sequence from LASV(KAK-428;Clade n.d. (VII))__ANH09741__SP-HsALB_NP(2-569) (opt1)
aggagagucccgcagucggcguccagcggcucugcuuguucgugugugugucguugcaggccuuauucaagcuuaccaugaagugggugaccuucaucagccugcucuuccuguucuccagcgccuacuccagcaacuccaaggaggugaaguccuuccuguggacccagagccuccgccgggagcugagcggcuacugcaccaacaucaagcugcaggucgugaaggacgcccaggcccuccugcacgggcuggacuucuccgaggugagcaacguccagcgccucaugcggaagcagaagcgcgacgacaacgaccugaagcggcugcgcgaccucaaccaggcggugaacaaccugguggagcugaaguccguccagcagaaguccgugcucaaggugggcacgcugaacagcgacgaccugcucacccuggccgccgaccuggagaagcucaagagcaaggucgugcggaccgagcgcccccuguccagcgggguguacaugggcaaccuguccagccagcagcucgaccagcggcgcgcccugcugaacaugaucgggauggccggcggcucccaggggaaccagccgagccgggacggcgucgugcgcgugugggacgucaagaacgcggaccuccugaacaaccaguucgggaccaugcccucccugacgcucgccugccugaccaagcagggccagguggaccugaacgacgugguccucgcccugaccgaccuggggcucaucuacaccgccaaguaccccaacagcuccgaccuggaccggcugagccagaaccaccccgugcucaacaugaucgacgugaacaagagcucccugaacaucagcggcuacaacuucucccugggcgcggccgucaaggccggggccugcaugcucgacggcgggaacaugcuggagacgaucaagaucagcccgcagaccguggacggcauccugaaguccauccucaaggugaagcgcgcccugggcauguucgucagcgacacccccggggagcggaaccccuacgagaacauccuguacaaggugugccucuccggcaacggguggcccuacaucgcgagccgcaccuccaucgucggccgggccugggagaacacggugguggaccuggagagcaacaagaaccagccgaaggucgggaacaacggcuccaacaagaugcugcagagcuccggcuucgccaccgggcucaccuacagccagcugaugacccugcgcgacuccaugcugcagcucgaccccacggccaagaccuggaucgacaucgagggccggcccgaggaccccguggagcuggcccuguuccagccgagcuccgggugcuacauccacuucuuccgcgagcccaccgaccucaagcaguucaagcaggacgcgaaguacagccacggcaucgacgugaacgaccuguucuccgcccagcccgggcugaccagcgccguccucgaggcccugccccggaacauggugcugacgugccagggcagcgacgacauccgcaagcuccuggacucccaggaccgcaaggacaucaagcugaucgacaucagccucuccaaggccgacgcgcggaaguucgagaacgacgugugggaccaguucaaggaccugugccacaugcacaccggcaucgucguggagaagaagaagaagggcgggaagcaggagaugaccccgcacugcgcccugcucgacugcaucauguucgacgccgccgugagcgggggccugaacguccccacccugcgcgccgugcuccccacggacaugguguuccggaccaucaccaccaaggucgugcugugaggacuagucccuguucccagagcccacuuuuuuuucuuuuuuugaaauaaaauagccugucuuucagaucucaaaggcucuuuucagagccaccaaaaaaaaaaaaaaaaaaaaaaaaaaaaaaaaaaaaaaaaaaaaaaaaaaaaaaaaaaaaaaaaaaaaaaaaaaaaaaaaaaaaaaaaaaaaaaaaaaaaa

SEQ ID NO: 19573 - RNA, 2033 nt, Artificial Sequence; identical to SEQ ID NO: 19567
  mRNA product Design a-1 (hSL-A100) comprising derived and/or modified sequence from LASV(Pinneo-NIG-1969;Clade I)__AIT17837__SP-HsALB_NP(2-569) (opt1)

SEQ ID NO: 19574 - RNA, 2033 nt, Artificial Sequence
  mRNA product Design a-1 (hSL-A100) comprising derived and/or modified sequence from LASV(ISTH0009-NIG-2011;Clade II)__AIT17405__SP-HsALB_NP(2-569) (opt1)
aggagagucccgcagucggcguccagcggcucugcuuguucgugugugugucguugcaggccuuauucaagcuuaccaugaagugggugaccuucaucagccugcucuuccuguucuccagcgccuacuccagcguguccaaggaggucaagagcuuccuguggacccagucccuccgccgggagcugagcggcuacugcuccaacaucaagcuccagguggugaaggacgcccaggcccugcugcacgggcuggacuucagcgaggucuccaacgugcagcgccucaugcggaagcagaagcgcgacgacagcgaccugaagcggcugcgcgaccucaaccaggcggugaacaaccuggucgagcugaaguccacccagcagaaguccauccuccgggugggcacccugaccagcgacgaccugcucacccuggccgccgaccuggagaagcucaagagcaaggugauccgcaccgagcggccccuguccagcggggucuacaugggcaaccuguccacgcagcagcucgagcagcgccgggcccugcugaacaugaucgggauggugggcggcgcccaggggacccagccgggccgcgacggggugguccgggugugggacgugaagaaccccgaccuccugaacaaccaguucggcaccaugcccagccugacccucgcgugccugacgaagcaggggcaggucgaccugaacgacgccgugcucgcccugaccgaccugggccucaucuacaccgccaaguaccccaacuccagcgaccuggaccgccugucccagagccacccgauccucaacaugguggacaucaagaaguccagccugaacaucagcggcuacaacuucucccugggggcggccgucaaggccggcgccugcaugcucgacgggggcaacaugcuggagaccaucaaggugacgccccagaccauggacggcauccucaagagcauccugaaggugaagcggucccuggggauguucgucagcgacacccccggcgagcgcaaccccuacgagaacauccuguacaagaucugccucuccggggacggcuggccguacaucgccagccggaccuccaucguggggcgcgcgugggagaacacgaccguggaccuggagagcgacggcaagccccagaaggucggcuccgccgggagcaacaagucccugcagagcgccggcuuccccaccgggcucaccuacucccagcugaugacgcugaaggacagcaugaugcagcuggaccccuccgccaagaccuggaucgacaucgagggccggccggaggaccccguggagaucgcccucuaccagcccaugagcgggugcuacauccacuucuuccgcgagcccaccgaccugaagcaguucaagcaggacgcgaaguacucccacggcaucgacgucgccgaccuguucccggcccagcccggccucaccagcgccgugaucgaggcccugccccggaacauggugcugacgugccaggggagcgacgacaucaagcgccuccuggacucccagggccgccgggacaucaagcugaucgacaucgcgcucagcaaggccgacucccgccgguucgagaacgccgucugggaccagugcaaggaccugugccacaugcacaccggggugguggucgagaagaagaagcgcggcgggaaggaggagaucacgccccacugcgcccugauggacugcaucauguacgacgccgcggugagcggcggccucaacaucccggugcugcgggccguccugccccgcgacaugguguuccggaccuccagccccaaggugguccucugaggacuagucccuguucccagagcccacuuuuuuuucuuuuuuugaaauaaaauagccugucuuucagaucucaaaggcucuuuucagagccaccaaaaaaaaaaaaaaaaaaaaaaaaaaaaaaaaaaaaaaaaaaaaaaaaaaaaaaaaaaaaaaaaaaaaaaaaaaaaaaaaaaaaaaaaaaaaaaaaaaaaa

SEQ ID NO: 19575 - RNA, 2033 nt, Artificial Sequence
  mRNA product Design a-1 (hSL-A100) comprising derived and/or modified sequence from LASV(ISTH2010-NIG-2012;Clade II)__AIT17483__SP-HsALB_NP(2-569) (opt1)
aggagagucccgcagucggcguccagcggcucugcuuguucgugugugugucguugcaggccuuauucaagcuuaccaugaagugggugaccuucaucagccugcucuuccuguucuccagcgccuacuccagcgccuccaaggaggugaaguccuuccuguggacccagagccuccgccgggagcugagcggcuacugcuccaacaucaagcugcaggucgugaaggacgcccaggcgcuccugcacgggcuggacuucagcgagguguccaacguccagcgccucaugcggaagcagaagcgcgacgacagcgaccugaagcggcugcgcgaccucaaccaggccgugaacaaccugguggagcugaaguccacccagcagaaguccauccuccgggucggcacgcugaccagcgacgaccugcucacccuggccgccgaccuggagaagcucaagagcaaggugauccgcaccgagcggccccuguccagcgggguguacaugggcaaccuguccacgcagcagcucgagcagcgccgggcccugcugaaccucaucgggauggucggcggcgcgcaggggacccagccgggccgcgacgggguggugcgggucugggacgugaagaaccccgaccugcugaacaaccaguucggcaccaugcccagccucacccuggccugccugacgaagcagggccagguggaccucaacgacgccguccuggcccugaccgaccucgggcugaucuacaccgcgaaguaccccaacuccagcgaccuggaccgccucucccagagccacccgauccugaacaugguggacaccaagaaguccagccugaacaucagcggcuucaacuucucccucggggccgccgugaaggccggcgccugcaugcuggacgggggcaacaugcuggagacgaucaaggucacgccccagaccauggacggcauccucaagagcauccugaaggugaagaagucccuggggauguucgugagcgacacccccggcgagcggaaccccuacgagaacauccucuacaagaucugccuguccggggacggcuggccguacaucgcgagccgcaccuccaucgucgggcgggccugggagaacaccaccguggaccuggagagcgacggcaagccccacaaggugggcaccgccggguccaacaagagccuccaguccgccggcuuccccacggggcugaccuacagccagcugaugacccugaaggacuccaugaugcagcucgaccccagcgccaagaccuggaucgacaucgagggccgcccggaggaccccgucgagaucgcgcuguaccagcccauguccgggugcuacauccacuucuuccgggagcccacggaccugaagcaguucaagcaggacgccaaguacagccacggcaucgacguggccgaccucuucccggcccagcccggccugaccuccgccgucaucgaggcgcugccccgcaacauggugcugaccugccaggggagcgacgacaucaagcggcuccuggacagccagggccgccgcgacaucaagcucaucgacaucgcccuguccaaggccgacagccggcgcuucgagaacgccgugugggaccagugcaaggaccugugccacaugcacaccggggucgugguggagaagaagaagcggggcgggaaggaggagaucacgccccacugcgcccucauggacugcaucauguacgacgcggccgucuccggcggccugaacaucccggugcugcgcgccgugcucccccgggacauggucuuccgcaccagcucccccaagguggugcugugaggacuagucccuguucccagagcccacuuuuuuuucuuuuuuugaaauaaaauagccugucuuucagaucucaaaggcucuuuucagagccaccaaaaaaaaaaaaaaaaaaaaaaaaaaaaaaaaaaaaaaaaaaaaaaaaaaaaaaaaaaaaaaaaaaaaaaaaaaaaaaaaaaaaaaaaaaaaaaaaaaaaa

SEQ ID NO: 19576 - RNA, 2033 nt, Artificial Sequence
  mRNA product Design a-1 (hSL-A100) comprising derived and/or modified sequence from LASV(Lassa virus/H.sapiens-wt/NGA/2015/ISTH_0543;Clade II)__AVO03640__SP-HsALB_NP(2-569) (opt1)
aggagagucccgcagucggcguccagcggcucugcuuguucgugugugugucguugcaggccuuauucaagcuuaccaugaagugggugaccuucaucagccugcucuuccuguucuccagcgccuacuccagcgccuccaaggaggugaaguccuuccuguggacccagagccuccgccgggagcugagcggcuacugcuccaacaucaagcugcaggucgugaaggacgcccaggcgcuccugcacgggcuggacuucagcgagguguccaacguccagcgccucaugcggaagcagaagcgcgacgacagcgaccugaagcggcugcgcgaccucaaccaggccgugaacaaccugguggagcugaaguccacccagcagaaguccauccuccgggucggcacgcugaccagcgacgaccugcucacccuggccgccgaccuggagaagcucaagagcaaggugauccgcaccgagcggccccuguccagcgggguguacaugggcaaccuguccacgcagcagcucgagcagcgccgggcccugcugaacaugaucgggauggucggcggcgcgcaggggacccagccgggccgcgacgggguggugcgggucugggacgugaagaaccccgaccuccugaacaaccaguucggcaccaugcccagccugacccucgccugccugacgaagcagggccagguggaccugaacgacgccguccucgcccugaccgaccuggggcucaucuacaccgcgaaguaccccaacuccagcgaccuggaccgccugucccagagccacccgauccucaacaugguggacaccaagaaguccagccugaacaucagcggcuacaacuucucccugggggccgccgugaaggccggcgccugcaugcucgacgggggcaacaugcuggagacgaucaaggucacgccccagaccauggacggcauccucaagagcauccugaaggugaagaagucccuggggauguucgugagcgacacccccggcgagcggaaccccuacgagaacauccuguacaagaucugccucuccggggacggcuggccguacaucgcgagccgcaccuccaucgucgggcgggccugggagaacaccaccguggaccuggagagcgacggcaagccccagaaggugggcuccgccgggagcaacaagucccugcagagcgccggcuuccccaccgggcucacguacucccagcugaugacccugaaggacagcaugaugcagcuggaccccuccgccaagaccuggaucgacaucgagggccgcccggaggaccccgucgagaucgcgcucuaccagcccaugagcgggugcuacauccacuucuuccgggagcccaccgaccugaagcaguucaagcaggacgccaaguacucccacggcaucgacguggccgaccuguucccggcccagcccggccucacgagcgccgucaucgaggcgcugccccgcaacauggugcugaccugccaggggagcgacgacaucaagcggcuccuggacucccagggccgcaaggacaucaagcugaucgacaucgcccucagcaaggccgacucccgccgguucgagaacgccgugugggaccagugcaaggaccugugccacaugcacaccggggucgugguggagaagaagaagcgcggcgggaaggaggagaucacgccccacugcgcccugauggacugcaucauguacgacgcggccgucagcggcggccucaacaucccggugcugcgggccgugcugccccgcgacauggucuuccggaccuccagccccaagguggugcucugaggacuagucccuguucccagagcccacuuuuuuuucuuuuuuugaaauaaaauagccugucuuucagaucucaaaggcucuuuucagagccaccaaaaaaaaaaaaaaaaaaaaaaaaaaaaaaaaaaaaaaaaaaaaaaaaaaaaaaaaaaaaaaaaaaaaaaaaaaaaaaaaaaaaaaaaaaaaaaaaaaaaa

SEQ ID NO: 19577 - RNA, 2033 nt, Artificial Sequence
  mRNA product Design a-1 (hSL-A100) comprising derived and/or modified sequence from LASV(Lassa virus/H.sapiens-wt/NGA/2016/ISTH_0009;Clade II)__AVO03572__SP-HsALB_NP(2-569) (opt1)
aggagagucccgcagucggcguccagcggcucugcuuguucgugugugugucguugcaggccuuauucaagcuuaccaugaagugggugaccuucaucagccugcucuuccuguucuccagcgccuacuccagcgccuccaaggaggugaaguccuuccuguggacccagagccuccgccgggagcugagcggcuacugcuccaacaucaagcugcaggucgugaaggacgcccaggcgcuccugcacgggcuggacuucagcgagguguccaacguccagcgccucaugcggaagcagaagcgcgacgacagcgaccugaagcggcugcgcgaccucaaccaggccgugaacaaccugguggagcugaaguccacccagcagaaguccauccuccgggucggcacgcugaccagcgacgaccugcucacccuggccgccgaccuggagaagcucaagagcaaggugauccgcaccgagcggccccuguccagcgggguguacaugggcaaccuguccacgcagcagcucgagcagcgccgggcccugcugaacaugaucgggauggucggcggcgcgcaggggacccagccgggccgcgacgggguggugcgggucugggacgugaagaaccccgaccuccugaacaaccaguucggcaccaugcccagccugacccucgccugccugacgaagcagggccagguggaccugaacgacgccguccucgcccugaccgaccuggggcucaucuacaccgcgaaguaccccaacuccagcgaccuggaccgccugucccagagccacccgauccucaacaugguggacaccaagaaguccagccugaacaucagcggcuacaacuucucccugggggccgccgugaaggccggcgccugcaugcucgacgggggcaacaugcuggagacgaucaaggucacgccccagaccauggacggcauccucaagagcauccugaaggugaagaagucccuggggauguucgugagcgacacccccggcgagcggaaccccuacgagaacauccuguacaagaucugccucuccggggacggcuggccguacaucgcgagccgcaccuccaucgucgggcgggccugggagaacaccaccguggaccuggagagcgacggcaagccccagaaggugggcuccgccgggagcaacaagucccugcagagcgccggcuuccccaccgggcucacguacucccagcugaugacccugaaggacagcaugaugcagcuggaccccuccgccaagaccuggaucgacaucgagggccgcccggaggaccccgucgagaucgcgcucuaccagcccaugagcgggugcuacauccacuucuuccgggagcccaccgaccugaagcaguucaagcaggacgccaaguacucccacggcaucgacguggccgaccuguucccggcccagcccggccucacgagcgccgucaucgaggcgcugccccgcaacauggugcugaccugccaggggagcgacgacaucaagcggcuccuggacucccagggccgccgcgacaucaagcugaucgacaucgcccucagcaaggccgacucccggcgcuucgagaacgccgugugggaccagugcaaggaccugugccacaugcacaccggggucgugguggagaagaagaagcggggcgggaaggaggagaucacgccccacugcgcccugauggacugcaucauguacgacgcggccgucagcggcggccucaacaucccggugcugcgcgccgugcugccccgggacauggucuuccgcaccuccagccccaagguggugcucugaggacuagucccuguucccagagcccacuuuuuuuucuuuuuuugaaauaaaauagccugucuuucagaucucaaaggcucuuuucagagccaccaaaaaaaaaaaaaaaaaaaaaaaaaaaaaaaaaaaaaaaaaaaaaaaaaaaaaaaaaaaaaaaaaaaaaaaaaaaaaaaaaaaaaaaaaaaaaaaaaaaaa

SEQ ID NO: 19578 - RNA, 2033 nt, Artificial Sequence
  mRNA product Design a-1 (hSL-A100) comprising derived and/or modified sequence from LASV(Lassa virus/H.sapiens-wt/NGA/2016/ISTH_0017;Clade II)__AVO03568__SP-HsALB_NP(2-569) (opt1)
aggagagucccgcagucggcguccagcggcucugcuuguucgugugugugucguugcaggccuuauucaagcuuaccaugaagugggugaccuucaucagccugcucuuccuguucuccagcgccuacuccagcgccuccaaggaggugaaguccuuccuguggacccagagccuccgccgggagcugagcggcuacugcuccagcaucaagcugcaggucgugaaggacgcccaggcgcuccugcacgggcuggacuucuccgaggugagcaacguccagcgccucaugcggaagcagaagcgcgacgacuccgaccugaagcggcugcgcgaccucaaccaggccgugaacaaccugguggagcucaagagcacccagcagaaguccauccugcgggucggcacgcugaccagcgacgaccugcucacccuggccgccgaccuggagaagcucaaguccaaggugauccgcaccgagcggccccugagcuccgggguguacaugggcaaccugagcacgcagcagcucgagcagcgccgggcccugcugaacaugaucgggauggcgggcggcgcccaggggacccagccgggccgcgacggggucgugcgggugugggacgucaagaaccccgaccuccugaacaaccaguucggcaccaugcccucccugacccucgccugccugacgaagcagggccagguggaccugaacgacgccgugcucgcgcugaccgaccuggggcucaucuacaccgccaaguaccccaacagcuccgaccuggaccgccugagccagagccacccgauccucaacauggucgacaccaagaaguccagccugaacaucuccggcuacaacuucagccugggggccgccgugaaggccggcgcgugcaugcucgacgggggcaacaugcuggagacgaucaaggugacgccccagaccauggacggcauccugaaguccauccucaaggucaagcggagccuggggauguucguguccgacgcccccggcgagcgcaaccccuacgagaacauccuguacaagaucugccucagcggggacggcuggccguacaucgccucccggaccagcaucguggggcgcgccugggagaacaccaccgucgaccuggaguccgacggcaagccccagaaggugggcgccaccgggagcaacaagucccugcagagcgcgggcuuccccaccgggcucacguacucccagcugaugacccugaaggacagcaugaugcagcuggaccccuccgccaagaccuggaucgacaucgagggccggccggaggaccccguggaggucgcccucuaccagcccgugagcgggugcuacauccacuucuuccgcgagcccaccgaccugaagcaguucaagcaggacgccaaguacucccacggcaucgacgucgccgaccuguucccggcgcagcccggccucacgagcgccgugaucgaggcccugccccggaacauggugcugaccugccaggggagcgacgacaucaagaagcuccuggacucccagggccgcaaggacaucaagcugaucgacaucgcccucagcaaggccgacucccgccgguucgagaacgcggucugggaccagugcaaggaccugugccacaugcacaccggggugguggucgagaagaagaagcgcggcgggaaggaggagaucacgccccacugcgcccugauggacugcaucauguacgacgccgccgugagcggcggccucaacaucccggugcugcgggcgguccugccccgcgacaugguguuccggaccuccagccccaaggugguccucugaggacuagucccuguucccagagcccacuuuuuuuucuuuuuuugaaauaaaauagccugucuuucagaucucaaaggcucuuuucagagccaccaaaaaaaaaaaaaaaaaaaaaaaaaaaaaaaaaaaaaaaaaaaaaaaaaaaaaaaaaaaaaaaaaaaaaaaaaaaaaaaaaaaaaaaaaaaaaaaaaaaaa

SEQ ID NO: 19579 - RNA, 2033 nt, Artificial Sequence
  mRNA product Design a-1 (hSL-A100) comprising derived and/or modified sequence from LASV(Lassa virus/H.sapiens-wt/NGA/2018/ISTH_0959;Clade II)__AVV65100__SP-HsALB_NP(2-569) (opt1)
aggagagucccgcagucggcguccagcggcucugcuuguucgugugugugucguugcaggccuuauucaagcuuaccaugaagugggugaccuucaucagccugcucuuccuguucuccagcgccuacuccagcgccuccaaggaggugaaguccuuccuguggacccagagccuccgccgggagcugagcggcuacugcuccaacaucaagcugcaggucgugaaggacgcccaggcgcuccugcacgggcuggacuucagcgagguguccaacguccagcgccucaugcggaagcagaagcgcgacgacagcgaccugaagcggcugcgcgaccucaaccaggccgugaacaaccugguggagcugaaguccacccagcagaaguccauccuccgggucggcacccugaccagcgacgaccugcucacccuggccgccgaccuggagaagcucaagagcaaggugauccgcaccgagcggccccuguccagcgggguguacaugggcaaccuguccacgcagcagcucgagcagcgccgggcccugcugaaccucaucgggauggucggcggcgcgcaggggacccagccgggccgcgacgggguggugcgggucugggacgugaagaaccccgaccugcugaacaaccaguucggcaccaugcccagccucacccuggccugccugacgaagcagggccagguggaccucaacgacgucgugcuggcccugaccgaccucgggcugaucuacaccgccaaguaccccaacuccagcgaccuggaccgccucucccagagccacccgauccugaacaugguggacaccaagaaguccagccugaacaucagcggcuucaacuucucccucggggcggccgucaaggccggcgccugcaugcuggacgggggcaacaugcuggagacgaucaaggugacgccccagaccauggacggcauccucaagagcauccugaaggugaagaagucccuggggauguucgucagcgacacccccggcgagcggaaccccuacgagaacauccucuacaagaucugccuguccggggacggcuggccguacaucgccagccgcaccuccaucguggggcgggcgugggagaacaccaccguggaccuggagagcgacggcaagccccacaaggucggcaccgccggguccaacaagagccuccaguccgccggcuuccccacggggcugaccuacagccagcugaugacccugaaggacuccaugaugcagcucgaccccagcgccaagaccuggaucgacaucgagggccgcccggaggaccccguggagaucgcccuguaccagcccauguccgggugcuacauccacuucuuccgggagcccacggaccugaagcaguucaagcaggacgcgaaguacagccacggcaucgacgucgccgaccucuucccggcccagcccggccugaccuccgccgugaucgaggcccugccccgcaacauggugcugaccugccaggggagcgacgacaucaagcggcuccuggacagccagggccgcaaggacaucaagcucaucgacaucgcgcuguccaagaccgacagccgccgguucgagaacgccgucugggaccagugcaaggaccugugccacaugcacacgggggugguggucgagaagaagaagcgcggcgggaaggaggagaucacgccccacugcgcccucauggacugcaucauguacgacgccgccguguccggcggccugaacaucccggugcugcgggcgguccucccccgcgacaugguguuccggaccagcucccccaaggugguccugugaggacuagucccuguucccagagcccacuuuuuuuucuuuuuuugaaauaaaauagccugucuuucagaucucaaaggcucuuuucagagccaccaaaaaaaaaaaaaaaaaaaaaaaaaaaaaaaaaaaaaaaaaaaaaaaaaaaaaaaaaaaaaaaaaaaaaaaaaaaaaaaaaaaaaaaaaaaaaaaaaaaaa

SEQ ID NO: 19580 - RNA, 2033 nt, Artificial Sequence
  mRNA product Design a-1 (hSL-A100) comprising derived and/or modified sequence from LASV(LASV003-NIG-2008;Clade II)__AIT17581__SP-HsALB_NP(2-569) (opt1)
aggagagucccgcagucggcguccagcggcucugcuuguucgugugugugucguugcaggccuuauucaagcuuaccaugaagugggugaccuucaucagccugcucuuccuguucuccagcgccuacuccagcgccuccaaggaggugaaguccuuccuguggacccagagccuccgccgggagcugagcggcuacugcuccagcaucaagcugcaggucgugaaggacgcccaggcgcuccugcacgggcuggacuucuccgaggugagcaacguccagcgccucaugcggaagcagaagcgcgacgacuccgaccugaagcggcugcgcgaccucaaccaggccgugaacaaccugguggagcucaagagcacccagcagaaguccguccugcgggugggcacccugaccagcgacgaccugcucacccuggccgccgaccuggagaagcucaaguccaaggugauccgcaccgagcggccccugagcuccggggucuacaugggcaaccugagcgcccagcagcucgagcagcgccggacgcugcugaacaugaucgggauggugggcggcgcgcaggggacccagccgggccgcgacggggugguccgggugugggacgugaagaaccccgaccuccugaacaaccaguucggcaccaugcccucccugacccucgccugccugacgaagcaggggcaggucgaccugaacgacguggugcucgcccugaccgaccugggccucaucuacaccgccaaguaccccaacagcuccgaccuggaccgccugagccagagccacccgauccucuccauggucgacaccaagaaguccagccugaacaucagcggcuacaacuucucccugggggcggccgugaaggccggcgccugcaugcucgacgggggcaacaugcuggagacgaucaaggugacgccccagaccauggacggcauccucaagagcauccugaaggucaagaagucccuggggauguucgugagcgacacccccggcgagcggaaccccuacgagaacauccuguacaagaucugccucuccggggacggcuggccguacaucgccagccgcaccuccaucguggggcgggcgugggagaacaccaccgucgaccuggagagcgacggcaagccccagaaggugggcaccgccggguccaacaagagccugcaguccgccggcuuccccacggggcucaccuacagccagcugaugacccugaaggacuccaugaugcagcuggaccccagcgccaagaccuggaucgacaucgagggccgcccggaggaccccgucgagaucgcccucuaccagcccauguccgggugcuacauccacuucuuccgggagcccacggaccugaagcaguucaagcaggacgcgaaguacagccacggcaucgacgugaccgaccuguucccggcccagcccggccucaccagcgccgugaucgaggcccugccccgcaacaugguccugaccugccagggguccgacgacaucaagcggcuccuggacagccagggccgccgcgacaucaagcugaucgacaucgcccucuccaaggcggacagccggcgcuucgagaacgccgugugggaccagugcaaggaccugugccacaugcacacggggguggucguggagaagaagaagcggggcgggaaggaggagaucacgccccacugcgcccugauggacugcaucauguacgacgccgccguguccggcggccucaacaucccgguccugcgcgcggugcugccccgggacaugguguuccgcaccagcucccccaaggucgugcucugaggacuagucccuguucccagagcccacuuuuuuuucuuuuuuugaaauaaaauagccugucuuucagaucucaaaggcucuuuucagagccaccaaaaaaaaaaaaaaaaaaaaaaaaaaaaaaaaaaaaaaaaaaaaaaaaaaaaaaaaaaaaaaaaaaaaaaaaaaaaaaaaaaaaaaaaaaaaaaaaaaaaa

SEQ ID NO: 19581 - RNA, 2033 nt, Artificial Sequence
  mRNA product Design a-1 (hSL-A100) comprising derived and/or modified sequence from LASV(LASV035-NIG-2009;Clade II)__AIT17589__SP-HsALB_NP(2-569) (opt1)
aggagagucccgcagucggcguccagcggcucugcuuguucgugugugugucguugcaggccuuauucaagcuuaccaugaagugggugaccuucaucagccugcucuuccuguucuccagcgccuacuccagcgccuccaaggaggugaaguccuuccuguggacccagagccuccgccgggagcugagcggcuacugcuccagcaucaagcugcaggucgugaaggacgcccaggcgcuccugcacgggcuggacuucuccgaggugagcaacguccagcgccucaugcggaagcagaagcgcgacgacuccgaccugaagcggcugcgcgaccucaaccaggccgugaacaaccugguggagcucaagagcacccagcagaaguccauccugcgggucggcacgcugaccagcgacgaccugcucacccuggccgccgaccuggagaagcucaaguccaaggugauccgcaccgagcggccccugagcuccgggguguacaugggcaaccugagcgcccagcagcucgagcagcgccgggcgcugcugaacaugaucgggauggucggcggcgcccaggggacgcagccgggccgcgacgggguggugcgggucugggacgugaagaaccccgaccuccugaacaaccaguucggcaccaugcccucccugacccucgccugccugaccaagcagggccagguggaccugaacgacgccguccucgcgcugacggaccuggggcucaucuacaccgccaaguaccccaacagcuccgaccuggaccgccugagccagagccacccgauccucaacaugguggacaccaagaaguccagccugaacaucuccggcuacaacuucagccugggggccgccgugaaggccggcgcgugcaugcucgacgggggcaacaugcuggagaccaucaaggucacgccccagaccauggacggcauccugaaguccauccucaaggugaagcggagccuggggauguucguguccgacacccccggcgagcgcaaccccuacgagaacauccuguacaagaucugccucagcggggacggcuggccguacaucgccucccggaccagcaucgucgggcgcgccugggagaacacgaccguggaccuggaguccgacggcaagccccagaaggugggcaccaccgggagcaacaagucccugcagagcgccggcuuccccacggggcucaccuacucccagcugaugacccugaaggacagcaugaugcagcuggaccccuccgccaagaccuggaucgacaucgagggccggccggaggaccccgucgagaucgcgcucuaccagcccaugagcgggugcuacauccacuucuuccgcgagcccacggaccugaagcaguucaagcaggacgccaaguacucccacggcaucgacguggccgaccuguucccggcccagcccggccucaccagcgccgucaucgaggcgcugccccggaacauggugcugaccugccaggggagcgacgacaucaagaagcuccuggacucccagggccgccgcgacaucaagcugaucgacaucgcccucagcaaggccgacucccggaaguucgagaacgccgugugggaccagugcaaggaccugugccacaugcacaccggggucgugguggagaagaagaagcgcggcgggaaggaggagaucacgccccacugcgcccugauggacugcaucauguacgacgcggccgucagcggcggccucaacaucccggugcugcgggccgugcugccccgcgacauggucuuccggaccuccagccccaagguggugcucugaggacuagucccuguucccagagcccacuuuuuuuucuuuuuuugaaauaaaauagccugucuuucagaucucaaaggcucuuuucagagccaccaaaaaaaaaaaaaaaaaaaaaaaaaaaaaaaaaaaaaaaaaaaaaaaaaaaaaaaaaaaaaaaaaaaaaaaaaaaaaaaaaaaaaaaaaaaaaaaaaaaaa

SEQ ID NO: 19582 - RNA, 2033 nt, Artificial Sequence
  mRNA product Design a-1 (hSL-A100) comprising derived and/or modified sequence from LASV(LASV1000-NIG-2009;Clade II)__AIT17783__SP-HsALB_NP(2-569) (opt1)
aggagagucccgcagucggcguccagcggcucugcuuguucgugugugugucguugcaggccuuauucaagcuuaccaugaagugggugaccuucaucagccugcucuuccuguucuccagcgccuacuccagcgccuccaaggaggugaaguccuuccuguggacccagagccuccgccgggagcugagcggcuacugcuccaacaucaagcugcaggucgugaaggacgcccaggcgcuccugcacgggcuggacuucagcgagguguccaacguccagcgccucaugcggaagcagaagcgcgacgacagcgaccugaagcggcugcgcgaccucaaccaggccgugaacaaccugguggagcugaaguccacccagcagaaguccauccuccgggucggcacgcugaccagcgacgaccugcucacccuggccgccgaccuggagaagcucaagagcaaggugauccgcaccgagcggccccuguccagcgggguguacaugggcaaccuguccacgcagcagcucgagcagcgccgggcccugcugaacaugaucgggauggucggcggcgcgcaggggacccagccgggccgcgacgggguggugcgggucugggacgugaagaaccccgaccuccugaacaaccaguucggcaccaugcccagccugacccucgccugccugacgaagcagggccagguggaccugaacgacgucgugcucgcccugaccgaccuggggcucaucuacaccgccaaguaccccaacuccagcgaccuggaccgccugucccagagccacccgauccucaacaugguggacaccaagaaguccagccugaacaucagcggcuacaacuucucccugggggcggccgucaaggccggcgccugcaugcucgacgggggcaacaugcuggagacgaucaaggugacgccccagaccauggacggcauccucaagagcauccugaaggugaagaagucccuggggauguucgucagcgacacccccggcgagcggaaccccuacgagaacauccuguacaagaucugccucuccggggacggcuggccguacaucgccagccgcaccuccaucguggggcgggcgugggagaacaccaccguggaccuggagagcgacggcaagccccagaaggucggcaccgccggguccaacaagagccugcaguccgccggcuuccccacggggcucaccuacagccagcugaugacccugaaggacuccaugaugcagcuggaccccagcgccaagaccuggaucgacaucgagggccgcccggaggaccccguggagaucgcccucuaccagcccgucuccgggugcuacauccacuucuuccgggagcccacggaccugaagcaguucaagcaggacgcgaaguacagccacggcaucgacguggccgaccuguucccggcccagcccggccucaccuccgccgugaucgaggcccugccccgcaacaugguccugaccugccaggggagcgacgacaucaagcggcuccuggacagccagggccgccgcgacaucaagcugaucgacaucgcgcucuccaaggccgacagccggcgcuucgagaacgccgugugggaccagugcaaggaccugugccacaugcacaccgggguggucguggagaagaagaagcggggcgggaaggaggagaucacgccccacugcgcccugauggacugcaucauguacgacgccgcgguguccggcggccucaacaucccgguccugcgcgccgugcugccccgggacaugguguuccgcaccagcucccccaaggucgugcucugaggacuagucccuguucccagagcccacuuuuuuuucuuuuuuugaaauaaaauagccugucuuucagaucucaaaggcucuuuucagagccaccaaaaaaaaaaaaaaaaaaaaaaaaaaaaaaaaaaaaaaaaaaaaaaaaaaaaaaaaaaaaaaaaaaaaaaaaaaaaaaaaaaaaaaaaaaaaaaaaaaaaa

SEQ ID NO: 19583 - RNA, 2033 nt, Artificial Sequence
  mRNA product Design a-1 (hSL-A100) comprising derived and/or modified sequence from LASV(LASV221-NIG-2010;Clade II)__AIT17625__SP-HsALB_NP(2-569) (opt1)
aggagagucccgcagucggcguccagcggcucugcuuguucgugugugugucguugcaggccuuauucaagcuuaccaugaagugggugaccuucaucagccugcucuuccuguucuccagcgccuacuccagcgccuccaaggaggugaaguccuuccuguggacccagagccuccgccgggagcugagcggcuacugcuccagcaucaagcugcaggucgugaaggacgcccaggcgcuccugcacgggcuggacuucuccgaggugagcaacguccagcgccucaugcggaagcagcgccgggacgacuccgaccugaagcgccugcgggaccucaaccaggccgugaacaaccugguggagcucaagagcacccagcagaaguccauccugcgcgucggcacgcugaccagcgacgaccugcucacccuggccgccgaccuggagaagcucaaguccaaggugauccggaccgagcgcccccugagcuccgggguguacaugggcaaccugagcacgcagcagcucgagcagcggcgcgcccugcugaacaugaucgggauggucggcggcgcgcaggggacccagccgggccgggacgggguggugcgcgucugggacgugaagaaccccgaccuccugaacaaccaguucggcaccaugcccucccugacccucgccugccugacgaagcagggccagguggaccugaacgacgccguccucgcccugaccgaccuggggcucaucuacaccgcgaaguaccccaacagcuccgaccuggaccggcugagccagagccacccgauccucaacaugguggacaccaagaaguccagccugaacaucuccggcuacaacuucagccugggggccgccgugaaggccggcgccugcaugcucgacgggggcaacaugcuggagacgaucaaggucacgccccagaccguggacggcauccugaaguccauccucaaggugaagcgcagccuggggauguucgucuccgacacccccggcgagcggaaccccuacgagaacauccuguacaagaucugccucagcggggacggcuggccguacaucgcgucccgcaccagcaucguggggcgggccugggagaacaccaccguggaccuggaguccgacggcaagccccagaaggucggcaccgccgggagcaacaagucccugcagagcgccggcuuccccacggggcucaccuacucccagcugaugacccugaaggacagcaugaugcagcuggaccccuccgccaagaccuggaucgacaucgagggccgcccggaggaccccguggagaucgcgcucuaccagcccaugagcgggugcuacauccacuucuuccgggagcccacggaccugaagcaguucaagcaggacgccaaguacucccacggcaucgacgucgccgaccuguucccggcccagcccggccucaccagcgccgugaucgaggcgcugccccgcaacauggugcugaccugccaggggagcgacgacaucaagcgccuccuggacucccagggccggcgcgacaucaagcugaucgacaucgcccucagcaaggccgacucccggaaguucgagaacgccgucugggaccagugcaaggaccugugccacaugcacaccggggugguggucgagaagaagaagcgcggcgggaaggaggagaucacgccccacugcgcccugauggacugcaucauguacgacgcggccgugagcggcggccucaacaucccggugcugcgggccguccugccccgcgacaugguguuccggaccuccagccccaaggugguccucugaggacuagucccuguucccagagcccacuuuuuuuucuuuuuuugaaauaaaauagccugucuuucagaucucaaaggcucuuuucagagccaccaaaaaaaaaaaaaaaaaaaaaaaaaaaaaaaaaaaaaaaaaaaaaaaaaaaaaaaaaaaaaaaaaaaaaaaaaaaaaaaaaaaaaaaaaaaaaaaaaaaaa

SEQ ID NO: 19584 - RNA, 2033 nt, Artificial Sequence
  mRNA product Design a-1 (hSL-A100) comprising derived and/or modified sequence from LASV(LASV237-NIG-2010;Clade II)__AIT17639__SP-HsALB_NP(2-569) (opt1)
aggagagucccgcagucggcguccagcggcucugcuuguucgugugugugucguugcaggccuuauucaagcuuaccaugaagugggugaccuucaucagccugcucuuccuguucuccagcgccuacuccagcgccuccaaggaggugaaguccuuccuguggacccagagccuccgccgggagcugagcggcuacugcuccaacaucaagcugcaggucgugaaggacgcccaggcgcuccugcacgggcuggacuucagcgagguguccaacguccagcgccucaugcggaagcagaagcgcgacgacagcgaccugaagcggcugcgcgaccucaaccaggccgugaacaaccugguggagcugaaguccacccagcagaaguccauccuccgggucggcacccugaccagcgacgaccugcucacccuggccgccgaccuggagaagcucaagagcaaggugauccgcaccgagcggccccuguccagcgggguguacaugggcaaccuguccacgcagcagcucgagcagcgccgggcccugcugaacaugaucgggauggucggcggcgcgcaggggacccagccgggccgcgacgggguggugcgggucugggacgugaagaaccccgaccuccugaacaaccaguucggcaccaugcccagccugacccucgccugccugacgaagcagggccagguggaccugaacgacgccguccucgcccugaccgaccuggggcucaucuacaccgcgaaguaccccaacuccagcgaccuggaccgccugucccagagccacccgauccucaacaugguggacaucaagaaguccagccugaacaucagcggcuacaacuucucccugggggccgccgugaaggccggcgccugcaugcucgacgggggcaacaugcuggagaccaucaaggucacgccccagaccauggacggcauccucaagagcauccugaaggugaagcggucccuggggauguucgugagcgacacccccggcgagcgcaaccccuacgagaacauccuguacaagaucugccucuccggggacggcuggccguacaucgcgagccggaccuccaucgucgggcgcgccugggagaacacgaccguggaccuggagagcgacggcaagccccagaaggugggcuccgccgggagcaacaagucccugcagagcgccggcuuccccaccgggcucaccuacucccagcugaugacgcugaaggacagcaugaugcagcuggaccccuccgccaagaccuggaucgacaucgagggccggccggaggaccccgucgagaucgcgcucuaccagcccaugagcgggugcuacauccacuucuuccgcgagcccaccgaccugaagcaguucaagcaggacgccaaguacucccacggcaucgacguggccgaccuguucccggcccagcccggccucaccagcgccgucaucgaggcgcugccccggaacauggugcugacgugccaggggagcgacgacaucaagcgccuccuggacucccagggccgccgggacaucaagcugaucgacaucgcccucagcaaggccgacucccgccgguucgagaacgccgugugggaccagugcaaggaccugugccacaugcacaccggggucgugguggagaagaagaagcgcggcgggaaggaggagaucacgccccacugcgcccugauggacugcaucauguacgacgcggccgucagcggcggccucaacaucccggugcugcgggccgugcugccccgcgacauggucuuccggaccuccagccccaagguggugcucugaggacuagucccuguucccagagcccacuuuuuuuucuuuuuuugaaauaaaauagccugucuuucagaucucaaaggcucuuuucagagccaccaaaaaaaaaaaaaaaaaaaaaaaaaaaaaaaaaaaaaaaaaaaaaaaaaaaaaaaaaaaaaaaaaaaaaaaaaaaaaaaaaaaaaaaaaaaaaaaaaaaaa

SEQ ID NO: 19585 - RNA, 2033 nt, Artificial Sequence
  mRNA product Design a-1 (hSL-A100) comprising derived and/or modified sequence from LASV(LASV253-NIG-2011;Clade II)__AIT17671__SP-HsALB_NP(2-569) (opt1)
aggagagucccgcagucggcguccagcggcucugcuuguucgugugugugucguugcaggccuuauucaagcuuaccaugaagugggugaccuucaucagccugcucuuccuguucuccagcgccuacuccagcgccuccaaggaggugaaguccuuccuguggacccagagccuccgccgggagcugagcggcuacugcuccagcaucaagcugcaggucgugaaggacgcccaggcgcuccugcacgggcuggacuucuccgaggugagcaacguccagcgccucaugcggaagcagaagcgcgacgacuccgaccugaagcggcugcgcgaccucaaccaggccgugaacaaccugguggagcucaagagcacccagcagaaguccguccugcgggugggcacccugaccagcgacgaccugcucacccuggccgccgaccuggagaagcucaaguccaaggugauccgcaccgagcggccccugagcuccggggucuacaugggcaaccugagcacgcagcagcucgagcagcgccgggcccugcugaacaugaucgggauggugggcggcgcgcaggggacccagccgggccgcgacggggugguccgggugugggacgugaagaaccccgaccuccugaacaaccaguucggcaccaugcccucccugacccucgccugccugacgaagcaggggcaggucgaccugaacgacguggugcucgcccugaccgaccugggccucaucuacaccgccaaguaccccaacagcuccgaccuggaccgccugagccagagccacccgauccucaacauggucgacaccaagaaguccagccugaacaucuccggcuacaacuucagccugggggcggccgugaaggccggcgccugcaugcucgacgggggcaacaugcuggagacgaucaaggugacgccccagaccauggacggcauccugaaguccauccucaaggucaagaagucccuggggauguucgugagcgacacccccggcgagcggaaccccuacgagaacauccuguacaagaucugccucagcggggacggcuggccguacaucgccucccgcaccagcaucguggggcgggcgugggagaacaccaccgucgaccuggaguccgacggcaagccccagaaggugggcaccgccgggagcaacaagucccugcagagcgccggcuuccccacggggcucaccuacucccagcugaugacccugaaggacagcaugaugcagcuggaccccuccgccaagaccuggaucgacaucgagggccgcccggaggaccccgucgagaucgcccucuaccagcccaugagcgggugcuacauccacuucuuccgggagcccacggaccugaagcaguucaagcaggacgcgaaguacucccacggcaucgacgugaccgaccuguucccggcccagcccggccucaccagcgccgugaucgaggcccugccccgcaacaugguccugaccugccaggggagcgacgacaucaagcggcuccuggacucccagggccgccgcgacaucaagcugaucgacaucgcccucagcaaggcggacucccggcgcuucgagaacgccgugugggaccagugcaaggaccugugccacaugcacacggggguggucguggagaagaagaagcggggcgggaaggaggagaucacgccccacugcgcccugauggacugcaucauguacgacgccgccgugagcggcggccucaacaucccgguccugcgcgcggugcugccccgggacaugguguuccgcaccuccagccccaaggucgugcucugaggacuagucccuguucccagagcccacuuuuuuuucuuuuuuugaaauaaaauagccugucuuucagaucucaaaggcucuuuucagagccaccaaaaaaaaaaaaaaaaaaaaaaaaaaaaaaaaaaaaaaaaaaaaaaaaaaaaaaaaaaaaaaaaaaaaaaaaaaaaaaaaaaaaaaaaaaaaaaaaaaaaa

SEQ ID NO: 19586 - RNA, 2033 nt, Artificial Sequence
  mRNA product Design a-1 (hSL-A100) comprising derived and/or modified sequence from LASV(LASV254-NIG-2011;Clade II)__AIT17675__SP-HsALB_NP(2-569) (opt1)
aggagagucccgcagucggcguccagcggcucugcuuguucgugugugugucguugcaggccuuauucaagcuuaccaugaagugggugaccuucaucagccugcucuuccuguucuccagcgccuacuccagcgccuccaaggaggugaaguccuuccuguggacccagagccuccgccgggagcugagcggcuacugcuccagcaucaagcugcaggucgugaaggacgcccaggcgcuccugcacgggcuggacuucuccgaggugagcaacguccagcgccucaugcggaagcagaagcgcgacgacuccgaccugaagcggcugcgcgaccucaaccaggccgugaacaaccugguggagcucaagagcacccagcagaaguccguccugcgggugggcacgcugaccagcgacgaccugcucacccuggccgccgaccuggagaagcucaaguccaaggugauccgcaccgagcggccccugagcuccggggucuacaugggcaaccugagcacgcagcagcucgagcagcgccgggcccugcugaacaugaucgggauggugggcggcgcgcaggggacccagccgggccgcgacggggugguccgggugugggacgugaagaaccccgaccuccugaacaaccaguucggcaccaugcccucccugacccucgccugccugacgaagcaggggcaggucgaccugaacgacgccgugcucgcccugaccgaccugggccucaucuacaccgcgaaguaccccaacagcuccgaccuggaccgccugagccagagccacccgauccucaacaugguggacaccaagaaguccagccugaacaucuccggcuacaacuucagccugggggccgccgucaaggccggcgccugcaugcucgacgggggcaacaugcuggagacgaucaaggugacgccccagaccauggacggcauccugaaguccauccucaaggugaagaagucccuggggauguucgucagcgacacccccggcgagcggaaccccuacgagaacauccuguacaagaucugccucagcggggacggcuggccguacaucgcgucccgcaccagcaucguggggcgggccugggagaacaccaucguggaccuggaguccgacggcaagccccagaaggucggcaccgccgggagcaacaagucccugcagagcgccggcuuccccaccgggcucacguacucccagcugaugacccugaaggacagcaugaugcagcuggaccccuccgccaagaccuggaucgacaucgagggccgcccggaggaccccguggagaucgcgcucuaccagcccaugagcgggugcuacauccacuucuuccgggagcccaccgaccugaagcaguucaagcaggacgccaaguacucccacggcaucgacgucgccgaccuguucccggcccagcccggccucacgagcgccgugaucgaggcgcugccccgcaacauggugcugaccugccaggggagcgacgacaucaagcggcuccuggacucccagggccgccgcgacaucaagcugaucgacaucgcccucagcaaggccgacucccggcgcuucgagaacgccgucugggaccagugcaaggaccugugccacaugcacaccggggugguggucgagaagaagaagcggggcgggaaggaggagaucacgccccacugcgcccugauggacugcaucauguacgacgcggccgugagcggcggccucaacaucccggugcugcgcgccguccugccccgggacaugguguuccgcaccuccagccccaaggugguccucugaggacuagucccuguucccagagcccacuuuuuuuucuuuuuuugaaauaaaauagccugucuuucagaucucaaaggcucuuuucagagccaccaaaaaaaaaaaaaaaaaaaaaaaaaaaaaaaaaaaaaaaaaaaaaaaaaaaaaaaaaaaaaaaaaaaaaaaaaaaaaaaaaaaaaaaaaaaaaaaaaaaaa

SEQ ID NO: 19587 - RNA, 2033 nt, Artificial Sequence
  mRNA product Design a-1 (hSL-A100) comprising derived and/or modified sequence from LASV(Nig08-04;Clade II)__ADU56611__SP-HsALB_NP(2-569) (opt1)
aggagagucccgcagucggcguccagcggcucugcuuguucgugugugugucguugcaggccuuauucaagcuuaccaugaagugggugaccuucaucagccugcucuuccuguucuccagcgccuacuccagcgccuccaaggaggugaaguccuuccuguggacccagagccuccgccgggagcugagcggcuacugcuccaacaucaagcugcaggucgugaaggacgcccaggcgcuccugcacgggcuggacuucagcgagguguccaacguccagcgccucaugcggaagcagaagcgcgacgacggcgaccugaagcggcugcgcgaccucaaccaggccgugaacaaccugguggagcucaagagcacccagcagaaguccguccugcggguggggacccugaccagcgacgaccugcucacccuggccgccgaccuggagaagcucaaguccaaggugauccgcaccgagcggccccugagcuccggcgucuacauggggaaccugagcacgcagcagcucgagcagcgcaaggcccugcuguccaugaucggcauggugggcggggcgcagggcacccagccggggcgggacggcgugguccgcgugugggacgugaagaaccccgaccuccugaacaaccaguucgggaccaugcccagccugacccucgccugccugacgaagcagggccaggucgaccugaacgacgccgugcucgcccugaccgaccugggccucaucuacaccgcgaaguaccccaacuccagcgaccuggaccggcugucccagagccacccgauccucaacaugguggacaccaagaaguccagccugaacaucagcggguacaacuucucccugggcgccgccgucaaggccggggccugcaugcucgacggcggcaacaugcuggagacgaucaaggugacgccccagaccauggacgggauccucaagagcauccugaaggugaagcgcucccugggcauguucgucagcgacacccccggggagcggaaccccuacgagaacauccuguacaagaucugccucuccggcgacggguggccguacaucgcgagccgcaccuccaucgugggccgggccugggagaacaccaccguggaccuggagagcgacggcaagccccagaaggucgggaccgccggcuccaacaagagccugcaguccgccggguuccccacgggccucaccuacagccagcugaugacccugaaggacuccaugaugcagcuggaccccagcgccaagaccuggaucgacaucgaggggcgcccggaggaccccguggagaucgcgcucuaccagcccauguccggcugcuacauccacuucuuccgggagcccacggaccugaagcaguucaagcaggacgccaaguacagccacggcaucgacgucaccgaccuguucuccgcccagccggggcucaccagcgccgugaucgaggcccugccccgcaacauggugcugaccugccagggcagcgacgacaucaagaagcuccuggacucccaggggcggcgcgacaucaagcugaucgacaucagccucaacaaggcggacucccgccgguucgagaacgccgucugggaccagugcaaggaccugugccacaugcacacgggcgugguggucgagaagaagaagcgcgggggcaaggaggagaucacgccccacugcgcccugauggacugcaucauguucgacgccgccgugagcggcgggcucaacauccccauccugcgggcggugcugccgcgcgacauggucuuccggaccuccagccccaagguggugcucugaggacuagucccuguucccagagcccacuuuuuuuucuuuuuuugaaauaaaauagccugucuuucagaucucaaaggcucuuuucagagccaccaaaaaaaaaaaaaaaaaaaaaaaaaaaaaaaaaaaaaaaaaaaaaaaaaaaaaaaaaaaaaaaaaaaaaaaaaaaaaaaaaaaaaaaaaaaaaaaaaaaaa

SEQ ID NO: 19588 - RNA, 2036 nt, Artificial Sequence
  mRNA product Design a-1 (hSL-A100) comprising derived and/or modified sequence from LASV(GA391;Clade III)__AAA46284__SP-HsALB_NP(2-570) (opt1)
aggagagucccgcagucggcguccagcggcucugcuuguucgugugugugucguugcaggccuuauucaagcuuaccaugaagugggugaccuucaucagccugcucuuccuguucuccagcgccuacuccagcgccuccaaggaggugcgcagcugccuguggacccagucccuccggcgcgagcugagcggcuacugcuccaacaucaagcugcaggucgugaaggacgcccaggcgcuccugcacgggcuggacuucagcgagguguccaacguccagcggcucaugcgcaagcagaagcgggacgacggcgaccugaagcgccugcgggaccucaaccaggccgugaacaaccugguggagcugaaguccacccagcagaaguccguccuccgcguggggacgcugagcuccgacgaccugcucauccuggccgccgaccuggagaagcucaagagcaaggugacccggaccgagcgcccccuguccagcggcgucuacauggggaaccuguccagccagcagcucgaccagcggcgcgcccugcugaacaugaucggcaugaccggcguguccgggggcgggaagggcgcgagcaacgggaucgugcgggucugggacgugaagaacgccgagcuccugaacaaccaguucggcacgaugccgucccugacccucgccugccugaccaagcagggccagguggaccugaacgacgccguccaggcgcucaccgaccuggggcugaucuacacggccaaguaccccaacagcagcgaccucgaccgccugucccagagccaccccauccugaacaugaucgacaccaagaaguccagccucaacaucuccggcuacaacuucagccugggggccgccgugaaggccggcgcgugcaugcuggacggcgggaacaugcucgagaccaucaaggugagcccccagaccauggacggcauccucaagagcauccugaaggucaagaagucccuggggauguucgugagcgacacgccgggcgagcggaaccccuacgagaacauccuguacaagaucugccuguccggggacggcuggagcuacaucgccucccgcaccagcaucgugggccgggccugggagaacaccgucguggaccucgagcaggacaacaagccccagaagaucgggaacggcggguccaacaagagccugcaguccgccggcuucgccgcggggcugaucuacagccagcucaugacccugaaggacuucaagugcuucaaccugauccccaacgccaagacguggauggacaucgagggccgcccggaggaccccguggagaucgcccuguaccagcccuccagcggcugcuacguccacuucuuccgggagcccaccgaccucaagcaguucaagcaggacgccaaguacagccacgggcgcgacgugaccgaccuguucgccgcgcagccgggccugaccuccgccgucaucgaggcccucccccggaacauggugaucacgugccaggggagcgaggacauccgcaagcugcuggagucccagggccgccgggacaucaagcucaucgacaucacccugagcaaggccgacucccgcaaguucgagaacgccgugugggaccaguucaaggaccugugccacaugcacaccggggucgugguggagaagaagaagcggggcggcaaggaggagaucacgccccacugcgcgcucauggacugcaucauguucgacgccgccgucagcgggggccuggacgccaaggugcugcgcgugguccucccccgggacaugguguuccgcaccuccaccccgaaggugguccugugaggacuagucccuguucccagagcccacuuuuuuuucuuuuuuugaaauaaaauagccugucuuucagaucucaaaggcucuuuucagagccaccaaaaaaaaaaaaaaaaaaaaaaaaaaaaaaaaaaaaaaaaaaaaaaaaaaaaaaaaaaaaaaaaaaaaaaaaaaaaaaaaaaaaaaaaaaaaaaaaaaaaa

SEQ ID NO: 19589 - RNA, 2033 nt, Artificial Sequence
  mRNA product Design a-1 (hSL-A100) comprising derived and/or modified sequence from LASV(Nig08-A19;Clade III)__ADU56619__SP-HsALB_NP(2-569) (opt1)
aggagagucccgcagucggcguccagcggcucugcuuguucgugugugugucguugcaggccuuauucaagcuuaccaugaagugggugaccuucaucagccugcucuuccuguucuccagcgccuacuccagcgccuccaaggaggugaaguccuuccuguggacccagucccuccgccgggagcugagcggcuacugcuccaacaucaagcugcaggucgugaaggacgcccaggcgcuccugcacgggcuggacuucagcgagguguccaacguccagcgccucaugcggaagcagaagcgcgacgacggcgaccugaagcggcugcgcgaccucaaccaggccgugaacaaccugguggagcucaagagcacccagcagaaguccguccugcggguggggacccugagcuccgacgaccugcucgugcuggccgccgaccuggagaagcucaagagcaaggucgugcgcaccgagcggccccuguccagcggcaucuacauggggaaccuguccagccagcagcucgaccagcgcaaggcccugcugaacaugaucggcaugaccggcgggaacggcgggcggaacaccacguccgacggcaucgugcgcgucugggacgugaagaacgcggagcuccugaacaaccaguucgggaccaugccgagccugacccucgccugccugaccaagcagggccagguggaccugaacgacgccguccaggcccucacggaccugggccugaucuacaccgcgaaguaccccaacuccagcgaccucgaccggcuggcccagagccaccccauccugaacaugaucgacaccaagaaguccagccucaacaucuccggguacaacuucagccugggcgccgccgugaaggccggggcgugcaugcuggacggcggcaacaugcucgagaccaucaaggugagcccccagacgauggacgggauccucaagagcauccugaaggucaagcgcucccugggcauguucaucagcgacaccccgggggagcggaaccccuacgagaacauccuguacaagaucugccuguccggcgacggguggcccuacaucgccagccgcaccuccaucgugggccgggccugggagaacaccguggucgaccucgagagcgacaacaagccccagaagacgggcaacgggggcuccaacaagagccugcaguccgccggguucgccgcgggccugaccuacagccagcucaugacccugaaggacuccaugcugcagcuggacccgaacgccaagaccuggauggacaucgaggggcgccccgaggaccccguggagaucgcccucuaccagcccagcuccggcugcuacauccacuucuuccgggagccgacggaccugaagcaguucaagcaggacgccaaguacagccacggcaucgacgugaccgaccuguucgccgcgcagcccgggcucaccagcgccgucaucgaggcccugccccgcaacauggugaucacgugccagggcuccgaggacauccggaagcugcucgagagccaggggcgccgcgacaucaagcugaucgacaucucccugagcaaggucgacucccggaaguucgagaacgccgugugggaccaguucaaggaccucugccacaugcacaccggcaucguggucgagaagaagaagcgcgggggcaaggaggagaucacgccccacugcgcccugauggacugcaucauguucgacgcggccgugagcggcgggguggacgccaagguccugcgggccgugcucccgcgcgacaugguguuccggaccuccacccccaaggucgugcugugaggacuagucccuguucccagagcccacuuuuuuuucuuuuuuugaaauaaaauagccugucuuucagaucucaaaggcucuuuucagagccaccaaaaaaaaaaaaaaaaaaaaaaaaaaaaaaaaaaaaaaaaaaaaaaaaaaaaaaaaaaaaaaaaaaaaaaaaaaaaaaaaaaaaaaaaaaaaaaaaaaaaa

SEQ ID NO: 19590 - RNA, 2033 nt, Artificial Sequence
  mRNA product Design a-1 (hSL-A100) comprising derived and/or modified sequence from LASV(G1180-SLE-2010;Clade IV)__AIT17169__SP-HsALB_NP(2-569) (opt1)
aggagagucccgcagucggcguccagcggcucugcuuguucgugugugugucguugcaggccuuauucaagcuuaccaugaagugggugaccuucaucagccugcucuuccuguucuccagcgccuacuccagcgccuccaaggagaucaagagcuuccuguggacccagucccuccgccgggagcugagcggcuacugcuccaacaucaagcuccagguggucaaggacgcccaggcgcugcugcacgggcuggacuucagcgagguguccaacgugcagcgccucaugcggaaggagcgccgggacgacaacgaccugaagcgccugcgggaccucaaccaggccgucaacaaccugguggagcucaagagcacccagcagaaguccauccugcgcgugggcacccugaccagcgacgaccugcucauccuggccgccgaccuggagaagcucaaguccaaggucauccggaccgagcgcccccugagcgccgggguguacaugggcaaccuguccagccagcagcucgaccagcggcgcgcgcugcuguccaugaucgggaugagcuccggcaaccagcgggcccaggccggccgcgacggggugguccgggugugggacgugaagaacgucgagcuccugaacaaccaguucggcaccaugccgagccugacgcucgccugccugaccaagcagggccagguggaccugaacgacgcggugcaggcccucaccgaccuggggcugaucuacaccgccaaguaccccaacacguccgaccucgaccgccugacccagagccaccccauccugaacaugaucgacaccaagaaguccagccucaacaucagcggguacaacuucucccugggcgccgccgucaaggcgggcgccugcaugcuggacgggggcaacaugcucgagaccaucaaggugagcccccagacgauggacgggauccugaaguccauccugaaggugaagaaggcccucggcauguucaucagcgacaccccgggcgagcggaaccccuacgagaacauccuguacaagaucugccuguccggggacggcuggcccuacaucgccagccgcaccuccaucaccgggcgggccugggagaacacggucguggaccucgagagcgacggcaagccccagaaggcgggguccaacaacagcaacaagucccugcagagcgugggcuucaccgccggccugaccuacucccagcucaugacccugaaggacgccaugcugcagcuggacccgaacgccaagacguggauggacaucgaggggcgccccgaggaccccgucgagaucgcccucuaccagcccagcuccggcugcuacauccacuucuuccgggagccgaccgaccugaagcaguucaagcaggacgcgaaguacagccacgggaucgacgugaccgaccuguucgccgcccagcccggccucaccuccgccgugaucgacgcccugccccgcaacauggucaucacgugccaggggagcgacgacauccgcaagcugcucgagagccagggccggaaggacaucaagcugaucgacaucgcgcuguccaagaccgacagccgcaaguacgagaacgccgugugggaccaguacaaggaccucugccacaugcacaccggcgucgugguggagaagaagaagcgcgggggcaaggaggagaucacgccccacugcgcccugauggacugcaucauguucgacgccgcggucuccgggggccugaacaccagcgugcuccgggccgugcugccgcgggacauggucuuccgcaccuccacgccccggguggugcugugaggacuagucccuguucccagagcccacuuuuuuuucuuuuuuugaaauaaaauagccugucuuucagaucucaaaggcucuuuucagagccaccaaaaaaaaaaaaaaaaaaaaaaaaaaaaaaaaaaaaaaaaaaaaaaaaaaaaaaaaaaaaaaaaaaaaaaaaaaaaaaaaaaaaaaaaaaaaaaaaaaaaa

SEQ ID NO: 19591 - RNA, 2033 nt, Artificial Sequence
  mRNA product Design a-1 (hSL-A100) comprising derived and/or modified sequence from LASV(G1442-SLE-2011;Clade IV)__AIT17181__SP-HsALB_NP(2-569) (opt1)
aggagagucccgcagucggcguccagcggcucugcuuguucgugugugugucguugcaggccuuauucaagcuuaccaugaagugggugaccuucaucagccugcucuuccuguucuccagcgccuacuccagcgccuccaaggaggugaaguccuuccuguggacccagagccuccgccgggagcugagcggcuacugcuccaacaucaagcugcaggucgugaaggacgcccaggcgcuccugcacgggcuggacuucagcgagguguccaacguccagcgccucaugcggaagcagcgccgggacgacaacgaccugaagcgccugcgggaccucaaccaggccgugaacaaccugguggagcucaagagcacccagcagaaguccguccugcgcgugggcacccugaccagcgacgaccugcucgugcuggccgccgaccuggagaagcucaaguccaaggucauccggaccgagcgcccccugagcgccgggguguacaugggcaaccuguccagccagcagcucgaccagcggcgcgcgcugcugaacaugaucgggauguccggcggcauccaggggacccggacgggccgcgacggggugguccgggugugggacgugaagaacgccgaccuccugaacaaccaguucggcaccaugccgagccugacccucgccugccugaccaagcaggggcaggucgaccugaacgacguggugcaggcccucacggaccugggccugaucuacaccgcgaaguaccccaacgccuccgaccucgaccgccugacccagagccaccccauccugaacaugaucgacaccaagaaguccagccucaacaucagcggcuacaacuucucccugggggccgccgucaaggccggcgcgugcaugcuggacgggggcaacaugcucgagacgaucaaggugagcccccagaccauggacggcauccugaaguccauccugaaggugaagaagacccucgggauguucaucagcgacaccccgggcgagcggaaccccuacgagaacauccuguacaagaucugccuguccggggacggcuggcccuacaucgccagccgcacguccaucaccgggcgggccugggagaacaccgucguggaccucgagagcgacggcaagccccagaaggccggcuccaacaacagcaacaagucccugcagagcgccggguucgcggccggccugaccuacucccagcucaugacgcugaaggacgccaugcugcagcuggacccgaacgccaagaccuggauggacaucgaggggcgccccgaggaccccguggagaucgcccucuaccagcccagcuccggcugcuacauccacuucuuccgggagccgaccgaccugaagcaguucaagcaggacgcgaaguacagccacgggaucgacgucaccgaccuguucgccgcccagcccggccucacguccgccgugaucgaggcccugccccgcaacauggucaucacgugccagggcagcgacgacaucaagaagcugcucgagucccaggggcgcaaggacaucaagcugaucgacaucgcgcugagcaagaccgacagccggaaguacgagaacgccgugugggaccaguacaaggaccucugccacaugcacaccggcguggucguggagaagaagaagcgcgggggcaaggaggagaucaccccgcacugcgcccugauggacugcaucauguucgacgccgcgguguccgggggccugaacacccucguccugcgggccgugcugccccgcgacaugguguuccggaccagcacgccccgcgucgugcucugaggacuagucccuguucccagagcccacuuuuuuuucuuuuuuugaaauaaaauagccugucuuucagaucucaaaggcucuuuucagagccaccaaaaaaaaaaaaaaaaaaaaaaaaaaaaaaaaaaaaaaaaaaaaaaaaaaaaaaaaaaaaaaaaaaaaaaaaaaaaaaaaaaaaaaaaaaaaaaaaaaaaa

SEQ ID NO: 19592 - RNA, 2033 nt, Artificial Sequence
  mRNA product Design a-1 (hSL-A100) comprising derived and/or modified sequence from LASV(G3010-SLE-2013;Clade IV)__AIT17345__SP-HsALB_NP(2-569) (opt1)
aggagagucccgcagucggcguccagcggcucugcuuguucgugugugugucguugcaggccuuauucaagcuuaccaugaagugggugaccuucaucagccugcucuuccuguucuccagcgccuacuccagcgccuccaaggagaucaagagcuuccuguggacccagucccuccgccgggagcugagcggcuacugcuccaacaucaagcuccagguggucaaggacgcccaggcgcugcugcacgggcuggacuucagcgagguguccaacgugcagcgccucaugcggaaggagcgccgggacgacaacgaccugaagcgccugcgggaccucaaccaggccgucaacaaccugguggagcucaagagcacccagcagaaguccauccugcgcgugggcacccugaccagcgacgaccugcucauccuggccgccgaccuggagaagcucaaguccaaggucacccggaccgagcgcccccugagcgccgggguguacaugggcaaccuguccagccagcagcucgaccagcggcgcgcgcugcuguccaugaucgggaugagcuccggcgugcagggcgcccgggccgggcgcgacggcgucgugcgggugugggacgucaagaacgccgagcuccugaacaaccaguucgggacgaugccgagccugacccucgcgugccugaccaagcagggccagguggaccugaacgacgugguccaggcccucaccgaccuggggcugaucuacacggccaaguaccccaacaccuccgaccucgaccgccugacccagagccaccccauccugaacaugaucgacaccaagaaguccagccucaacaucagcggcuacaacuucucccugggcgccgccgugaaggcgggggccugcaugcuggacggcgggaacaugcucgagacgaucaaggugagcccccagaccauggacggcauccugaaguccauccugaaggucaagaaggcccucggcauguucaucagcgagaccccgggggagcggaaccccuacgagaacauccuguacaagaucugccuguccggcgacggguggcccuacaucgccagccgcaccuccaucacgggccgggccugggagaacaccgugguggaccucgagagcgacgggaagccccagaaggcgggcuccaacaacagcaacaagucccugcagagcgccggcuucaccgccgggcugaccuacucccagcucaugacgcugaaggacgccaugcugcagcuggacccgaacgccaagaccuggauggacaucgagggccgccccgaggaccccgucgagguggcgcucuaccagcccagcuccgggugcuacauccacuucuuccgggagccgaccgaccugaagcaguucaagcaggacgccaaguacagccacggcaucgacgugaccgaccuguucgccgcccagcccgggcucacguccgccgucaucgacgcgcugccccgcaacauggugaucacgugccagggcagcgacgacaucaagaagcugcucgagagccagggccgcaaggacaucaagcugaucgacaucgcccuguccaagaccgacagccggaaguacgagaacgccgucugggaccaguacaaggaccucugccacaugcacaccggggugguggucgagaagaagaagcgcggcgggaaggaggagaucaccccgcacugcgcccugauggacugcaucauguucgacgcggccguguccggcgggcugaacaccagcgugcuccgggccguccugccccgcgacaugguguuccggaccuccacgccccgcgugguccugugaggacuagucccuguucccagagcccacuuuuuuuucuuuuuuugaaauaaaauagccugucuuucagaucucaaaggcucuuuucagagccaccaaaaaaaaaaaaaaaaaaaaaaaaaaaaaaaaaaaaaaaaaaaaaaaaaaaaaaaaaaaaaaaaaaaaaaaaaaaaaaaaaaaaaaaaaaaaaaaaaaaaa

SEQ ID NO: 19593 - RNA, 2033 nt, Artificial Sequence
  mRNA product Design a-1 (hSL-A100) comprising derived and/or modified sequence from LASV(G502-SLE-2009;Clade IV)__AIT17127__SP-HsALB_NP(2-569) (opt1)
aggagagucccgcagucggcguccagcggcucugcuuguucgugugugugucguugcaggccuuauucaagcuuaccaugaagugggugaccuucaucagccugcucuuccuguucuccagcgccuacuccagcgccuccaaggagaucaagagcuuccuguggacccagucccuccgccgggagcugagcggcuacugcuccaacaucaagcuccagguggucaaggacgcccaggcgcugcugcacgggcuggacuucagcgagguguccaacgugcagcgccucaugcggaaggagcgccgggacgacaacgaccugaagcgccugcgggaccucaaccaggccgucaacaaccugguggagcucaagagcacccagcagaaguccauccugcgcgugggcacccugaccagcgacgaccugcucauccuggccgccgaccuggagaagcucaaguccaaggucauccggaccgagcgcccccugagcgccgggguguacaugggcaaccuguccagccagcagcucgaccagcggcgcgcgcugcuguccaugaucgggaugagcggcggcaaccagggggugcgggccggcaaggacggggucgugcgcgugugggacgucaagaacgccgagcuccugaacaaccaguucggcaccaugccgucccugacgcucgccugccugaccaagcagggccagguggaccugaacgacgcggugcaggcccucaccgaccuggggcugaucuacaccgccaaguaccccaacacgagcgaccucgaccggcugacccagucccaccccauccugaacaugaucgacaccaagaaguccagccucaacaucuccggcuacaacuucagccugggggccgccgucaaggcgggcgccugcaugcuggacgggggcaacaugcucgagaccaucaaggugagcccccagacgauggacggcauccucaagagcauccugaaggugaagaaggcccuggggauguucaucuccgacaccccgggcgagcgcaaccccuacgagaacauccuguacaagaucugccugagcggggacggcuggcccuacaucgccucccggaccagcaucaccgggcgcgccugggagaacacggucguggaccucgaguccgacggcaagccccagaaggcgggcagcaacaacuccaacaagagccugcaguccgccggguucaccgccggccugaccuacagccagcucaugacccugaaggacgccaugcugcagcuggacccgaacacgaagaccuggauggacaucgaggggcggcccgaggaccccguggagaucgcccucuaccagcccuccagcggcugcuacauccacuucuuccgcgagccgaccgaccugaagcaguucaagcaggacgcgaaguacucccacgggaucgacgucaccgaccuguucgccgcccagcccggccucacgagcgccgugaucgacgcccugccccggaacauggugaucacgugccagggcuccgacgacauccgcaagcugcucgagagccaggggcgcaaggacaucaagcugaucgacaucgcgcugaacaagaccgacagccggaaguacgagaacgccgucugggaccaguacaaggaccucugccacaugcacaccggcguggucguggagaagaagaagcgcgggggcaaggaggagaucaccccgcacugcgcccugauggacugcaucauguucgacgccgcgguguccgggggccugaacaccagcguccuccgggccgugcugccccgcgacaugguguuccggaccuccacgccccgcgucgugcugugaggacuagucccuguucccagagcccacuuuuuuuucuuuuuuugaaauaaaauagccugucuuucagaucucaaaggcucuuuucagagccaccaaaaaaaaaaaaaaaaaaaaaaaaaaaaaaaaaaaaaaaaaaaaaaaaaaaaaaaaaaaaaaaaaaaaaaaaaaaaaaaaaaaaaaaaaaaaaaaaaaaaa

SEQ ID NO: 19594 - RNA, 2033 nt, Artificial Sequence
  mRNA product Design a-1 (hSL-A100) comprising derived and/or modified sequence from LASV(G733-SLE-2010;Clade IV)__AIT17155__SP-HsALB_NP(2-569) (opt1)
aggagagucccgcagucggcguccagcggcucugcuuguucgugugugugucguugcaggccuuauucaagcuuaccaugaagugggugaccuucaucagccugcucuuccuguucuccagcgccuacuccagcgccuccaaggagaucaagagcuuccuguggacccagucccuccgccgggagcugagcggcuacugcuccaacaucaagcuccagguggucaaggacgcccaggcgcugcugcacgggcuggacuucagcgagguguccaacgugcagcgccucaugcggaaggagcgccgggacgacaacgaccugaagcgccugcgggaccucaaccaggccgucaacaaccugguggagcucaagagcacccagcagaaguccgugcugcgcgucggcacccugaccagcgacgagcugcucgugcuggccgccgaccuggagaagcucaaguccaaggugauccggaccgagcgcccccugagcgccggggucuacaugggcaaccuguccagccagcagcucgaccagcggcgcgcgcugcuguccaugaucgggaugagcggcggcaaccagggggcccggaccggccgcgacgggguggugcgggucugggacgugaagaacgccgagcuccugaacaaccaguucggcaccaugccgucccugacccucgccugccugaccaagcagggccagguggaccugaacgacgcgguccaggcccucaccgaccuggggcugaucuacacggccaaguaccccaacaccagcgaccucgaccgccugacccagucccaccccauccugaacaugaucgacaccaagaaguccagccucaacaucuccggcuacaacuucagccugggggccgccgugaaggcgggcgccugcaugcuggacgggggcaacaugcucgagacgaucaaggugagcccccagaccauggacggcauccucaagagcauccugaaggucaagaaggcccuggggauguucaucuccgacaccccgggcgagcggaaccccuacgagaacauccuguacaagaucugccugagcggggacggcuggcccuacaucgccucccgcaccagcaucacggggcgggccugggagaacaccgugguggaccucgaguccgacggcaagccccagaaggcgggcagcaacaacuccaacaagagccugcaguccgccggguucaccgccggccugaccuacagccagcucaugacgcugaaggacgccaugcugcagcuggacccgaacgccaagaccuggauggacaucgaggggcgccccgaggaccccgucgagaucgcgcucuaccagcccuccagcggcugcuacauccacuucuuccgggagccgaccgaccugaagcaguucaagcaggacgccaaguacucccacgggaucgacgugaccgaccuguucgccgcccagcccggccucacgagcgccgugaucgacgcgcugccccgcaacauggucaucacgugccagggcuccgacgacauccgcaagcugcucgagagccaggggcggaaggacaucaagcugaucgacaucgcccugagcaagaucgacucccgcaaguacgagaacgccgugugggaccaguacaaggaccucugccacaugcacaccggcgucgugguggagaagaagaagcgcgggggcaaggaggagaucacgccccacugcgcccugauggacugcaucauguucgacgcggccgucagcgggggccugaacucccucgugcugcgggccgugcugccgcgggacauggucuuccgcaccagcacgccccggguggugcucugaggacuagucccuguucccagagcccacuuuuuuuucuuuuuuugaaauaaaauagccugucuuucagaucucaaaggcucuuuucagagccaccaaaaaaaaaaaaaaaaaaaaaaaaaaaaaaaaaaaaaaaaaaaaaaaaaaaaaaaaaaaaaaaaaaaaaaaaaaaaaaaaaaaaaaaaaaaaaaaaaaaaa

SEQ ID NO: 19595 - RNA, 2033 nt, Artificial Sequence
  mRNA product Design a-1 (hSL-A100) comprising derived and/or modified sequence from MOPV/LASV reassortant(IGS-1;Clade IV)__AFY05578__SP-HsALB_NP(2-569) (opt1)
aggagagucccgcagucggcguccagcggcucugcuuguucgugugugugucguugcaggccuuauucaagcuuaccaugaagugggugaccuucaucagccugcucuuccuguucuccagcgccuacuccagcgccuccaaggagaucaagagcuuccuguggacccagucccuccgccgggagcugagcggcuacugcuccaacaucaagcuccagguggucaaggacgcccaggcgcugcugcacgggcuggacuucagcgagguguccaacgugcagcgccucaugcggaaggagcgccgggacgacaacgaccugaagcgccugcgggaccucaaccaggccgucaacaaccugguggagcucaagagcacccagcagaaguccauccugcgcgugggcacccugaccagcgacgaccugcucauccuggccgccgaccuggagaagcuccgguccaaggucauccgcaccgagcggccccugagcgccgggguguacaugggcaaccuguccagccagcagcucgaccagcgccgggcgcugcugaacaugaucgggauguccggcggcaaccagggggcccgcgccggccgggacggggugguccgcgugugggacgugaagaacgccgagcuccugagcaaccaguucggcaccaugccgucccugacgcucgcgugccugaccaagcaggggcaggucgaccugaacgacgccgugcaggcccucaccgaccugggccugaucuacaccgccaaguaccccaacacgagcgaccucgaccggcugacccagucccaccccauccugaacaugaucgacaccaagaaguccagccucaacaucuccggcuacaacuucagccugggggccgcggugaaggccggcgccugcaugcuggacgggggcaacaugcucgagaccaucaaggucagcccccagacgauggacggcauccucaagagcauccugaaggugaagaaggcccuggggauguucaucuccgacaccccgggcgagcgcaaccccuacgagaacauccuguacaagaucugccugagcggggacggcuggcccuacaucgccucccggaccagcaucaccgggcgcgcgugggagaacacgguggucgaccucgaguccgacggcaagccccagaaggccgacagcaacaacuccagcaagucccugcagagcgccggcuucaccgccgggcugaccuacucccagcucaugacccugaaggacgccaugcugcagcuggacccgaacgcgaagacguggauggacaucgagggccggcccgaggaccccguggagaucgcccucuaccagcccagcuccgggugcuacauccacuucuuccgcgagccgaccgaccugaagcaguucaagcaggacgccaaguacagccacggcaucgacgugaccgaccuguucgccacccagcccgggcucacguccgccgucaucgacgcgcugccccgcaacauggugaucacgugccagggcagcgacgacauccggaagcugcucgagagccagggccgcaaggacaucaagcugaucgacaucgaccuguccaagaccgacagccggaaguacgagaacgccgugugggaccaguacaaggaccucugccacaugcacaccggggucguggucgagaagaagaagcgcggcgggaaggaggagaucaccccgcacugcgcccugauggacugcaucauguucgacgccgcgguguccggcgggcugaacaccagcgugcuccgggccguccugccccgcgacaugguguuccggaccuccacgccccgcgugguccugugaggacuagucccuguucccagagcccacuuuuuuuucuuuuuuugaaauaaaauagccugucuuucagaucucaaaggcucuuuucagagccaccaaaaaaaaaaaaaaaaaaaaaaaaaaaaaaaaaaaaaaaaaaaaaaaaaaaaaaaaaaaaaaaaaaaaaaaaaaaaaaaaaaaaaaaaaaaaaaaaaaaaa

SEQ ID NO: 19596 - RNA, 2033 nt, Artificial Sequence
  mRNA product Design a-1 (hSL-A100) comprising derived and/or modified sequence from LASV(LM765-SLE-2012;Clade IV)__AIT17815__SP-HsALB_NP(2-569) (opt1)
aggagagucccgcagucggcguccagcggcucugcuuguucgugugugugucguugcaggccuuauucaagcuuaccaugaagugggugaccuucaucagccugcucuuccuguucuccagcgccuacuccagcgccuccaaggagaucaagagcuuccuguggacccagucccuccgccgggagcugagcggcuacugcuccaacaucaagcuccagguggucaaggacgcccaggcgcugcugcacgggcuggacuucagcgagguguccaacgugcagcgccucaugcggaaggagcgccgggacgacaacgaccugaagcgccugcgggaccucaaccaggccgucaacaaccugguggagcucaagagcacccagcagaaguccauccugcgcgugggcacccugaccagcgacgaccugcucauccuggccgccgaccuggagaagcucaaguccaaggucacccggaccgagcgcccccugagcgccgggguguacaugggcaaccuguccagccagcagcucgaccagcggcgcgcgcugcuggacaugaucgggauguccggcagcaaccagggcgcccgggccgggcgcgacggcgugguccgggugugggacgugaagaacgccgagcuccugaacaaccaguucgggacgaugccgucccugacccucgcgugccugaccaagcagggccaggucgaccugaacgacgccgugcaggcccucaccgaccuggggcugaucuacacggccaaguaccccaacaccagcgaccucgaccgccugacccagucccaccccauccugaacaugaucgacaccaagaaguccagccucaacaucuccggcuacaacuucagccugggcgccgcggugaaggccggggccugcaugcuggacggcgggaacaugcucgagacgaucaaggucagcccccagaccauggacggcauccucaagagcauccugaaggugaagaaggcccugggcauguucaucuccgacgccccgggggagcggaaccccuacgagaacauccuguacaagaucugccugagcggcgacggguggcccuacaucgcgucccgcaccagcaucaccggccgggccugggagaacacgguggucgaccucgaguccgacgggaagccccagaaggccggcagcaacggcuccaacaagagccugcaguccgccggguucaccgccggccugaccuacagccagcucaugacccugaaggacgcgaugcugcagcuggacccgaacgccaagacguggauggacaucgaggggcgccccgaggaccccguggagaucgcccucuaccagcccuccagcggcugcuacauccacuucuuccgggagccgaccgaccugaagcaguucaagcaggacgccaaguacucccacgggaucgacgugaccgaccuguucgccgcgcagcccggccucaccagcgccgucaucgacgcccugccccgcaacauggugaucacgugccagggcuccgacgacauccgcaagcuguucgagagccaggggcggaaggacaucaagcucaucgacaucgcccugagcaagaccgacucccgcaaguacgagaacgcggugugggaccaguacaaggaccugugccacaugcacaccggcaucgucguggagaagaagaagcgcgggggcaaggaggagaucacgccccacugcgcccucauggacugcaucauguucgacgccgccgucagcgggggccugaacaccuccgugcugcgggccgugcucccgcgggacauggucuuccgcaccagcacgccccggguggugcugugaggacuagucccuguucccagagcccacuuuuuuuucuuuuuuugaaauaaaauagccugucuuucagaucucaaaggcucuuuucagagccaccaaaaaaaaaaaaaaaaaaaaaaaaaaaaaaaaaaaaaaaaaaaaaaaaaaaaaaaaaaaaaaaaaaaaaaaaaaaaaaaaaaaaaaaaaaaaaaaaaaaaa

SEQ ID NO: 19597 - RNA, 2033 nt, Artificial Sequence
  mRNA product Design a-1 (hSL-A100) comprising derived and/or modified sequence from LASV(LM776-SLE-2012;Clade IV)__AIT17825__SP-HsALB_NP(2-569) (opt1)
aggagagucccgcagucggcguccagcggcucugcuuguucgugugugugucguugcaggccuuauucaagcuuaccaugaagugggugaccuucaucagccugcucuuccuguucuccagcgccuacuccagcgccuccaaggagaucaagagcuuccuguggacccagucccuccgccgggagcugagcuccuacugcagcaacaucaagcuccagguggucaaggacgcccaggcgcugcugcacggccuggacuucuccgaggugagcaacgugcagcgccucaugcggaaggagcgccgggacgacaacgaccugaagcgccugcgggaccucaaccaggccgucaacaaccugguggagcugaaguccacccagcagaaguccauccuccgcguggggacccugaccuccgacgaccugcucauccuggccgccgaccuggagaagcucaagagcaaggucacccggaccgagcgcccccuguccgccggcguguacauggggaaccugagcucccagcagcucgaccagcggcgcgcgcugcugagcaugaucggcauguccgggagcaaccagggcgcccgggccggccgcgacggggugguccgggugugggacgugaagaacgccgagcuccugaacaaccaguucggcacgaugccgucccugacccucgcgugccugaccaagcaggggcaggucgaccugaacgacgccgugcaggcccucaccgaccugggccugaucuacacggccaaguaccccaacaccagcgaccucgaccgccugacccagagccaccccauccugaacaugaucgacaccaagaaguccagccucaacaucuccggguacaacuucagccugggcgccgcggugaaggccggcgccugcaugcuggacgggggcaacaugcucgagacgaucaaggucagcccccagaccauggacgggauccucaagagcauccugaaggugaagaaggcccugggcauguucaucuccgacaccccgggcgagcggaaccccuacgagaacauccuguacaagaucugccugagcggggacggcuggcccuacaucgccucccgcaccagcaucacggggcgggcgugggagaacaccguggucgaccucgaguccgacggcaagccccagaaggccgggagcaacaacuccaacaagagccugcaguccgccggcuucaccgccggccugaccuacagccagcucaugacgcugaaggacgccaugcugcagcuggacccgaacgcgaagaccuggauggacaucgaggggcgccccgaggaccccguggagguggcccucuaccagcccuccagcggcugcuacauccacuucuuccgggagccgaccgaccugaagcaguucaagcaggacgccaaguacucccacgggaucgacgucaccgaccuguucgccgcccagcccggccucacgagcgcggugaucgacgcccugccccgcaacauggugaucacgugccaggggagcgacgacauccgcaagcugcucgagucccagggccggaaggacaucaagcugaucgacaucgcccugagcaagaccgacucccgcaaguacgagaacgccgucugggaccaguacaaggaccucugccacaugcacaccggcguggucguggagaagaagaagcgcgggggcaaggaggagaucaccccgcacugcgcgcugauggacugcaucauguucgacgccgccgugagcgggggccugaacaccuccguccuccgggccgugcugccccgggacaugguguuccgcaccagcacgccccgggucgugcugugaggacuagucccuguucccagagcccacuuuuuuuucuuuuuuugaaauaaaauagccugucuuucagaucucaaaggcucuuuucagagccaccaaaaaaaaaaaaaaaaaaaaaaaaaaaaaaaaaaaaaaaaaaaaaaaaaaaaaaaaaaaaaaaaaaaaaaaaaaaaaaaaaaaaaaaaaaaaaaaaaaaaa

SEQ ID NO: 19598 - RNA, 2033 nt, Artificial Sequence
  mRNA product Design a-1 (hSL-A100) comprising derived and/or modified sequence from LASV(Mad39;Clade IV)__ANH09723__SP-HsALB_NP(2-569) (opt1)
aggagagucccgcagucggcguccagcggcucugcuuguucgugugugugucguugcaggccuuauucaagcuuaccaugaagugggugaccuucaucagccugcucuuccuguucuccagcgccuacuccagcgccuccaaggagaucaagagcuuccuguggacccagucccuccgccgggagcugagcggcuacugcuccaacaucaagcuccagguggucaaggacgcccaggcgcugcugcacgggcuggacuucagcgagguguccaacgugcagcgccucaugcggaagcagcgccgggacgacaacgaccugaagcgccugcgggaccucaaccaggccgucaacaaccugguggagcugaaguccacccagcagaaguccgugcuccgcgucggcacgcugaccagcgacgaccugcucacccuggccgccgaccuggagaagcucaaguccaaggugacccggacggagcgcccccugaccgccgggguguacaugggcaaccugagcucccagcagcucgaccagcggcgcgcgcugcugaacaugaucgggaugagcggcggcaaccagggggcccggaccggccgcgacggggucgugcgggugugggacgucaagaacgccgagcuccugaacaaccaguucggcaccaugccgucccugacgcucgccugccugaccaagcagggccagguggaccugaacgacgugguccaggcgcucaccgaccuggggcugaucuacaccgccaaguaccccaacacgagcgaccucgaccgccugacccagucccaccccauccugaacaugaucgacaccaacaagagcucccucaacaucagcggcuacaacuucagccugggggccgccgugaaggccggcgcgugcaugcuggacgggggcaacaugcucgagaccaucaaggugagcccccagacgauggacggcauccucaagagcauccugaaggucaagaagucccuggggauguucaucagcgacaccccgggcgagcggaaccccuacgagaacauccuguacaagaucugccuguccggggacggcuggcccuacaucgccagccgcaccuccaucaccgggcgggccugggagaacacggugguggaccucgagagcggcggcaagccccagaaggccggguccaacaacagcaacaagucccugcagagcgccggcuucgcggccgggcugaccuacucccagcucaugacccugaaggacgccaugcugcagcuggacccgaacgccaagaccuggauggacaucgagggccgccccgaggaccccgucgagaucgcccucuaccagcccaucagcgggugcuacauccacuucuuccgggagccgacggaccugaagcaguucaagcaggacgcgaaguacucccacggcaucgacgugaccgaccuguucgccgcccagcccggccucaccagcgccgugaucgaggcccugccccgcaacauggucaucacgugccagggguccgacgacauccgcaagcuguucgagagccagggccggaaggacaucaagcucaucgacaucgcgcuguccaagaccgacagccgcaaguacgagaacgccgugugggaccaguacaaggaccugugccacaugcacaccggggucgugguggagaagaagaagaagggcgggaaggaggagaucacgccccacugcgcccucauggacugcaucauguucgacgccgcggucagcggcggccugaacacccuggugcuccgggccgugcugccgcgcgacauggucuuccggaccuccacccccaagguggugcugugaggacuagucccuguucccagagcccacuuuuuuuucuuuuuuugaaauaaaauagccugucuuucagaucucaaaggcucuuuucagagccaccaaaaaaaaaaaaaaaaaaaaaaaaaaaaaaaaaaaaaaaaaaaaaaaaaaaaaaaaaaaaaaaaaaaaaaaaaaaaaaaaaaaaaaaaaaaaaaaaaaaaa

SEQ ID NO: 19599 - RNA, 2033 nt, Artificial Sequence
  mRNA product Design a-1 (hSL-A100) comprising derived and/or modified sequence from LASV(Z0947-SLE-2011;Clade IV)__AIT17841__SP-HsALB_NP(2-569) (opt1)
aggagagucccgcagucggcguccagcggcucugcuuguucgugugugugucguugcaggccuuauucaagcuuaccaugaagugggugaccuucaucagccugcucuuccuguucuccagcgccuacuccagcgccuccaaggagaucaagagcuuccuguggacccagucccuccgccgggagcugagcggcuacugcuccaacaucaagcuccagguggucaaggacgcccaggcgcugcugcacgggcuggacuucagcgagguguccaacgugcagcgccucaugcggaaggagcgccgggacgacaacgaccugaagcgccugcgggaccucaaccaggccgucaacaaccugguggagcucaagagcacccagcagaaguccauccugcgcgugggcacccugaccagcgacgaccugcucauccuggccgccgaccuggagaagcucaaguccaaggucacccggaccgagcgcccccugagcgccgggguguacaugggcaaccuguccagccagcagcucgaccagcggcgcgcgcugcugaacaugaucgggauguccggcagcaaccagggcgcccggacggggcgcgacggcgugguccgggugugggacgugaagaacgccgagcuccugaacaaccaguucgggaccaugccgucccugacccucgccugccugaccaagcagggccaggucgaccugaacgacgcggugcaggcccucacggaccuggggcugaucuacaccgccaaguaccccaacaccagcgaccucgaccgccugacccagucccaccccauccugaacaugaucgacacgaagaaguccagccucaacaucuccggcuacaacuucagccugggcgccgccgugaaggcgggggccugcaugcuggacggcgggaacaugcucgagaccaucaaggucagcccccagaccauggacggcauccucaagagcauccugaaggugaagaaggcccugggcauguucaucuccgacgccccgggggagcggaaccccuacgagaacauccuguacaagaucugccugagcggcgacggguggcccuacaucgccucccgcaccagcaucacgggccgggcgugggagaacaccguggucgaccucgaguccgacgggaagccccagaaggccggcagcaacggcuccaacaagagccugcaguccgccggguucaccgccggccugaccuacagccagcucaugacgcugaaggacgccaugcugcagcuggacccgaacgcgaagaccuggauggacaucgaggggcgccccgaggaccccguggagaucgcccucuaccagcccuccagcggcugcuacauccacuucuuccgggagccgaccgaccugaagcaguucaagcaggacgccaaguacucccacgggaucgacgugaccgaccuguucgccgcccagcccggccucacgagcgcggucaucgacgcccugccccgcaacauggugaucacgugccagggcuccgacgacauccgcaagcuguucgagagccaggggcggaaggacaucaagcucaucgacaucgcccugagcaagaccgacucccgcaaguacgagaacgccgugugggaccaguacaaggaccugugccacaugcacaccggcaucgucguggagaagaagaagcgcgggggcaaggaggagaucaccccgcacugcgcgcucauggacugcaucauguucgacgccgccgucagcgggggccugaacaccuccgugcugcgggccgugcucccccgggacauggucuuccgcaccagcacgccccggguggugcugugaggacuagucccuguucccagagcccacuuuuuuuucuuuuuuugaaauaaaauagccugucuuucagaucucaaaggcucuuuucagagccaccaaaaaaaaaaaaaaaaaaaaaaaaaaaaaaaaaaaaaaaaaaaaaaaaaaaaaaaaaaaaaaaaaaaaaaaaaaaaaaaaaaaaaaaaaaaaaaaaaaaaa

SEQ ID NO: 19600 - RNA, 2033 nt, Artificial Sequence
  mRNA product Design a-1 (hSL-A100) comprising derived and/or modified sequence from LASV(Josiah;Clade IV)__NP_694869__SP-HsALB_NP(2-569) (opt4)
aggagagucccgcagucggcguccagcggcucugcuuguucgugugugugucguugcaggccuuauucaagcuuaccaugaagugggugaccuucaucagccugcuguuccuguucagcagcgccuacagcagcgccagcaaggagaucaagagcuuccuguggacccagagccugagaagagagcugagcggcuacugcagcaacaucaagcugcagguggugaaggacgcccaggcccugcugcacggccuggacuucagcgaggugagcaacgugcagagacugaugagaaaggagagaagagacgacaacgaccugaagagacugagagaccugaaccaggccgugaacaaccugguggagcugaagagcacccagcagaagagcauccugagagugggcacccugaccagcgacgaccugcugauccuggccgccgaccuggagaagcugaagagcaaggugaucagaaccgagagaccccugagcgccggcguguacaugggcaaccugagcagccagcagcuggaccagagaagagcccugcugaacaugaucggcaugagcggcggcaaccagggcgccagagccggcagagacggcguggugagagugugggacgugaagaacgccgagcugcugaacaaccaguucggcaccaugcccagccugacccuggccugccugaccaagcagggccagguggaccugaacgacgccgugcaggcccugaccgaccugggccugaucuacaccgccaaguaccccaacaccagcgaccuggacagacugacccagagccaccccauccugaacaugaucgacaccaagaagagcagccugaacaucagcggcuacaacuucagccugggcgccgccgugaaggccggcgccugcaugcuggacggcggcaacaugcuggagaccaucaaggugagcccccagaccauggacggcauccugaagagcauccugaaggugaagaaggcccugggcauguucaucagcgacacccccggcgagagaaaccccuacgagaacauccuguacaagaucugccugagcggcgacggcuggcccuacaucgccagcagaaccagcaucaccggcagagccugggagaacaccgugguggaccuggagagcgacggcaagccccagaaggccgacagcaacaacagcagcaagagccugcagagcgccggcuucaccgccggccugaccuacagccagcugaugacccugaaggacgccaugcugcagcuggaccccaacgccaagaccuggauggacaucgagggcagacccgaggaccccguggagaucgcccuguaccagcccagcagcggcugcuacauccacuucuucagagagcccaccgaccugaagcaguucaagcaggacgccaaguacagccacggcaucgacgugaccgaccuguucgccacccagcccggccugaccagcgccgugaucgacgcccugcccagaaacauggugaucaccugccagggcagcgacgacaucagaaagcugcuggagagccagggcagaaaggacaucaagcugaucgacaucgcccugagcaagaccgacagcagaaaguacgagaacgccgugugggaccaguacaaggaccugugccacaugcacaccggcguggugguggagaagaagaagagaggcggcaaggaggagaucaccccccacugcgcccugauggacugcaucauguucgacgccgccgugagcggcggccugaacaccagcgugcugagagccgugcugcccagagacaugguguucagaaccagcacccccagaguggugcugugaggacuagucccuguucccagagcccacuuuuuuuucuuuuuuugaaauaaaauagccugucuuucagaucucaaaggcucuuuucagagccaccaaaaaaaaaaaaaaaaaaaaaaaaaaaaaaaaaaaaaaaaaaaaaaaaaaaaaaaaaaaaaaaaaaaaaaaaaaaaaaaaaaaaaaaaaaaaaaaaaaaaa

SEQ ID NO: 19601 - RNA, 2033 nt, Artificial Sequence
  mRNA product Design a-1 (hSL-A100) comprising derived and/or modified sequence from LASV(LP;Clade I)__AAF86702__SP-HsALB_NP(2-569) (opt4)
aggagagucccgcagucggcguccagcggcucugcuuguucgugugugugucguugcaggccuuauucaagcuuaccaugaagugggugaccuucaucagccugcuguuccuguucagcagcgccuacagcagcaacagcaaggagaucaagagcuuccuguggacccagagccugagaagagagcugagcggcuacugcagcaacaucaagcugcagguggugaaggacgcccaggcccugcugcacggccuggacuucagcgaggugagcaacgugcagagacugaugagaaagcagaagagagacgacgccgaccugaagagacugagagaccugaaccaggccgugaacaaccugguggagcugaagagcacccagcagaagaacgugcugagagugggcacccugagcagcgacgaccugaucacccuggccgccgaccuggagaagcugaagagcaaggugaucagaaccgagagaccccugagcagcggcguguacaugggcaaccugagcagccagcagcuggaccagagaagagcccugcugagcaugaucggcaugagcggcggcccccagggcaacagaaccggcggcgacggcguggugagagugugggacgugaagaacgccgagcugcugaacaaccaguucggcaccaugcccagccugacccuggccugccugaccaagcagggccagguggaccugaacgacgccgugcaggcccugaccgaccugggccugaucuacaccgccaaguaccccaacagcagcgaccuggacaugcugacccagagccaccccauccugggcaugguggacaccaagaagagcagccugaacaucagcggcuacaacuucagccugggcgccgccgugaaggccggcgccugcaugcuggacggcggcaacaugcuggagaccaucaaggugagcccccagaccauggacggcauccugaagagcauccugaaggugaagagaagccugggcauguucaucagcgacacccccggcgagagaaaccccuacgagaacauccuguacaagaucugccugagcggcgagggcuggcccuacaucgccagcagaaccagcaucaccggcagagccugggagaacacccugguggaccuggagagcgacaacaagccccccaagcugaacagcgccggcagcaacaagagccugcaggccgccggccugaacgccggccugaccuacagccagcugaugacccugaaggacugcaugcugcagcuggaccccagcagcaagaccuggaucgacaucgagggcagacccgaggaccccguggagaucgcccuguuccagcccagcagcggcugcuacauccacuucuucagagagcccaccgaccugaagcaguucaagcaggacgccaaguacagccacggcaucgacgugaccgaccuguucagcacccagcccggccugaccagcgccgugaucgaggcccugcccagaaacauggugcugaccugccagggcagcgacgacaucaagaagcugcuggagagccagggcagaagagacaucaagcugaucgacaucagccugagcaaggccgacagcagaaaguucgagaacgccgugugggaccaguacaaggaccugugccacaugcacaccggcguggugguggagaagaagaagagaggcggcaaggaggagaucaccccccacugcgcccugcuggacugcaucauguucgacgccgccaccaccggcagccugaacaucaccacccugagagccgugcugcccagagacaugguguucagaaccagcacccccaagguggugcugugaggacuagucccuguucccagagcccacuuuuuuuucuuuuuuugaaauaaaauagccugucuuucagaucucaaaggcucuuuucagagccaccaaaaaaaaaaaaaaaaaaaaaaaaaaaaaaaaaaaaaaaaaaaaaaaaaaaaaaaaaaaaaaaaaaaaaaaaaaaaaaaaaaaaaaaaaaaaaaaaaaaaa

SEQ ID NO: 19602 - RNA, 2033 nt, Artificial Sequence
  mRNA product Design a-1 (hSL-A100) comprising derived and/or modified sequence from LASV(803213;Clade II)__AAF86704__SP-HsALB_NP(2-569) (opt4)
aggagagucccgcagucggcguccagcggcucugcuuguucgugugugugucguugcaggccuuauucaagcuuaccaugaagugggugaccuucaucagccugcuguuccuguucagcagcgccuacagcagcgccagcaaggaggugaagagcuuccuguggacccagagccugagaagagagcugagcggcuacugcagcaacaucaagcugcagguggugaaggacgcccaggcccugcugcacggccuggacuucagcgaggugaacaacgugcagagacugaugagaaagcagaagagagacgacggcgaccugaagagacugagagaccugaaccaggccgugaacaaccugguggagcugaagagcacccagcagaagagcauccugagagugggcacccugaccagcgacgaccugcugacccuggccgccgaccuggagaagcugaagagcaaggugaucagaaccgagagaccccugagcagcggcguguacaugggcaaccugagcacccagcagcuggagcagagaagagcccugcugaacaugaucggcauggugggcggcgcccagggcacccagcccggcagagacggcguggugagagugugggacgugaagaaccccgaccugcugaacaaccaguucggcaccaugcccagccugacccuggccugccugaccaagcagggccagguggaccugaacgacgccgugcuggcccugaccgaccugggccugaucuacaccgccaaguaccccaacagcagcgaccuggacagacugagccagagccaccccauccugaacaugguggacaccaagaagagcagccugaacaucagcggcuacaacuucagccugggcgccgccgugaaggccggcgccugcaugcuggacggcggcaacaugcuggagaccaucaaggugaccccccagaccauggacggcauccugaagagcauccugaaggugaagagaagccugggcauguucgugagcgacacccccggcgagagaaaccccuacgagaacauccuguacaagaucugccugagcggcgacggcuggcccuacaucgccagcagaaccagcaucgugggcagagccugggagaacaccaccguggaccuggagagcgacggcaagccccagaaggugggcaccgccggcagcaacaagagccugcagagcgccggcuuccccaccggccugaccuacagccagcugaugacccugaaggacagcaugaugcagcuggaccccagcgccaagaccuggaucgacaucgagggcagacccgaggaccccguggagaucgcccuguaccagcccaugagcggcugcuacauccacuucuucagagagcccaccgaccugaagcaguucaagcaggacgccaaguacagccacggcaucgacguggccgaccuguuccccgcccagcccggccugaccagcgccgugaucgaggcccugcccagaaacauggugcugaccugccagggcagcgacgacaucaagaagcugcuggacagccagggcagaagagacaucaagcugaucgacaucagccugagcaagguggacagcagaaaguucgagaacgccgugugggaccagugcaaggaccugugccacaugcacaccggcguggugguggagaagaagaagagaggcggcaaggaggagaucaccccccacugcgcccugauggacugcaucauguucgacgccgccgugagcggcggccugaacauccccgugcugagagccgugcugcccagagacaugguguucagaaccagcagccccaagguggugcugugaggacuagucccuguucccagagcccacuuuuuuuucuuuuuuugaaauaaaauagccugucuuucagaucucaaaggcucuuuucagagccaccaaaaaaaaaaaaaaaaaaaaaaaaaaaaaaaaaaaaaaaaaaaaaaaaaaaaaaaaaaaaaaaaaaaaaaaaaaaaaaaaaaaaaaaaaaaaaaaaaaaaa

SEQ ID NO: 19603 - RNA, 2036 nt, Artificial Sequence
  mRNA product Design a-1 (hSL-A100) comprising derived and/or modified sequence from LASV(GA391;Clade III)__CAA36646__SP-HsALB_NP(2-570) (opt4)
aggagagucccgcagucggcguccagcggcucugcuuguucgugugugugucguugcaggccuuauucaagcuuaccaugaagugggugaccuucaucagccugcuguuccuguucagcagcgccuacagcagcgccagcaaggaggugagaagcuuccuguggacccagagccugagaagagagcugagcggcuacugcagcaacaucaagcugcagguggugaaggacgcccaggcccugcugcacggccuggacuucagcgaggugagcaacgugcagagacugaugagaaagcagaagagagacgacggcgaccugaagagacugagagaccugaaccaggccgugaacaaccugguggagcugaagagcacccagcagaagagcgugcugagagugggcacccugagcagcgacgaccugcugauccuggccgccgaccuggagaagcugaagagcaaggugaccagaaccgagagaccccugagcagcggcguguacaugggcaaccugagcagccagcagcuggaccagagaagagcccugcugaacaugaucggcaugaccggcgugagcggcggcggcaagggcgccagcgacggcaucgugagagugugggacgugaagaacgccgagcugcugaacaaccaguucggcaccaugcccagccugacccuggccugccugaccaagcagggccagguggaccugaacgacgccgugcaggcccugaccgaccugggccugaucuacaccgccaaguaccccaacagcagcgaccuggacagacugagccagagccaccccauccugaacaugaucgacaccaagaagagcagccugaacaucagcggcuacaacuucagccugggcgccgccgugaaggccggcgccugcaugcuggacggcggcaacaugcuggagaccaucaaggugagcccccagaccauggacggcauccugaagagcauccugaaggugaagaagagccugggcauguucgugagcgacacccccggcgagagaaaccccuacgagaacauccuguacaagaucugccugagcggcgacggcuggcccuacaucgccagcagaaccagcaucgugggcagagccugggagaacaccgugguggaccuggagcaggacaacaagccccagaagaucggcaacggcggcagcaacaagagccugcagagcgccggcuucgccgccggccugaccuacagccagcugaugacccugaaggacuucaagugcuucaaccugauccccaacgccaagaccuggauggacaucgagggcagacccgaggaccccguggagaucgcccuguaccagcccagcagcggcugcuacgugcacuucuucagagagcccaccgaccugaagcaguucaagcaggacgccaaguacagccacggcaucgacgugaccgaccuguucgccgcccagcccggccugaccagcgccgugaucgaggcccugcccagaaacauggugaucaccugccagggcagcgaggacaucagaaagcugcuggagagccagggcagaagagacaucaagcugaucgacaucacccugagcaaggccgacagcagaaaguucgagaacgccgugugggaccaguucaaggaccugugccacaugcacaccggcguggugguggagaagaagaagagaggcggcaaggaggagaucaccccccacugcgcccugauggacugcaucauguucgacgccgccgugagcggcggccuggacgccaaggugcugagaguggugcugcccagagacaugguguucagaaccagcacccccaagguggugcugugaggacuagucccuguucccagagcccacuuuuuuuucuuuuuuugaaauaaaauagccugucuuucagaucucaaaggcucuuuucagagccaccaaaaaaaaaaaaaaaaaaaaaaaaaaaaaaaaaaaaaaaaaaaaaaaaaaaaaaaaaaaaaaaaaaaaaaaaaaaaaaaaaaaaaaaaaaaaaaaaaaaaa

SEQ ID NO: 19604 - RNA, 2033 nt, Artificial Sequence
  mRNA product Design a-1 (hSL-A100) comprising derived and/or modified sequence from LASV(AV;Clade V)__CCA30315__SP-HsALB_NP(2-569) (opt4)
aggagagucccgcagucggcguccagcggcucugcuuguucgugugugugucguugcaggccuuauucaagcuuaccaugaagugggugaccuucaucagccugcuguuccuguucagcagcgccuacagcagcgccagcaaggaggugaagagcuuccuguggacccagagccugagaagagagcugagcggcuacugcagcaacaucaagcugcagguggugaaggacgcccaggcccugcugcacggccuggacuucagcgaggugagcaacgugcagagacugaugagaaagcagagaagagacgacagcgaccugaagagacugagagaccugaaccaggccgugaacaaccugguggagcugaagagcacccagcagaagagcgugcugagagugggcacccugagcagcgacgaccugcugacccuggccgccgaccuggagaagcugaagagcaaggugaccagaaccgagagaccccugagcagcggcguguacaugggcaaccugagcagccagcagcuggaccagagaagagcccugcugaaccugaucggcaugaccaacggcagccagggcagccaggccggcagagacggcguggugagagugugggacgugaagaacgccgagcugcugaacaaccaguucggcaccaugcccagccugacccuggccugccugaccaagcagggccagguggaccugaacgacguggugcaggcccugaccgaccugggccugaucuacaccgccaaguaccccaacaccagcgaccuggacagacugacccagagccaccccauccugaacaugaucgacaccaagaagagcagccugaacaucagcggcuacaacuucagccugggcgccgccgugaaggccggcgccugcaugcuggacggcggcaacaugcuggagaccaucaaggugagcccccagagcauggacggcauccugaagagcauccugaaggugaagagagcccugggcauguucgugagcgacacccccggcgagagaaaccccuacgagaacauccuguacaagaucugccugagcggcgacggcuggcccuacaucgccagcagaaccagcaucgugggcagagccugggagaacaccgugguggaccuggagaccgacggcaagccccagaagaucggcagcggcaacagcaacaagagccugcagagcgccggcuucagcgccggccugaccuacagccagcugaugacccugaaggacgccaugcugcagcuggaccccaacgccaagaccuggauggacaucgagggcagacccgaggaccccguggagguggcccuguaccagcccaucagcggcugcuacauccacuucuucagagagcccaccgaccugaagcaguucaagcaggacgccaaguacagccacggcaucgacaucgccgaccuguucgccgcccagcccggccugaccagcgccgugaucgaggcccugcccagaaacauggugaucaccugccagggcagcgaggacaucaagaagcugcuggagagccagggcagaaaggacaucaagcugaucgacaucgcccugagcaagaucgacagcagaaaguucgagaacgccgugugggaccaguacaaggaccugugccacaugcacaccggcguggugguggagaagaagaagagaggcggcaaggaggagaucaccccccacugcgcccugauggacugcaucauguucgacgccgccgugagcggcggccugaacacccuggugcugagagccgugcugcccagagacaugguguucagaaccagcacccccagaguggugcugugaggacuagucccuguucccagagcccacuuuuuuuucuuuuuuugaaauaaaauagccugucuuucagaucucaaaggcucuuuucagagccaccaaaaaaaaaaaaaaaaaaaaaaaaaaaaaaaaaaaaaaaaaaaaaaaaaaaaaaaaaaaaaaaaaaaaaaaaaaaaaaaaaaaaaaaaaaaaaaaaaaaaa

SEQ ID NO: 19605 - RNA, 2033 nt, Artificial Sequence
  mRNA product Design a-1 (hSL-A100) comprising derived and/or modified sequence from LASV(Togo/2016/7082;Clade VI)__AMR44578__SP-HsALB_NP(2-569) (opt4)
aggagagucccgcagucggcguccagcggcucugcuuguucgugugugugucguugcaggccuuauucaagcuuaccaugaagugggugaccuucaucagccugcuguuccuguucagcagcgccuacagcagcaacagcaaggaggugaagagcuuccuguggacccagagccugagaagagagcugagcggcuacugcagcaacaucaagcugcagguggugaaggacgcccaggcccugcugcacggccuggacuucagcgaggugagcaacgugcagagacugaugagaaagcagaagagagacgacggcgaccugaagagacugagagaccugaaccaggccgugaacaaccugguggagcugaagagcgugcagcagaagagcauccugagagugggcacccugaccagcgacgaccugcugacccuggccgccgaccuggagaagcugaagagcaaggugaccagaaccgagagaccccugagcagcggcguguacaugggcaaccugagcagccagcagcuggaccagagaagagcccugcugagcaugaucggcaugagcggcggcaaccagaacagccagcccaagggcgacggcguggugagagugugggacgugaagaacgccgaccugcugaacaaccaguucggcaccaugcccagccugacccuggccugccugaccaagcagggccagguggaccugaacgacgccgugcaggcccugaccgaccugggccugaucuacaccgccaaguaccccaacagcagcgaccuggacagacugagccagagccaccccauccugaacaugaucgacaccaagaagagcagccugaacaucagcggcuacaacuucagccugggcgccgccaucaagaccggcgccugcaugcuggacggcggcaacaugcuggagaccaucaaggugaccccccagaccauggacggcauccugaagagcauccugaaggugaagagaagccugggcauguucaucagcgacacccccggcgagagaaaccccuacgagaacauccuguacaagaucugccugagcggcgacggcuggcccuacaucgccagcagaaccgccaucaucggcagagccugggagaacaccgugguggaccuggagagcgacagcaagccccagaagaucggcagcaacggcagcaacaagagccugcagagcgccggcuucgcccccggccugaccuacagccagcugaugacccugaaggacagcaugcugcagcuggaccccaacgccaagaccuggaucgacaucgagggcagacccgaggaccccguggagguggcccuguuccagcccaucagcggcugcuacauccacuucuucagagagcccaccgaccugaagcaguucaagcaggacgccaaguacagccacggcaucgacgugaccgaccuguucgccgcccagcccggccugaccagcgccgugaucgaggcccugcccagaaacauggugcugaccugccagggcagcgacgacaucaagaagcugcuggacagccagggcagaagagacaucaagcugaucgacgugagccugaacaagaucgacagcagaaaguucgagaacgccgugugggaccaguacaaggaccugugccacaugcacaccggcguggugguggagaagaagaagaagggcggcaaggaggagaucaccccccacugcgcccugcuggacugcaucauguucgacgccgccgugagcggcggccugaacgccaccgugcugagagccgugcugcccagagacaugguguucagaaccagcagccccaagguggugcugugaggacuagucccuguucccagagcccacuuuuuuuucuuuuuuugaaauaaaauagccugucuuucagaucucaaaggcucuuuucagagccaccaaaaaaaaaaaaaaaaaaaaaaaaaaaaaaaaaaaaaaaaaaaaaaaaaaaaaaaaaaaaaaaaaaaaaaaaaaaaaaaaaaaaaaaaaaaaaaaaaaaaa

SEQ ID NO: 19606 - RNA, 2033 nt, Artificial Sequence
  mRNA product Design a-1 (hSL-A100) comprising derived and/or modified sequence from LASV(KAK-428;Clade n.d. (VII))__ANH09741__SP-HsALB_NP(2-569) (opt4)
aggagagucccgcagucggcguccagcggcucugcuuguucgugugugugucguugcaggccuuauucaagcuuaccaugaagugggugaccuucaucagccugcuguuccuguucagcagcgccuacagcagcaacagcaaggaggugaagagcuuccuguggacccagagccugagaagagagcugagcggcuacugcaccaacaucaagcugcagguggugaaggacgcccaggcccugcugcacggccuggacuucagcgaggugagcaacgugcagagacugaugagaaagcagaagagagacgacaacgaccugaagagacugagagaccugaaccaggccgugaacaaccugguggagcugaagagcgugcagcagaagagcgugcugaaggugggcacccugaacagcgacgaccugcugacccuggccgccgaccuggagaagcugaagagcaagguggugagaaccgagagaccccugagcagcggcguguacaugggcaaccugagcagccagcagcuggaccagagaagagcccugcugaacaugaucggcauggccggcggcagccagggcaaccagcccagcagagacggcguggugagagugugggacgugaagaacgccgaccugcugaacaaccaguucggcaccaugcccagccugacccuggccugccugaccaagcagggccagguggaccugaacgacguggugcuggcccugaccgaccugggccugaucuacaccgccaaguaccccaacagcagcgaccuggacagacugagccagaaccaccccgugcugaacaugaucgacgugaacaagagcagccugaacaucagcggcuacaacuucagccugggcgccgccgugaaggccggcgccugcaugcuggacggcggcaacaugcuggagaccaucaagaucagcccccagaccguggacggcauccugaagagcauccugaaggugaagagagcccugggcauguucgugagcgacacccccggcgagagaaaccccuacgagaacauccuguacaaggugugccugagcggcaacggcuggcccuacaucgccagcagaaccagcaucgugggcagagccugggagaacaccgugguggaccuggagagcaacaagaaccagcccaaggugggcaacaacggcagcaacaagaugcugcagagcagcggcuucgccaccggccugaccuacagccagcugaugacccugagagacagcaugcugcagcuggaccccaccgccaagaccuggaucgacaucgagggcagacccgaggaccccguggagcuggcccuguuccagcccagcagcggcugcuacauccacuucuucagagagcccaccgaccugaagcaguucaagcaggacgccaaguacagccacggcaucgacgugaacgaccuguucagcgcccagcccggccugaccagcgccgugcuggaggcccugcccagaaacauggugcugaccugccagggcagcgacgacaucagaaagcugcuggacagccaggacagaaaggacaucaagcugaucgacaucagccugagcaaggccgacgccagaaaguucgagaacgacgugugggaccaguucaaggaccugugccacaugcacaccggcaucgugguggagaagaagaagaagggcggcaagcaggagaugaccccccacugcgcccugcuggacugcaucauguucgacgccgccgugagcggcggccugaacgugcccacccugagagccgugcugcccaccgacaugguguucagaaccaucaccaccaagguggugcugugaggacuagucccuguucccagagcccacuuuuuuuucuuuuuuugaaauaaaauagccugucuuucagaucucaaaggcucuuuucagagccaccaaaaaaaaaaaaaaaaaaaaaaaaaaaaaaaaaaaaaaaaaaaaaaaaaaaaaaaaaaaaaaaaaaaaaaaaaaaaaaaaaaaaaaaaaaaaaaaaaaaaa

SEQ ID NO: 19607 - RNA, 2033 nt, Artificial Sequence; identical to SEQ ID NO: 19601
  mRNA product Design a-1 (hSL-A100) comprising derived and/or modified sequence from LASV(Pinneo-NIG-1969;Clade I)__AIT17837__SP-HsALB_NP(2-569) (opt4)

SEQ ID NO: 19608 - RNA, 2033 nt, Artificial Sequence
  mRNA product Design a-1 (hSL-A100) comprising derived and/or modified sequence from LASV(ISTH0009-NIG-2011;Clade II)__AIT17405__SP-HsALB_NP(2-569) (opt4)
aggagagucccgcagucggcguccagcggcucugcuuguucgugugugugucguugcaggccuuauucaagcuuaccaugaagugggugaccuucaucagccugcuguuccuguucagcagcgccuacagcagcgugagcaaggaggugaagagcuuccuguggacccagagccugagaagagagcugagcggcuacugcagcaacaucaagcugcagguggugaaggacgcccaggcccugcugcacggccuggacuucagcgaggugagcaacgugcagagacugaugagaaagcagaagagagacgacagcgaccugaagagacugagagaccugaaccaggccgugaacaaccugguggagcugaagagcacccagcagaagagcauccugagagugggcacccugaccagcgacgaccugcugacccuggccgccgaccuggagaagcugaagagcaaggugaucagaaccgagagaccccugagcagcggcguguacaugggcaaccugagcacccagcagcuggagcagagaagagcccugcugaacaugaucggcauggugggcggcgcccagggcacccagcccggcagagacggcguggugagagugugggacgugaagaaccccgaccugcugaacaaccaguucggcaccaugcccagccugacccuggccugccugaccaagcagggccagguggaccugaacgacgccgugcuggcccugaccgaccugggccugaucuacaccgccaaguaccccaacagcagcgaccuggacagacugagccagagccaccccauccugaacaugguggacaucaagaagagcagccugaacaucagcggcuacaacuucagccugggcgccgccgugaaggccggcgccugcaugcuggacggcggcaacaugcuggagaccaucaaggugaccccccagaccauggacggcauccugaagagcauccugaaggugaagagaagccugggcauguucgugagcgacacccccggcgagagaaaccccuacgagaacauccuguacaagaucugccugagcggcgacggcuggcccuacaucgccagcagaaccagcaucgugggcagagccugggagaacaccaccguggaccuggagagcgacggcaagccccagaaggugggcagcgccggcagcaacaagagccugcagagcgccggcuuccccaccggccugaccuacagccagcugaugacccugaaggacagcaugaugcagcuggaccccagcgccaagaccuggaucgacaucgagggcagacccgaggaccccguggagaucgcccuguaccagcccaugagcggcugcuacauccacuucuucagagagcccaccgaccugaagcaguucaagcaggacgccaaguacagccacggcaucgacguggccgaccuguuccccgcccagcccggccugaccagcgccgugaucgaggcccugcccagaaacauggugcugaccugccagggcagcgacgacaucaagagacugcuggacagccagggcagaagagacaucaagcugaucgacaucgcccugagcaaggccgacagcagaagauucgagaacgccgugugggaccagugcaaggaccugugccacaugcacaccggcguggugguggagaagaagaagagaggcggcaaggaggagaucaccccccacugcgcccugauggacugcaucauguacgacgccgccgugagcggcggccugaacauccccgugcugagagccgugcugcccagagacaugguguucagaaccagcagccccaagguggugcugugaggacuagucccuguucccagagcccacuuuuuuuucuuuuuuugaaauaaaauagccugucuuucagaucucaaaggcucuuuucagagccaccaaaaaaaaaaaaaaaaaaaaaaaaaaaaaaaaaaaaaaaaaaaaaaaaaaaaaaaaaaaaaaaaaaaaaaaaaaaaaaaaaaaaaaaaaaaaaaaaaaaaa

SEQ ID NO: 19609 - RNA, 2033 nt, Artificial Sequence
  mRNA product Design a-1 (hSL-A100) comprising derived and/or modified sequence from LASV(ISTH2010-NIG-2012;Clade II)__AIT17483__SP-HsALB_NP(2-569) (opt4)
aggagagucccgcagucggcguccagcggcucugcuuguucgugugugugucguugcaggccuuauucaagcuuaccaugaagugggugaccuucaucagccugcuguuccuguucagcagcgccuacagcagcgccagcaaggaggugaagagcuuccuguggacccagagccugagaagagagcugagcggcuacugcagcaacaucaagcugcagguggugaaggacgcccaggcccugcugcacggccuggacuucagcgaggugagcaacgugcagagacugaugagaaagcagaagagagacgacagcgaccugaagagacugagagaccugaaccaggccgugaacaaccugguggagcugaagagcacccagcagaagagcauccugagagugggcacccugaccagcgacgaccugcugacccuggccgccgaccuggagaagcugaagagcaaggugaucagaaccgagagaccccugagcagcggcguguacaugggcaaccugagcacccagcagcuggagcagagaagagcccugcugaaccugaucggcauggugggcggcgcccagggcacccagcccggcagagacggcguggugagagugugggacgugaagaaccccgaccugcugaacaaccaguucggcaccaugcccagccugacccuggccugccugaccaagcagggccagguggaccugaacgacgccgugcuggcccugaccgaccugggccugaucuacaccgccaaguaccccaacagcagcgaccuggacagacugagccagagccaccccauccugaacaugguggacaccaagaagagcagccugaacaucagcggcuucaacuucagccugggcgccgccgugaaggccggcgccugcaugcuggacggcggcaacaugcuggagaccaucaaggugaccccccagaccauggacggcauccugaagagcauccugaaggugaagaagagccugggcauguucgugagcgacacccccggcgagagaaaccccuacgagaacauccuguacaagaucugccugagcggcgacggcuggcccuacaucgccagcagaaccagcaucgugggcagagccugggagaacaccaccguggaccuggagagcgacggcaagccccacaaggugggcaccgccggcagcaacaagagccugcagagcgccggcuuccccaccggccugaccuacagccagcugaugacccugaaggacagcaugaugcagcuggaccccagcgccaagaccuggaucgacaucgagggcagacccgaggaccccguggagaucgcccuguaccagcccaugagcggcugcuacauccacuucuucagagagcccaccgaccugaagcaguucaagcaggacgccaaguacagccacggcaucgacguggccgaccuguuccccgcccagcccggccugaccagcgccgugaucgaggcccugcccagaaacauggugcugaccugccagggcagcgacgacaucaagagacugcuggacagccagggcagaagagacaucaagcugaucgacaucgcccugagcaaggccgacagcagaagauucgagaacgccgugugggaccagugcaaggaccugugccacaugcacaccggcguggugguggagaagaagaagagaggcggcaaggaggagaucaccccccacugcgcccugauggacugcaucauguacgacgccgccgugagcggcggccugaacauccccgugcugagagccgugcugcccagagacaugguguucagaaccagcagccccaagguggugcugugaggacuagucccuguucccagagcccacuuuuuuuucuuuuuuugaaauaaaauagccugucuuucagaucucaaaggcucuuuucagagccaccaaaaaaaaaaaaaaaaaaaaaaaaaaaaaaaaaaaaaaaaaaaaaaaaaaaaaaaaaaaaaaaaaaaaaaaaaaaaaaaaaaaaaaaaaaaaaaaaaaaaa

SEQ ID NO: 19610 - RNA, 2033 nt, Artificial Sequence
  mRNA product Design a-1 (hSL-A100) comprising derived and/or modified sequence from LASV(Lassa virus/H.sapiens-wt/NGA/2015/ISTH_0543;Clade II)__AVO03640__SP-HsALB_NP(2-569) (opt4)
aggagagucccgcagucggcguccagcggcucugcuuguucgugugugugucguugcaggccuuauucaagcuuaccaugaagugggugaccuucaucagccugcuguuccuguucagcagcgccuacagcagcgccagcaaggaggugaagagcuuccuguggacccagagccugagaagagagcugagcggcuacugcagcaacaucaagcugcagguggugaaggacgcccaggcccugcugcacggccuggacuucagcgaggugagcaacgugcagagacugaugagaaagcagaagagagacgacagcgaccugaagagacugagagaccugaaccaggccgugaacaaccugguggagcugaagagcacccagcagaagagcauccugagagugggcacccugaccagcgacgaccugcugacccuggccgccgaccuggagaagcugaagagcaaggugaucagaaccgagagaccccugagcagcggcguguacaugggcaaccugagcacccagcagcuggagcagagaagagcccugcugaacaugaucggcauggugggcggcgcccagggcacccagcccggcagagacggcguggugagagugugggacgugaagaaccccgaccugcugaacaaccaguucggcaccaugcccagccugacccuggccugccugaccaagcagggccagguggaccugaacgacgccgugcuggcccugaccgaccugggccugaucuacaccgccaaguaccccaacagcagcgaccuggacagacugagccagagccaccccauccugaacaugguggacaccaagaagagcagccugaacaucagcggcuacaacuucagccugggcgccgccgugaaggccggcgccugcaugcuggacggcggcaacaugcuggagaccaucaaggugaccccccagaccauggacggcauccugaagagcauccugaaggugaagaagagccugggcauguucgugagcgacacccccggcgagagaaaccccuacgagaacauccuguacaagaucugccugagcggcgacggcuggcccuacaucgccagcagaaccagcaucgugggcagagccugggagaacaccaccguggaccuggagagcgacggcaagccccagaaggugggcagcgccggcagcaacaagagccugcagagcgccggcuuccccaccggccugaccuacagccagcugaugacccugaaggacagcaugaugcagcuggaccccagcgccaagaccuggaucgacaucgagggcagacccgaggaccccguggagaucgcccuguaccagcccaugagcggcugcuacauccacuucuucagagagcccaccgaccugaagcaguucaagcaggacgccaaguacagccacggcaucgacguggccgaccuguuccccgcccagcccggccugaccagcgccgugaucgaggcccugcccagaaacauggugcugaccugccagggcagcgacgacaucaagagacugcuggacagccagggcagaaaggacaucaagcugaucgacaucgcccugagcaaggccgacagcagaagauucgagaacgccgugugggaccagugcaaggaccugugccacaugcacaccggcguggugguggagaagaagaagagaggcggcaaggaggagaucaccccccacugcgcccugauggacugcaucauguacgacgccgccgugagcggcggccugaacauccccgugcugagagccgugcugcccagagacaugguguucagaaccagcagccccaagguggugcugugaggacuagucccuguucccagagcccacuuuuuuuucuuuuuuugaaauaaaauagccugucuuucagaucucaaaggcucuuuucagagccaccaaaaaaaaaaaaaaaaaaaaaaaaaaaaaaaaaaaaaaaaaaaaaaaaaaaaaaaaaaaaaaaaaaaaaaaaaaaaaaaaaaaaaaaaaaaaaaaaaaaaa

SEQ ID NO: 19611 - RNA, 2033 nt, Artificial Sequence
  mRNA product Design a-1 (hSL-A100) comprising derived and/or modified sequence from LASV(Lassa virus/H.sapiens-wt/NGA/2016/ISTH_0009;Clade II)__AVO03572__SP-HsALB_NP(2-569) (opt4)
aggagagucccgcagucggcguccagcggcucugcuuguucgugugugugucguugcaggccuuauucaagcuuaccaugaagugggugaccuucaucagccugcuguuccuguucagcagcgccuacagcagcgccagcaaggaggugaagagcuuccuguggacccagagccugagaagagagcugagcggcuacugcagcaacaucaagcugcagguggugaaggacgcccaggcccugcugcacggccuggacuucagcgaggugagcaacgugcagagacugaugagaaagcagaagagagacgacagcgaccugaagagacugagagaccugaaccaggccgugaacaaccugguggagcugaagagcacccagcagaagagcauccugagagugggcacccugaccagcgacgaccugcugacccuggccgccgaccuggagaagcugaagagcaaggugaucagaaccgagagaccccugagcagcggcguguacaugggcaaccugagcacccagcagcuggagcagagaagagcccugcugaacaugaucggcauggugggcggcgcccagggcacccagcccggcagagacggcguggugagagugugggacgugaagaaccccgaccugcugaacaaccaguucggcaccaugcccagccugacccuggccugccugaccaagcagggccagguggaccugaacgacgccgugcuggcccugaccgaccugggccugaucuacaccgccaaguaccccaacagcagcgaccuggacagacugagccagagccaccccauccugaacaugguggacaccaagaagagcagccugaacaucagcggcuacaacuucagccugggcgccgccgugaaggccggcgccugcaugcuggacggcggcaacaugcuggagaccaucaaggugaccccccagaccauggacggcauccugaagagcauccugaaggugaagaagagccugggcauguucgugagcgacacccccggcgagagaaaccccuacgagaacauccuguacaagaucugccugagcggcgacggcuggcccuacaucgccagcagaaccagcaucgugggcagagccugggagaacaccaccguggaccuggagagcgacggcaagccccagaaggugggcagcgccggcagcaacaagagccugcagagcgccggcuuccccaccggccugaccuacagccagcugaugacccugaaggacagcaugaugcagcuggaccccagcgccaagaccuggaucgacaucgagggcagacccgaggaccccguggagaucgcccuguaccagcccaugagcggcugcuacauccacuucuucagagagcccaccgaccugaagcaguucaagcaggacgccaaguacagccacggcaucgacguggccgaccuguuccccgcccagcccggccugaccagcgccgugaucgaggcccugcccagaaacauggugcugaccugccagggcagcgacgacaucaagagacugcuggacagccagggcagaagagacaucaagcugaucgacaucgcccugagcaaggccgacagcagaagauucgagaacgccgugugggaccagugcaaggaccugugccacaugcacaccggcguggugguggagaagaagaagagaggcggcaaggaggagaucaccccccacugcgcccugauggacugcaucauguacgacgccgccgugagcggcggccugaacauccccgugcugagagccgugcugcccagagacaugguguucagaaccagcagccccaagguggugcugugaggacuagucccuguucccagagcccacuuuuuuuucuuuuuuugaaauaaaauagccugucuuucagaucucaaaggcucuuuucagagccaccaaaaaaaaaaaaaaaaaaaaaaaaaaaaaaaaaaaaaaaaaaaaaaaaaaaaaaaaaaaaaaaaaaaaaaaaaaaaaaaaaaaaaaaaaaaaaaaaaaaaa

SEQ ID NO: 19612 - RNA, 2033 nt, Artificial Sequence
  mRNA product Design a-1 (hSL-A100) comprising derived and/or modified sequence from LASV(Lassa virus/H.sapiens-wt/NGA/2016/ISTH_0017;Clade II)__AVO03568__SP-HsALB_NP(2-569) (opt4)
aggagagucccgcagucggcguccagcggcucugcuuguucgugugugugucguugcaggccuuauucaagcuuaccaugaagugggugaccuucaucagccugcuguuccuguucagcagcgccuacagcagcgccagcaaggaggugaagagcuuccuguggacccagagccugagaagagagcugagcggcuacugcagcagcaucaagcugcagguggugaaggacgcccaggcccugcugcacggccuggacuucagcgaggugagcaacgugcagagacugaugagaaagcagaagagagacgacagcgaccugaagagacugagagaccugaaccaggccgugaacaaccugguggagcugaagagcacccagcagaagagcauccugagagugggcacccugaccagcgacgaccugcugacccuggccgccgaccuggagaagcugaagagcaaggugaucagaaccgagagaccccugagcagcggcguguacaugggcaaccugagcacccagcagcuggagcagagaagagcccugcugaacaugaucggcauggccggcggcgcccagggcacccagcccggcagagacggcguggugagagugugggacgugaagaaccccgaccugcugaacaaccaguucggcaccaugcccagccugacccuggccugccugaccaagcagggccagguggaccugaacgacgccgugcuggcccugaccgaccugggccugaucuacaccgccaaguaccccaacagcagcgaccuggacagacugagccagagccaccccauccugaacaugguggacaccaagaagagcagccugaacaucagcggcuacaacuucagccugggcgccgccgugaaggccggcgccugcaugcuggacggcggcaacaugcuggagaccaucaaggugaccccccagaccauggacggcauccugaagagcauccugaaggugaagagaagccugggcauguucgugagcgacgcccccggcgagagaaaccccuacgagaacauccuguacaagaucugccugagcggcgacggcuggcccuacaucgccagcagaaccagcaucgugggcagagccugggagaacaccaccguggaccuggagagcgacggcaagccccagaaggugggcgccaccggcagcaacaagagccugcagagcgccggcuuccccaccggccugaccuacagccagcugaugacccugaaggacagcaugaugcagcuggaccccagcgccaagaccuggaucgacaucgagggcagacccgaggaccccguggagguggcccuguaccagcccgugagcggcugcuacauccacuucuucagagagcccaccgaccugaagcaguucaagcaggacgccaaguacagccacggcaucgacguggccgaccuguuccccgcccagcccggccugaccagcgccgugaucgaggcccugcccagaaacauggugcugaccugccagggcagcgacgacaucaagaagcugcuggacagccagggcagaaaggacaucaagcugaucgacaucgcccugagcaaggccgacagcagaagauucgagaacgccgugugggaccagugcaaggaccugugccacaugcacaccggcguggugguggagaagaagaagagaggcggcaaggaggagaucaccccccacugcgcccugauggacugcaucauguacgacgccgccgugagcggcggccugaacauccccgugcugagagccgugcugcccagagacaugguguucagaaccagcagccccaagguggugcugugaggacuagucccuguucccagagcccacuuuuuuuucuuuuuuugaaauaaaauagccugucuuucagaucucaaaggcucuuuucagagccaccaaaaaaaaaaaaaaaaaaaaaaaaaaaaaaaaaaaaaaaaaaaaaaaaaaaaaaaaaaaaaaaaaaaaaaaaaaaaaaaaaaaaaaaaaaaaaaaaaaaaa

SEQ ID NO: 19613 - RNA, 2033 nt, Artificial Sequence
  mRNA product Design a-1 (hSL-A100) comprising derived and/or modified sequence from LASV(Lassa virus/H.sapiens-wt/NGA/2018/ISTH_0959;Clade II)__AVV65100__SP-HsALB_NP(2-569) (opt4)
aggagagucccgcagucggcguccagcggcucugcuuguucgugugugugucguugcaggccuuauucaagcuuaccaugaagugggugaccuucaucagccugcuguuccuguucagcagcgccuacagcagcgccagcaaggaggugaagagcuuccuguggacccagagccugagaagagagcugagcggcuacugcagcaacaucaagcugcagguggugaaggacgcccaggcccugcugcacggccuggacuucagcgaggugagcaacgugcagagacugaugagaaagcagaagagagacgacagcgaccugaagagacugagagaccugaaccaggccgugaacaaccugguggagcugaagagcacccagcagaagagcauccugagagugggcacccugaccagcgacgaccugcugacccuggccgccgaccuggagaagcugaagagcaaggugaucagaaccgagagaccccugagcagcggcguguacaugggcaaccugagcacccagcagcuggagcagagaagagcccugcugaaccugaucggcauggugggcggcgcccagggcacccagcccggcagagacggcguggugagagugugggacgugaagaaccccgaccugcugaacaaccaguucggcaccaugcccagccugacccuggccugccugaccaagcagggccagguggaccugaacgacguggugcuggcccugaccgaccugggccugaucuacaccgccaaguaccccaacagcagcgaccuggacagacugagccagagccaccccauccugaacaugguggacaccaagaagagcagccugaacaucagcggcuucaacuucagccugggcgccgccgugaaggccggcgccugcaugcuggacggcggcaacaugcuggagaccaucaaggugaccccccagaccauggacggcauccugaagagcauccugaaggugaagaagagccugggcauguucgugagcgacacccccggcgagagaaaccccuacgagaacauccuguacaagaucugccugagcggcgacggcuggcccuacaucgccagcagaaccagcaucgugggcagagccugggagaacaccaccguggaccuggagagcgacggcaagccccacaaggugggcaccgccggcagcaacaagagccugcagagcgccggcuuccccaccggccugaccuacagccagcugaugacccugaaggacagcaugaugcagcuggaccccagcgccaagaccuggaucgacaucgagggcagacccgaggaccccguggagaucgcccuguaccagcccaugagcggcugcuacauccacuucuucagagagcccaccgaccugaagcaguucaagcaggacgccaaguacagccacggcaucgacguggccgaccuguuccccgcccagcccggccugaccagcgccgugaucgaggcccugcccagaaacauggugcugaccugccagggcagcgacgacaucaagagacugcuggacagccagggcagaaaggacaucaagcugaucgacaucgcccugagcaagaccgacagcagaagauucgagaacgccgugugggaccagugcaaggaccugugccacaugcacaccggcguggugguggagaagaagaagagaggcggcaaggaggagaucaccccccacugcgcccugauggacugcaucauguacgacgccgccgugagcggcggccugaacauccccgugcugagagccgugcugcccagagacaugguguucagaaccagcagccccaagguggugcugugaggacuagucccuguucccagagcccacuuuuuuuucuuuuuuugaaauaaaauagccugucuuucagaucucaaaggcucuuuucagagccaccaaaaaaaaaaaaaaaaaaaaaaaaaaaaaaaaaaaaaaaaaaaaaaaaaaaaaaaaaaaaaaaaaaaaaaaaaaaaaaaaaaaaaaaaaaaaaaaaaaaaa

SEQ ID NO: 19614 - RNA, 2033 nt, Artificial Sequence
  mRNA product Design a-1 (hSL-A100) comprising derived and/or modified sequence from LASV(LASV003-NIG-2008;Clade II)__AIT17581__SP-HsALB_NP(2-569) (opt4)
aggagagucccgcagucggcguccagcggcucugcuuguucgugugugugucguugcaggccuuauucaagcuuaccaugaagugggugaccuucaucagccugcuguuccuguucagcagcgccuacagcagcgccagcaaggaggugaagagcuuccuguggacccagagccugagaagagagcugagcggcuacugcagcagcaucaagcugcagguggugaaggacgcccaggcccugcugcacggccuggacuucagcgaggugagcaacgugcagagacugaugagaaagcagaagagagacgacagcgaccugaagagacugagagaccugaaccaggccgugaacaaccugguggagcugaagagcacccagcagaagagcgugcugagagugggcacccugaccagcgacgaccugcugacccuggccgccgaccuggagaagcugaagagcaaggugaucagaaccgagagaccccugagcagcggcguguacaugggcaaccugagcgcccagcagcuggagcagagaagaacccugcugaacaugaucggcauggugggcggcgcccagggcacccagcccggcagagacggcguggugagagugugggacgugaagaaccccgaccugcugaacaaccaguucggcaccaugcccagccugacccuggccugccugaccaagcagggccagguggaccugaacgacguggugcuggcccugaccgaccugggccugaucuacaccgccaaguaccccaacagcagcgaccuggacagacugagccagagccaccccauccugagcaugguggacaccaagaagagcagccugaacaucagcggcuacaacuucagccugggcgccgccgugaaggccggcgccugcaugcuggacggcggcaacaugcuggagaccaucaaggugaccccccagaccauggacggcauccugaagagcauccugaaggugaagaagagccugggcauguucgugagcgacacccccggcgagagaaaccccuacgagaacauccuguacaagaucugccugagcggcgacggcuggcccuacaucgccagcagaaccagcaucgugggcagagccugggagaacaccaccguggaccuggagagcgacggcaagccccagaaggugggcaccgccggcagcaacaagagccugcagagcgccggcuuccccaccggccugaccuacagccagcugaugacccugaaggacagcaugaugcagcuggaccccagcgccaagaccuggaucgacaucgagggcagacccgaggaccccguggagaucgcccuguaccagcccaugagcggcugcuacauccacuucuucagagagcccaccgaccugaagcaguucaagcaggacgccaaguacagccacggcaucgacgugaccgaccuguuccccgcccagcccggccugaccagcgccgugaucgaggcccugcccagaaacauggugcugaccugccagggcagcgacgacaucaagagacugcuggacagccagggcagaagagacaucaagcugaucgacaucgcccugagcaaggccgacagcagaagauucgagaacgccgugugggaccagugcaaggaccugugccacaugcacaccggcguggugguggagaagaagaagagaggcggcaaggaggagaucaccccccacugcgcccugauggacugcaucauguacgacgccgccgugagcggcggccugaacauccccgugcugagagccgugcugcccagagacaugguguucagaaccagcagccccaagguggugcugugaggacuagucccuguucccagagcccacuuuuuuuucuuuuuuugaaauaaaauagccugucuuucagaucucaaaggcucuuuucagagccaccaaaaaaaaaaaaaaaaaaaaaaaaaaaaaaaaaaaaaaaaaaaaaaaaaaaaaaaaaaaaaaaaaaaaaaaaaaaaaaaaaaaaaaaaaaaaaaaaaaaaa

SEQ ID NO: 19615 - RNA, 2033 nt, Artificial Sequence
  mRNA product Design a-1 (hSL-A100) comprising derived and/or modified sequence from LASV(LASV035-NIG-2009;Clade II)__AIT17589__SP-HsALB_NP(2-569) (opt4)
aggagagucccgcagucggcguccagcggcucugcuuguucgugugugugucguugcaggccuuauucaagcuuaccaugaagugggugaccuucaucagccugcuguuccuguucagcagcgccuacagcagcgccagcaaggaggugaagagcuuccuguggacccagagccugagaagagagcugagcggcuacugcagcagcaucaagcugcagguggugaaggacgcccaggcccugcugcacggccuggacuucagcgaggugagcaacgugcagagacugaugagaaagcagaagagagacgacagcgaccugaagagacugagagaccugaaccaggccgugaacaaccugguggagcugaagagcacccagcagaagagcauccugagagugggcacccugaccagcgacgaccugcugacccuggccgccgaccuggagaagcugaagagcaaggugaucagaaccgagagaccccugagcagcggcguguacaugggcaaccugagcgcccagcagcuggagcagagaagagcccugcugaacaugaucggcauggugggcggcgcccagggcacccagcccggcagagacggcguggugagagugugggacgugaagaaccccgaccugcugaacaaccaguucggcaccaugcccagccugacccuggccugccugaccaagcagggccagguggaccugaacgacgccgugcuggcccugaccgaccugggccugaucuacaccgccaaguaccccaacagcagcgaccuggacagacugagccagagccaccccauccugaacaugguggacaccaagaagagcagccugaacaucagcggcuacaacuucagccugggcgccgccgugaaggccggcgccugcaugcuggacggcggcaacaugcuggagaccaucaaggugaccccccagaccauggacggcauccugaagagcauccugaaggugaagagaagccugggcauguucgugagcgacacccccggcgagagaaaccccuacgagaacauccuguacaagaucugccugagcggcgacggcuggcccuacaucgccagcagaaccagcaucgugggcagagccugggagaacaccaccguggaccuggagagcgacggcaagccccagaaggugggcaccaccggcagcaacaagagccugcagagcgccggcuuccccaccggccugaccuacagccagcugaugacccugaaggacagcaugaugcagcuggaccccagcgccaagaccuggaucgacaucgagggcagacccgaggaccccguggagaucgcccuguaccagcccaugagcggcugcuacauccacuucuucagagagcccaccgaccugaagcaguucaagcaggacgccaaguacagccacggcaucgacguggccgaccuguuccccgcccagcccggccugaccagcgccgugaucgaggcccugcccagaaacauggugcugaccugccagggcagcgacgacaucaagaagcugcuggacagccagggcagaagagacaucaagcugaucgacaucgcccugagcaaggccgacagcagaaaguucgagaacgccgugugggaccagugcaaggaccugugccacaugcacaccggcguggugguggagaagaagaagagaggcggcaaggaggagaucaccccccacugcgcccugauggacugcaucauguacgacgccgccgugagcggcggccugaacauccccgugcugagagccgugcugcccagagacaugguguucagaaccagcagccccaagguggugcugugaggacuagucccuguucccagagcccacuuuuuuuucuuuuuuugaaauaaaauagccugucuuucagaucucaaaggcucuuuucagagccaccaaaaaaaaaaaaaaaaaaaaaaaaaaaaaaaaaaaaaaaaaaaaaaaaaaaaaaaaaaaaaaaaaaaaaaaaaaaaaaaaaaaaaaaaaaaaaaaaaaaaa

SEQ ID NO: 19616 - RNA, 2033 nt, Artificial Sequence
  mRNA product Design a-1 (hSL-A100) comprising derived and/or modified sequence from LASV(LASV1000-NIG-2009;Clade II)__AIT17783__SP-HsALB_NP(2-569) (opt4)
aggagagucccgcagucggcguccagcggcucugcuuguucgugugugugucguugcaggccuuauucaagcuuaccaugaagugggugaccuucaucagccugcuguuccuguucagcagcgccuacagcagcgccagcaaggaggugaagagcuuccuguggacccagagccugagaagagagcugagcggcuacugcagcaacaucaagcugcagguggugaaggacgcccaggcccugcugcacggccuggacuucagcgaggugagcaacgugcagagacugaugagaaagcagaagagagacgacagcgaccugaagagacugagagaccugaaccaggccgugaacaaccugguggagcugaagagcacccagcagaagagcauccugagagugggcacccugaccagcgacgaccugcugacccuggccgccgaccuggagaagcugaagagcaaggugaucagaaccgagagaccccugagcagcggcguguacaugggcaaccugagcacccagcagcuggagcagagaagagcccugcugaacaugaucggcauggugggcggcgcccagggcacccagcccggcagagacggcguggugagagugugggacgugaagaaccccgaccugcugaacaaccaguucggcaccaugcccagccugacccuggccugccugaccaagcagggccagguggaccugaacgacguggugcuggcccugaccgaccugggccugaucuacaccgccaaguaccccaacagcagcgaccuggacagacugagccagagccaccccauccugaacaugguggacaccaagaagagcagccugaacaucagcggcuacaacuucagccugggcgccgccgugaaggccggcgccugcaugcuggacggcggcaacaugcuggagaccaucaaggugaccccccagaccauggacggcauccugaagagcauccugaaggugaagaagagccugggcauguucgugagcgacacccccggcgagagaaaccccuacgagaacauccuguacaagaucugccugagcggcgacggcuggcccuacaucgccagcagaaccagcaucgugggcagagccugggagaacaccaccguggaccuggagagcgacggcaagccccagaaggugggcaccgccggcagcaacaagagccugcagagcgccggcuuccccaccggccugaccuacagccagcugaugacccugaaggacagcaugaugcagcuggaccccagcgccaagaccuggaucgacaucgagggcagacccgaggaccccguggagaucgcccuguaccagcccgugagcggcugcuacauccacuucuucagagagcccaccgaccugaagcaguucaagcaggacgccaaguacagccacggcaucgacguggccgaccuguuccccgcccagcccggccugaccagcgccgugaucgaggcccugcccagaaacauggugcugaccugccagggcagcgacgacaucaagagacugcuggacagccagggcagaagagacaucaagcugaucgacaucgcccugagcaaggccgacagcagaagauucgagaacgccgugugggaccagugcaaggaccugugccacaugcacaccggcguggugguggagaagaagaagagaggcggcaaggaggagaucaccccccacugcgcccugauggacugcaucauguacgacgccgccgugagcggcggccugaacauccccgugcugagagccgugcugcccagagacaugguguucagaaccagcagccccaagguggugcugugaggacuagucccuguucccagagcccacuuuuuuuucuuuuuuugaaauaaaauagccugucuuucagaucucaaaggcucuuuucagagccaccaaaaaaaaaaaaaaaaaaaaaaaaaaaaaaaaaaaaaaaaaaaaaaaaaaaaaaaaaaaaaaaaaaaaaaaaaaaaaaaaaaaaaaaaaaaaaaaaaaaaa

SEQ ID NO: 19617 - RNA, 2033 nt, Artificial Sequence
  mRNA product Design a-1 (hSL-A100) comprising derived and/or modified sequence from LASV(LASV221-NIG-2010;Clade II)__AIT17625__SP-HsALB_NP(2-569) (opt4)
aggagagucccgcagucggcguccagcggcucugcuuguucgugugugugucguugcaggccuuauucaagcuuaccaugaagugggugaccuucaucagccugcuguuccuguucagcagcgccuacagcagcgccagcaaggaggugaagagcuuccuguggacccagagccugagaagagagcugagcggcuacugcagcagcaucaagcugcagguggugaaggacgcccaggcccugcugcacggccuggacuucagcgaggugagcaacgugcagagacugaugagaaagcagagaagagacgacagcgaccugaagagacugagagaccugaaccaggccgugaacaaccugguggagcugaagagcacccagcagaagagcauccugagagugggcacccugaccagcgacgaccugcugacccuggccgccgaccuggagaagcugaagagcaaggugaucagaaccgagagaccccugagcagcggcguguacaugggcaaccugagcacccagcagcuggagcagagaagagcccugcugaacaugaucggcauggugggcggcgcccagggcacccagcccggcagagacggcguggugagagugugggacgugaagaaccccgaccugcugaacaaccaguucggcaccaugcccagccugacccuggccugccugaccaagcagggccagguggaccugaacgacgccgugcuggcccugaccgaccugggccugaucuacaccgccaaguaccccaacagcagcgaccuggacagacugagccagagccaccccauccugaacaugguggacaccaagaagagcagccugaacaucagcggcuacaacuucagccugggcgccgccgugaaggccggcgccugcaugcuggacggcggcaacaugcuggagaccaucaaggugaccccccagaccguggacggcauccugaagagcauccugaaggugaagagaagccugggcauguucgugagcgacacccccggcgagagaaaccccuacgagaacauccuguacaagaucugccugagcggcgacggcuggcccuacaucgccagcagaaccagcaucgugggcagagccugggagaacaccaccguggaccuggagagcgacggcaagccccagaaggugggcaccgccggcagcaacaagagccugcagagcgccggcuuccccaccggccugaccuacagccagcugaugacccugaaggacagcaugaugcagcuggaccccagcgccaagaccuggaucgacaucgagggcagacccgaggaccccguggagaucgcccuguaccagcccaugagcggcugcuacauccacuucuucagagagcccaccgaccugaagcaguucaagcaggacgccaaguacagccacggcaucgacguggccgaccuguuccccgcccagcccggccugaccagcgccgugaucgaggcccugcccagaaacauggugcugaccugccagggcagcgacgacaucaagagacugcuggacagccagggcagaagagacaucaagcugaucgacaucgcccugagcaaggccgacagcagaaaguucgagaacgccgugugggaccagugcaaggaccugugccacaugcacaccggcguggugguggagaagaagaagagaggcggcaaggaggagaucaccccccacugcgcccugauggacugcaucauguacgacgccgccgugagcggcggccugaacauccccgugcugagagccgugcugcccagagacaugguguucagaaccagcagccccaagguggugcugugaggacuagucccuguucccagagcccacuuuuuuuucuuuuuuugaaauaaaauagccugucuuucagaucucaaaggcucuuuucagagccaccaaaaaaaaaaaaaaaaaaaaaaaaaaaaaaaaaaaaaaaaaaaaaaaaaaaaaaaaaaaaaaaaaaaaaaaaaaaaaaaaaaaaaaaaaaaaaaaaaaaaa

SEQ ID NO: 19618 - RNA, 2033 nt, Artificial Sequence
  mRNA product Design a-1 (hSL-A100) comprising derived and/or modified sequence from LASV(LASV237-NIG-2010;Clade II)__AIT17639__SP-HsALB_NP(2-569) (opt4)
aggagagucccgcagucggcguccagcggcucugcuuguucgugugugugucguugcaggccuuauucaagcuuaccaugaagugggugaccuucaucagccugcuguuccuguucagcagcgccuacagcagcgccagcaaggaggugaagagcuuccuguggacccagagccugagaagagagcugagcggcuacugcagcaacaucaagcugcagguggugaaggacgcccaggcccugcugcacggccuggacuucagcgaggugagcaacgugcagagacugaugagaaagcagaagagagacgacagcgaccugaagagacugagagaccugaaccaggccgugaacaaccugguggagcugaagagcacccagcagaagagcauccugagagugggcacccugaccagcgacgaccugcugacccuggccgccgaccuggagaagcugaagagcaaggugaucagaaccgagagaccccugagcagcggcguguacaugggcaaccugagcacccagcagcuggagcagagaagagcccugcugaacaugaucggcauggugggcggcgcccagggcacccagcccggcagagacggcguggugagagugugggacgugaagaaccccgaccugcugaacaaccaguucggcaccaugcccagccugacccuggccugccugaccaagcagggccagguggaccugaacgacgccgugcuggcccugaccgaccugggccugaucuacaccgccaaguaccccaacagcagcgaccuggacagacugagccagagccaccccauccugaacaugguggacaucaagaagagcagccugaacaucagcggcuacaacuucagccugggcgccgccgugaaggccggcgccugcaugcuggacggcggcaacaugcuggagaccaucaaggugaccccccagaccauggacggcauccugaagagcauccugaaggugaagagaagccugggcauguucgugagcgacacccccggcgagagaaaccccuacgagaacauccuguacaagaucugccugagcggcgacggcuggcccuacaucgccagcagaaccagcaucgugggcagagccugggagaacaccaccguggaccuggagagcgacggcaagccccagaaggugggcagcgccggcagcaacaagagccugcagagcgccggcuuccccaccggccugaccuacagccagcugaugacccugaaggacagcaugaugcagcuggaccccagcgccaagaccuggaucgacaucgagggcagacccgaggaccccguggagaucgcccuguaccagcccaugagcggcugcuacauccacuucuucagagagcccaccgaccugaagcaguucaagcaggacgccaaguacagccacggcaucgacguggccgaccuguuccccgcccagcccggccugaccagcgccgugaucgaggcccugcccagaaacauggugcugaccugccagggcagcgacgacaucaagagacugcuggacagccagggcagaagagacaucaagcugaucgacaucgcccugagcaaggccgacagcagaagauucgagaacgccgugugggaccagugcaaggaccugugccacaugcacaccggcguggugguggagaagaagaagagaggcggcaaggaggagaucaccccccacugcgcccugauggacugcaucauguacgacgccgccgugagcggcggccugaacauccccgugcugagagccgugcugcccagagacaugguguucagaaccagcagccccaagguggugcugugaggacuagucccuguucccagagcccacuuuuuuuucuuuuuuugaaauaaaauagccugucuuucagaucucaaaggcucuuuucagagccaccaaaaaaaaaaaaaaaaaaaaaaaaaaaaaaaaaaaaaaaaaaaaaaaaaaaaaaaaaaaaaaaaaaaaaaaaaaaaaaaaaaaaaaaaaaaaaaaaaaaaa

SEQ ID NO: 19619 - RNA, 2033 nt, Artificial Sequence
  mRNA product Design a-1 (hSL-A100) comprising derived and/or modified sequence from LASV(LASV253-NIG-2011;Clade II)__AIT17671__SP-HsALB_NP(2-569) (opt4)
aggagagucccgcagucggcguccagcggcucugcuuguucgugugugugucguugcaggccuuauucaagcuuaccaugaagugggugaccuucaucagccugcuguuccuguucagcagcgccuacagcagcgccagcaaggaggugaagagcuuccuguggacccagagccugagaagagagcugagcggcuacugcagcagcaucaagcugcagguggugaaggacgcccaggcccugcugcacggccuggacuucagcgaggugagcaacgugcagagacugaugagaaagcagaagagagacgacagcgaccugaagagacugagagaccugaaccaggccgugaacaaccugguggagcugaagagcacccagcagaagagcgugcugagagugggcacccugaccagcgacgaccugcugacccuggccgccgaccuggagaagcugaagagcaaggugaucagaaccgagagaccccugagcagcggcguguacaugggcaaccugagcacccagcagcuggagcagagaagagcccugcugaacaugaucggcauggugggcggcgcccagggcacccagcccggcagagacggcguggugagagugugggacgugaagaaccccgaccugcugaacaaccaguucggcaccaugcccagccugacccuggccugccugaccaagcagggccagguggaccugaacgacguggugcuggcccugaccgaccugggccugaucuacaccgccaaguaccccaacagcagcgaccuggacagacugagccagagccaccccauccugaacaugguggacaccaagaagagcagccugaacaucagcggcuacaacuucagccugggcgccgccgugaaggccggcgccugcaugcuggacggcggcaacaugcuggagaccaucaaggugaccccccagaccauggacggcauccugaagagcauccugaaggugaagaagagccugggcauguucgugagcgacacccccggcgagagaaaccccuacgagaacauccuguacaagaucugccugagcggcgacggcuggcccuacaucgccagcagaaccagcaucgugggcagagccugggagaacaccaccguggaccuggagagcgacggcaagccccagaaggugggcaccgccggcagcaacaagagccugcagagcgccggcuuccccaccggccugaccuacagccagcugaugacccugaaggacagcaugaugcagcuggaccccagcgccaagaccuggaucgacaucgagggcagacccgaggaccccguggagaucgcccuguaccagcccaugagcggcugcuacauccacuucuucagagagcccaccgaccugaagcaguucaagcaggacgccaaguacagccacggcaucgacgugaccgaccuguuccccgcccagcccggccugaccagcgccgugaucgaggcccugcccagaaacauggugcugaccugccagggcagcgacgacaucaagagacugcuggacagccagggcagaagagacaucaagcugaucgacaucgcccugagcaaggccgacagcagaagauucgagaacgccgugugggaccagugcaaggaccugugccacaugcacaccggcguggugguggagaagaagaagagaggcggcaaggaggagaucaccccccacugcgcccugauggacugcaucauguacgacgccgccgugagcggcggccugaacauccccgugcugagagccgugcugcccagagacaugguguucagaaccagcagccccaagguggugcugugaggacuagucccuguucccagagcccacuuuuuuuucuuuuuuugaaauaaaauagccugucuuucagaucucaaaggcucuuuucagagccaccaaaaaaaaaaaaaaaaaaaaaaaaaaaaaaaaaaaaaaaaaaaaaaaaaaaaaaaaaaaaaaaaaaaaaaaaaaaaaaaaaaaaaaaaaaaaaaaaaaaaa

SEQ ID NO: 19620 - RNA, 2033 nt, Artificial Sequence
  mRNA product Design a-1 (hSL-A100) comprising derived and/or modified sequence from LASV(LASV254-NIG-2011;Clade II)__AIT17675__SP-HsALB_NP(2-569) (opt4)
aggagagucccgcagucggcguccagcggcucugcuuguucgugugugugucguugcaggccuuauucaagcuuaccaugaagugggugaccuucaucagccugcuguuccuguucagcagcgccuacagcagcgccagcaaggaggugaagagcuuccuguggacccagagccugagaagagagcugagcggcuacugcagcagcaucaagcugcagguggugaaggacgcccaggcccugcugcacggccuggacuucagcgaggugagcaacgugcagagacugaugagaaagcagaagagagacgacagcgaccugaagagacugagagaccugaaccaggccgugaacaaccugguggagcugaagagcacccagcagaagagcgugcugagagugggcacccugaccagcgacgaccugcugacccuggccgccgaccuggagaagcugaagagcaaggugaucagaaccgagagaccccugagcagcggcguguacaugggcaaccugagcacccagcagcuggagcagagaagagcccugcugaacaugaucggcauggugggcggcgcccagggcacccagcccggcagagacggcguggugagagugugggacgugaagaaccccgaccugcugaacaaccaguucggcaccaugcccagccugacccuggccugccugaccaagcagggccagguggaccugaacgacgccgugcuggcccugaccgaccugggccugaucuacaccgccaaguaccccaacagcagcgaccuggacagacugagccagagccaccccauccugaacaugguggacaccaagaagagcagccugaacaucagcggcuacaacuucagccugggcgccgccgugaaggccggcgccugcaugcuggacggcggcaacaugcuggagaccaucaaggugaccccccagaccauggacggcauccugaagagcauccugaaggugaagaagagccugggcauguucgugagcgacacccccggcgagagaaaccccuacgagaacauccuguacaagaucugccugagcggcgacggcuggcccuacaucgccagcagaaccagcaucgugggcagagccugggagaacaccaucguggaccuggagagcgacggcaagccccagaaggugggcaccgccggcagcaacaagagccugcagagcgccggcuuccccaccggccugaccuacagccagcugaugacccugaaggacagcaugaugcagcuggaccccagcgccaagaccuggaucgacaucgagggcagacccgaggaccccguggagaucgcccuguaccagcccaugagcggcugcuacauccacuucuucagagagcccaccgaccugaagcaguucaagcaggacgccaaguacagccacggcaucgacguggccgaccuguuccccgcccagcccggccugaccagcgccgugaucgaggcccugcccagaaacauggugcugaccugccagggcagcgacgacaucaagagacugcuggacagccagggcagaagagacaucaagcugaucgacaucgcccugagcaaggccgacagcagaagauucgagaacgccgugugggaccagugcaaggaccugugccacaugcacaccggcguggugguggagaagaagaagagaggcggcaaggaggagaucaccccccacugcgcccugauggacugcaucauguacgacgccgccgugagcggcggccugaacauccccgugcugagagccgugcugcccagagacaugguguucagaaccagcagccccaagguggugcugugaggacuagucccuguucccagagcccacuuuuuuuucuuuuuuugaaauaaaauagccugucuuucagaucucaaaggcucuuuucagagccaccaaaaaaaaaaaaaaaaaaaaaaaaaaaaaaaaaaaaaaaaaaaaaaaaaaaaaaaaaaaaaaaaaaaaaaaaaaaaaaaaaaaaaaaaaaaaaaaaaaaaa

SEQ ID NO: 19621 - RNA, 2033 nt, Artificial Sequence
  mRNA product Design a-1 (hSL-A100) comprising derived and/or modified sequence from LASV(Nig08-04;Clade II)__ADU56611__SP-HsALB_NP(2-569) (opt4)
aggagagucccgcagucggcguccagcggcucugcuuguucgugugugugucguugcaggccuuauucaagcuuaccaugaagugggugaccuucaucagccugcuguuccuguucagcagcgccuacagcagcgccagcaaggaggugaagagcuuccuguggacccagagccugagaagagagcugagcggcuacugcagcaacaucaagcugcagguggugaaggacgcccaggcccugcugcacggccuggacuucagcgaggugagcaacgugcagagacugaugagaaagcagaagagagacgacggcgaccugaagagacugagagaccugaaccaggccgugaacaaccugguggagcugaagagcacccagcagaagagcgugcugagagugggcacccugaccagcgacgaccugcugacccuggccgccgaccuggagaagcugaagagcaaggugaucagaaccgagagaccccugagcagcggcguguacaugggcaaccugagcacccagcagcuggagcagagaaaggcccugcugagcaugaucggcauggugggcggcgcccagggcacccagcccggcagagacggcguggugagagugugggacgugaagaaccccgaccugcugaacaaccaguucggcaccaugcccagccugacccuggccugccugaccaagcagggccagguggaccugaacgacgccgugcuggcccugaccgaccugggccugaucuacaccgccaaguaccccaacagcagcgaccuggacagacugagccagagccaccccauccugaacaugguggacaccaagaagagcagccugaacaucagcggcuacaacuucagccugggcgccgccgugaaggccggcgccugcaugcuggacggcggcaacaugcuggagaccaucaaggugaccccccagaccauggacggcauccugaagagcauccugaaggugaagagaagccugggcauguucgugagcgacacccccggcgagagaaaccccuacgagaacauccuguacaagaucugccugagcggcgacggcuggcccuacaucgccagcagaaccagcaucgugggcagagccugggagaacaccaccguggaccuggagagcgacggcaagccccagaaggugggcaccgccggcagcaacaagagccugcagagcgccggcuuccccaccggccugaccuacagccagcugaugacccugaaggacagcaugaugcagcuggaccccagcgccaagaccuggaucgacaucgagggcagacccgaggaccccguggagaucgcccuguaccagcccaugagcggcugcuacauccacuucuucagagagcccaccgaccugaagcaguucaagcaggacgccaaguacagccacggcaucgacgugaccgaccuguucagcgcccagcccggccugaccagcgccgugaucgaggcccugcccagaaacauggugcugaccugccagggcagcgacgacaucaagaagcugcuggacagccagggcagaagagacaucaagcugaucgacaucagccugaacaaggccgacagcagaagauucgagaacgccgugugggaccagugcaaggaccugugccacaugcacaccggcguggugguggagaagaagaagagaggcggcaaggaggagaucaccccccacugcgcccugauggacugcaucauguucgacgccgccgugagcggcggccugaacauccccauccugagagccgugcugcccagagacaugguguucagaaccagcagccccaagguggugcugugaggacuagucccuguucccagagcccacuuuuuuuucuuuuuuugaaauaaaauagccugucuuucagaucucaaaggcucuuuucagagccaccaaaaaaaaaaaaaaaaaaaaaaaaaaaaaaaaaaaaaaaaaaaaaaaaaaaaaaaaaaaaaaaaaaaaaaaaaaaaaaaaaaaaaaaaaaaaaaaaaaaaa

SEQ ID NO: 19622 - RNA, 2036 nt, Artificial Sequence
  mRNA product Design a-1 (hSL-A100) comprising derived and/or modified sequence from LASV(GA391;Clade III)__AAA46284__SP-HsALB_NP(2-570) (opt4)
aggagagucccgcagucggcguccagcggcucugcuuguucgugugugugucguugcaggccuuauucaagcuuaccaugaagugggugaccuucaucagccugcuguuccuguucagcagcgccuacagcagcgccagcaaggaggugagaagcugccuguggacccagagccugagaagagagcugagcggcuacugcagcaacaucaagcugcagguggugaaggacgcccaggcccugcugcacggccuggacuucagcgaggugagcaacgugcagagacugaugagaaagcagaagagagacgacggcgaccugaagagacugagagaccugaaccaggccgugaacaaccugguggagcugaagagcacccagcagaagagcgugcugagagugggcacccugagcagcgacgaccugcugauccuggccgccgaccuggagaagcugaagagcaaggugaccagaaccgagagaccccugagcagcggcguguacaugggcaaccugagcagccagcagcuggaccagagaagagcccugcugaacaugaucggcaugaccggcgugagcggcggcggcaagggcgccagcaacggcaucgugagagugugggacgugaagaacgccgagcugcugaacaaccaguucggcaccaugcccagccugacccuggccugccugaccaagcagggccagguggaccugaacgacgccgugcaggcccugaccgaccugggccugaucuacaccgccaaguaccccaacagcagcgaccuggacagacugagccagagccaccccauccugaacaugaucgacaccaagaagagcagccugaacaucagcggcuacaacuucagccugggcgccgccgugaaggccggcgccugcaugcuggacggcggcaacaugcuggagaccaucaaggugagcccccagaccauggacggcauccugaagagcauccugaaggugaagaagagccugggcauguucgugagcgacacccccggcgagagaaaccccuacgagaacauccuguacaagaucugccugagcggcgacggcuggagcuacaucgccagcagaaccagcaucgugggcagagccugggagaacaccgugguggaccuggagcaggacaacaagccccagaagaucggcaacggcggcagcaacaagagccugcagagcgccggcuucgccgccggccugaucuacagccagcugaugacccugaaggacuucaagugcuucaaccugauccccaacgccaagaccuggauggacaucgagggcagacccgaggaccccguggagaucgcccuguaccagcccagcagcggcugcuacgugcacuucuucagagagcccaccgaccugaagcaguucaagcaggacgccaaguacagccacggcagagacgugaccgaccuguucgccgcccagcccggccugaccagcgccgugaucgaggcccugcccagaaacauggugaucaccugccagggcagcgaggacaucagaaagcugcuggagagccagggcagaagagacaucaagcugaucgacaucacccugagcaaggccgacagcagaaaguucgagaacgccgugugggaccaguucaaggaccugugccacaugcacaccggcguggugguggagaagaagaagagaggcggcaaggaggagaucaccccccacugcgcccugauggacugcaucauguucgacgccgccgugagcggcggccuggacgccaaggugcugagaguggugcugcccagagacaugguguucagaaccagcacccccaagguggugcugugaggacuagucccuguucccagagcccacuuuuuuuucuuuuuuugaaauaaaauagccugucuuucagaucucaaaggcucuuuucagagccaccaaaaaaaaaaaaaaaaaaaaaaaaaaaaaaaaaaaaaaaaaaaaaaaaaaaaaaaaaaaaaaaaaaaaaaaaaaaaaaaaaaaaaaaaaaaaaaaaaaaaa

SEQ ID NO: 19623 - RNA, 2033 nt, Artificial Sequence
  mRNA product Design a-1 (hSL-A100) comprising derived and/or modified sequence from LASV(Nig08-A19;Clade III)__ADU56619__SP-HsALB_NP(2-569) (opt4)
aggagagucccgcagucggcguccagcggcucugcuuguucgugugugugucguugcaggccuuauucaagcuuaccaugaagugggugaccuucaucagccugcuguuccuguucagcagcgccuacagcagcgccagcaaggaggugaagagcuuccuguggacccagagccugagaagagagcugagcggcuacugcagcaacaucaagcugcagguggugaaggacgcccaggcccugcugcacggccuggacuucagcgaggugagcaacgugcagagacugaugagaaagcagaagagagacgacggcgaccugaagagacugagagaccugaaccaggccgugaacaaccugguggagcugaagagcacccagcagaagagcgugcugagagugggcacccugagcagcgacgaccugcuggugcuggccgccgaccuggagaagcugaagagcaagguggugagaaccgagagaccccugagcagcggcaucuacaugggcaaccugagcagccagcagcuggaccagagaaaggcccugcugaacaugaucggcaugaccggcggcaacggcggcagaaacaccaccagcgacggcaucgugagagugugggacgugaagaacgccgagcugcugaacaaccaguucggcaccaugcccagccugacccuggccugccugaccaagcagggccagguggaccugaacgacgccgugcaggcccugaccgaccugggccugaucuacaccgccaaguaccccaacagcagcgaccuggacagacuggcccagagccaccccauccugaacaugaucgacaccaagaagagcagccugaacaucagcggcuacaacuucagccugggcgccgccgugaaggccggcgccugcaugcuggacggcggcaacaugcuggagaccaucaaggugagcccccagaccauggacggcauccugaagagcauccugaaggugaagagaagccugggcauguucaucagcgacacccccggcgagagaaaccccuacgagaacauccuguacaagaucugccugagcggcgacggcuggcccuacaucgccagcagaaccagcaucgugggcagagccugggagaacaccgugguggaccuggagagcgacaacaagccccagaagaccggcaacggcggcagcaacaagagccugcagagcgccggcuucgccgccggccugaccuacagccagcugaugacccugaaggacagcaugcugcagcuggaccccaacgccaagaccuggauggacaucgagggcagacccgaggaccccguggagaucgcccuguaccagcccagcagcggcugcuacauccacuucuucagagagcccaccgaccugaagcaguucaagcaggacgccaaguacagccacggcaucgacgugaccgaccuguucgccgcccagcccggccugaccagcgccgugaucgaggcccugcccagaaacauggugaucaccugccagggcagcgaggacaucagaaagcugcuggagagccagggcagaagagacaucaagcugaucgacaucagccugagcaagguggacagcagaaaguucgagaacgccgugugggaccaguucaaggaccugugccacaugcacaccggcaucgugguggagaagaagaagagaggcggcaaggaggagaucaccccccacugcgcccugauggacugcaucauguucgacgccgccgugagcggcggcguggacgccaaggugcugagagccgugcugcccagagacaugguguucagaaccagcacccccaagguggugcugugaggacuagucccuguucccagagcccacuuuuuuuucuuuuuuugaaauaaaauagccugucuuucagaucucaaaggcucuuuucagagccaccaaaaaaaaaaaaaaaaaaaaaaaaaaaaaaaaaaaaaaaaaaaaaaaaaaaaaaaaaaaaaaaaaaaaaaaaaaaaaaaaaaaaaaaaaaaaaaaaaaaaa

SEQ ID NO: 19624 - RNA, 2033 nt, Artificial Sequence
  mRNA product Design a-1 (hSL-A100) comprising derived and/or modified sequence from LASV(G1180-SLE-2010;Clade IV)__AIT17169__SP-HsALB_NP(2-569) (opt4)
aggagagucccgcagucggcguccagcggcucugcuuguucgugugugugucguugcaggccuuauucaagcuuaccaugaagugggugaccuucaucagccugcuguuccuguucagcagcgccuacagcagcgccagcaaggagaucaagagcuuccuguggacccagagccugagaagagagcugagcggcuacugcagcaacaucaagcugcagguggugaaggacgcccaggcccugcugcacggccuggacuucagcgaggugagcaacgugcagagacugaugagaaaggagagaagagacgacaacgaccugaagagacugagagaccugaaccaggccgugaacaaccugguggagcugaagagcacccagcagaagagcauccugagagugggcacccugaccagcgacgaccugcugauccuggccgccgaccuggagaagcugaagagcaaggugaucagaaccgagagaccccugagcgccggcguguacaugggcaaccugagcagccagcagcuggaccagagaagagcccugcugagcaugaucggcaugagcagcggcaaccagagagcccaggccggcagagacggcguggugagagugugggacgugaagaacguggagcugcugaacaaccaguucggcaccaugcccagccugacccuggccugccugaccaagcagggccagguggaccugaacgacgccgugcaggcccugaccgaccugggccugaucuacaccgccaaguaccccaacaccagcgaccuggacagacugacccagagccaccccauccugaacaugaucgacaccaagaagagcagccugaacaucagcggcuacaacuucagccugggcgccgccgugaaggccggcgccugcaugcuggacggcggcaacaugcuggagaccaucaaggugagcccccagaccauggacggcauccugaagagcauccugaaggugaagaaggcccugggcauguucaucagcgacacccccggcgagagaaaccccuacgagaacauccuguacaagaucugccugagcggcgacggcuggcccuacaucgccagcagaaccagcaucaccggcagagccugggagaacaccgugguggaccuggagagcgacggcaagccccagaaggccggcagcaacaacagcaacaagagccugcagagcgugggcuucaccgccggccugaccuacagccagcugaugacccugaaggacgccaugcugcagcuggaccccaacgccaagaccuggauggacaucgagggcagacccgaggaccccguggagaucgcccuguaccagcccagcagcggcugcuacauccacuucuucagagagcccaccgaccugaagcaguucaagcaggacgccaaguacagccacggcaucgacgugaccgaccuguucgccgcccagcccggccugaccagcgccgugaucgacgcccugcccagaaacauggugaucaccugccagggcagcgacgacaucagaaagcugcuggagagccagggcagaaaggacaucaagcugaucgacaucgcccugagcaagaccgacagcagaaaguacgagaacgccgugugggaccaguacaaggaccugugccacaugcacaccggcguggugguggagaagaagaagagaggcggcaaggaggagaucaccccccacugcgcccugauggacugcaucauguucgacgccgccgugagcggcggccugaacaccagcgugcugagagccgugcugcccagagacaugguguucagaaccagcacccccagaguggugcugugaggacuagucccuguucccagagcccacuuuuuuuucuuuuuuugaaauaaaauagccugucuuucagaucucaaaggcucuuuucagagccaccaaaaaaaaaaaaaaaaaaaaaaaaaaaaaaaaaaaaaaaaaaaaaaaaaaaaaaaaaaaaaaaaaaaaaaaaaaaaaaaaaaaaaaaaaaaaaaaaaaaaa

SEQ ID NO: 19625 - RNA, 2033 nt, Artificial Sequence
  mRNA product Design a-1 (hSL-A100) comprising derived and/or modified sequence from LASV(G1442-SLE-2011;Clade IV)__AIT17181__SP-HsALB_NP(2-569) (opt4)
aggagagucccgcagucggcguccagcggcucugcuuguucgugugugugucguugcaggccuuauucaagcuuaccaugaagugggugaccuucaucagccugcuguuccuguucagcagcgccuacagcagcgccagcaaggaggugaagagcuuccuguggacccagagccugagaagagagcugagcggcuacugcagcaacaucaagcugcagguggugaaggacgcccaggcccugcugcacggccuggacuucagcgaggugagcaacgugcagagacugaugagaaagcagagaagagacgacaacgaccugaagagacugagagaccugaaccaggccgugaacaaccugguggagcugaagagcacccagcagaagagcgugcugagagugggcacccugaccagcgacgaccugcuggugcuggccgccgaccuggagaagcugaagagcaaggugaucagaaccgagagaccccugagcgccggcguguacaugggcaaccugagcagccagcagcuggaccagagaagagcccugcugaacaugaucggcaugagcggcggcauccagggcaccagaaccggcagagacggcguggugagagugugggacgugaagaacgccgaccugcugaacaaccaguucggcaccaugcccagccugacccuggccugccugaccaagcagggccagguggaccugaacgacguggugcaggcccugaccgaccugggccugaucuacaccgccaaguaccccaacgccagcgaccuggacagacugacccagagccaccccauccugaacaugaucgacaccaagaagagcagccugaacaucagcggcuacaacuucagccugggcgccgccgugaaggccggcgccugcaugcuggacggcggcaacaugcuggagaccaucaaggugagcccccagaccauggacggcauccugaagagcauccugaaggugaagaagacccugggcauguucaucagcgacacccccggcgagagaaaccccuacgagaacauccuguacaagaucugccugagcggcgacggcuggcccuacaucgccagcagaaccagcaucaccggcagagccugggagaacaccgugguggaccuggagagcgacggcaagccccagaaggccggcagcaacaacagcaacaagagccugcagagcgccggcuucgccgccggccugaccuacagccagcugaugacccugaaggacgccaugcugcagcuggaccccaacgccaagaccuggauggacaucgagggcagacccgaggaccccguggagaucgcccuguaccagcccagcagcggcugcuacauccacuucuucagagagcccaccgaccugaagcaguucaagcaggacgccaaguacagccacggcaucgacgugaccgaccuguucgccgcccagcccggccugaccagcgccgugaucgaggcccugcccagaaacauggugaucaccugccagggcagcgacgacaucaagaagcugcuggagagccagggcagaaaggacaucaagcugaucgacaucgcccugagcaagaccgacagcagaaaguacgagaacgccgugugggaccaguacaaggaccugugccacaugcacaccggcguggugguggagaagaagaagagaggcggcaaggaggagaucaccccccacugcgcccugauggacugcaucauguucgacgccgccgugagcggcggccugaacacccuggugcugagagccgugcugcccagagacaugguguucagaaccagcacccccagaguggugcugugaggacuagucccuguucccagagcccacuuuuuuuucuuuuuuugaaauaaaauagccugucuuucagaucucaaaggcucuuuucagagccaccaaaaaaaaaaaaaaaaaaaaaaaaaaaaaaaaaaaaaaaaaaaaaaaaaaaaaaaaaaaaaaaaaaaaaaaaaaaaaaaaaaaaaaaaaaaaaaaaaaaaa

SEQ ID NO: 19626 - RNA, 2033 nt, Artificial Sequence
  mRNA product Design a-1 (hSL-A100) comprising derived and/or modified sequence from LASV(G3010-SLE-2013;Clade IV)__AIT17345__SP-HsALB_NP(2-569) (opt4)
aggagagucccgcagucggcguccagcggcucugcuuguucgugugugugucguugcaggccuuauucaagcuuaccaugaagugggugaccuucaucagccugcuguuccuguucagcagcgccuacagcagcgccagcaaggagaucaagagcuuccuguggacccagagccugagaagagagcugagcggcuacugcagcaacaucaagcugcagguggugaaggacgcccaggcccugcugcacggccuggacuucagcgaggugagcaacgugcagagacugaugagaaaggagagaagagacgacaacgaccugaagagacugagagaccugaaccaggccgugaacaaccugguggagcugaagagcacccagcagaagagcauccugagagugggcacccugaccagcgacgaccugcugauccuggccgccgaccuggagaagcugaagagcaaggugaccagaaccgagagaccccugagcgccggcguguacaugggcaaccugagcagccagcagcuggaccagagaagagcccugcugagcaugaucggcaugagcagcggcgugcagggcgccagagccggcagagacggcguggugagagugugggacgugaagaacgccgagcugcugaacaaccaguucggcaccaugcccagccugacccuggccugccugaccaagcagggccagguggaccugaacgacguggugcaggcccugaccgaccugggccugaucuacaccgccaaguaccccaacaccagcgaccuggacagacugacccagagccaccccauccugaacaugaucgacaccaagaagagcagccugaacaucagcggcuacaacuucagccugggcgccgccgugaaggccggcgccugcaugcuggacggcggcaacaugcuggagaccaucaaggugagcccccagaccauggacggcauccugaagagcauccugaaggugaagaaggcccugggcauguucaucagcgagacccccggcgagagaaaccccuacgagaacauccuguacaagaucugccugagcggcgacggcuggcccuacaucgccagcagaaccagcaucaccggcagagccugggagaacaccgugguggaccuggagagcgacggcaagccccagaaggccggcagcaacaacagcaacaagagccugcagagcgccggcuucaccgccggccugaccuacagccagcugaugacccugaaggacgccaugcugcagcuggaccccaacgccaagaccuggauggacaucgagggcagacccgaggaccccguggagguggcccuguaccagcccagcagcggcugcuacauccacuucuucagagagcccaccgaccugaagcaguucaagcaggacgccaaguacagccacggcaucgacgugaccgaccuguucgccgcccagcccggccugaccagcgccgugaucgacgcccugcccagaaacauggugaucaccugccagggcagcgacgacaucaagaagcugcuggagagccagggcagaaaggacaucaagcugaucgacaucgcccugagcaagaccgacagcagaaaguacgagaacgccgugugggaccaguacaaggaccugugccacaugcacaccggcguggugguggagaagaagaagagaggcggcaaggaggagaucaccccccacugcgcccugauggacugcaucauguucgacgccgccgugagcggcggccugaacaccagcgugcugagagccgugcugcccagagacaugguguucagaaccagcacccccagaguggugcugugaggacuagucccuguucccagagcccacuuuuuuuucuuuuuuugaaauaaaauagccugucuuucagaucucaaaggcucuuuucagagccaccaaaaaaaaaaaaaaaaaaaaaaaaaaaaaaaaaaaaaaaaaaaaaaaaaaaaaaaaaaaaaaaaaaaaaaaaaaaaaaaaaaaaaaaaaaaaaaaaaaaaa

SEQ ID NO: 19627 - RNA, 2033 nt, Artificial Sequence
  mRNA product Design a-1 (hSL-A100) comprising derived and/or modified sequence from LASV(G502-SLE-2009;Clade IV)__AIT17127__SP-HsALB_NP(2-569) (opt4)
aggagagucccgcagucggcguccagcggcucugcuuguucgugugugugucguugcaggccuuauucaagcuuaccaugaagugggugaccuucaucagccugcuguuccuguucagcagcgccuacagcagcgccagcaaggagaucaagagcuuccuguggacccagagccugagaagagagcugagcggcuacugcagcaacaucaagcugcagguggugaaggacgcccaggcccugcugcacggccuggacuucagcgaggugagcaacgugcagagacugaugagaaaggagagaagagacgacaacgaccugaagagacugagagaccugaaccaggccgugaacaaccugguggagcugaagagcacccagcagaagagcauccugagagugggcacccugaccagcgacgaccugcugauccuggccgccgaccuggagaagcugaagagcaaggugaucagaaccgagagaccccugagcgccggcguguacaugggcaaccugagcagccagcagcuggaccagagaagagcccugcugagcaugaucggcaugagcggcggcaaccagggcgugagagccggcaaggacggcguggugagagugugggacgugaagaacgccgagcugcugaacaaccaguucggcaccaugcccagccugacccuggccugccugaccaagcagggccagguggaccugaacgacgccgugcaggcccugaccgaccugggccugaucuacaccgccaaguaccccaacaccagcgaccuggacagacugacccagagccaccccauccugaacaugaucgacaccaagaagagcagccugaacaucagcggcuacaacuucagccugggcgccgccgugaaggccggcgccugcaugcuggacggcggcaacaugcuggagaccaucaaggugagcccccagaccauggacggcauccugaagagcauccugaaggugaagaaggcccugggcauguucaucagcgacacccccggcgagagaaaccccuacgagaacauccuguacaagaucugccugagcggcgacggcuggcccuacaucgccagcagaaccagcaucaccggcagagccugggagaacaccgugguggaccuggagagcgacggcaagccccagaaggccggcagcaacaacagcaacaagagccugcagagcgccggcuucaccgccggccugaccuacagccagcugaugacccugaaggacgccaugcugcagcuggaccccaacaccaagaccuggauggacaucgagggcagacccgaggaccccguggagaucgcccuguaccagcccagcagcggcugcuacauccacuucuucagagagcccaccgaccugaagcaguucaagcaggacgccaaguacagccacggcaucgacgugaccgaccuguucgccgcccagcccggccugaccagcgccgugaucgacgcccugcccagaaacauggugaucaccugccagggcagcgacgacaucagaaagcugcuggagagccagggcagaaaggacaucaagcugaucgacaucgcccugaacaagaccgacagcagaaaguacgagaacgccgugugggaccaguacaaggaccugugccacaugcacaccggcguggugguggagaagaagaagagaggcggcaaggaggagaucaccccccacugcgcccugauggacugcaucauguucgacgccgccgugagcggcggccugaacaccagcgugcugagagccgugcugcccagagacaugguguucagaaccagcacccccagaguggugcugugaggacuagucccuguucccagagcccacuuuuuuuucuuuuuuugaaauaaaauagccugucuuucagaucucaaaggcucuuuucagagccaccaaaaaaaaaaaaaaaaaaaaaaaaaaaaaaaaaaaaaaaaaaaaaaaaaaaaaaaaaaaaaaaaaaaaaaaaaaaaaaaaaaaaaaaaaaaaaaaaaaaaa

SEQ ID NO: 19628 - RNA, 2033 nt, Artificial Sequence
  mRNA product Design a-1 (hSL-A100) comprising derived and/or modified sequence from LASV(G733-SLE-2010;Clade IV)__AIT17155__SP-HsALB_NP(2-569) (opt4)
aggagagucccgcagucggcguccagcggcucugcuuguucgugugugugucguugcaggccuuauucaagcuuaccaugaagugggugaccuucaucagccugcuguuccuguucagcagcgccuacagcagcgccagcaaggagaucaagagcuuccuguggacccagagccugagaagagagcugagcggcuacugcagcaacaucaagcugcagguggugaaggacgcccaggcccugcugcacggccuggacuucagcgaggugagcaacgugcagagacugaugagaaaggagagaagagacgacaacgaccugaagagacugagagaccugaaccaggccgugaacaaccugguggagcugaagagcacccagcagaagagcgugcugagagugggcacccugaccagcgacgagcugcuggugcuggccgccgaccuggagaagcugaagagcaaggugaucagaaccgagagaccccugagcgccggcguguacaugggcaaccugagcagccagcagcuggaccagagaagagcccugcugagcaugaucggcaugagcggcggcaaccagggcgccagaaccggcagagacggcguggugagagugugggacgugaagaacgccgagcugcugaacaaccaguucggcaccaugcccagccugacccuggccugccugaccaagcagggccagguggaccugaacgacgccgugcaggcccugaccgaccugggccugaucuacaccgccaaguaccccaacaccagcgaccuggacagacugacccagagccaccccauccugaacaugaucgacaccaagaagagcagccugaacaucagcggcuacaacuucagccugggcgccgccgugaaggccggcgccugcaugcuggacggcggcaacaugcuggagaccaucaaggugagcccccagaccauggacggcauccugaagagcauccugaaggugaagaaggcccugggcauguucaucagcgacacccccggcgagagaaaccccuacgagaacauccuguacaagaucugccugagcggcgacggcuggcccuacaucgccagcagaaccagcaucaccggcagagccugggagaacaccgugguggaccuggagagcgacggcaagccccagaaggccggcagcaacaacagcaacaagagccugcagagcgccggcuucaccgccggccugaccuacagccagcugaugacccugaaggacgccaugcugcagcuggaccccaacgccaagaccuggauggacaucgagggcagacccgaggaccccguggagaucgcccuguaccagcccagcagcggcugcuacauccacuucuucagagagcccaccgaccugaagcaguucaagcaggacgccaaguacagccacggcaucgacgugaccgaccuguucgccgcccagcccggccugaccagcgccgugaucgacgcccugcccagaaacauggugaucaccugccagggcagcgacgacaucagaaagcugcuggagagccagggcagaaaggacaucaagcugaucgacaucgcccugagcaagaucgacagcagaaaguacgagaacgccgugugggaccaguacaaggaccugugccacaugcacaccggcguggugguggagaagaagaagagaggcggcaaggaggagaucaccccccacugcgcccugauggacugcaucauguucgacgccgccgugagcggcggccugaacagccuggugcugagagccgugcugcccagagacaugguguucagaaccagcacccccagaguggugcugugaggacuagucccuguucccagagcccacuuuuuuuucuuuuuuugaaauaaaauagccugucuuucagaucucaaaggcucuuuucagagccaccaaaaaaaaaaaaaaaaaaaaaaaaaaaaaaaaaaaaaaaaaaaaaaaaaaaaaaaaaaaaaaaaaaaaaaaaaaaaaaaaaaaaaaaaaaaaaaaaaaaaa

SEQ ID NO: 19629 - RNA, 2033 nt, Artificial Sequence
  mRNA product Design a-1 (hSL-A100) comprising derived and/or modified sequence from MOPV/LASV reassortant(IGS-1;Clade IV)__AFY05578__SP-HsALB_NP(2-569) (opt4)
aggagagucccgcagucggcguccagcggcucugcuuguucgugugugugucguugcaggccuuauucaagcuuaccaugaagugggugaccuucaucagccugcuguuccuguucagcagcgccuacagcagcgccagcaaggagaucaagagcuuccuguggacccagagccugagaagagagcugagcggcuacugcagcaacaucaagcugcagguggugaaggacgcccaggcccugcugcacggccuggacuucagcgaggugagcaacgugcagagacugaugagaaaggagagaagagacgacaacgaccugaagagacugagagaccugaaccaggccgugaacaaccugguggagcugaagagcacccagcagaagagcauccugagagugggcacccugaccagcgacgaccugcugauccuggccgccgaccuggagaagcugagaagcaaggugaucagaaccgagagaccccugagcgccggcguguacaugggcaaccugagcagccagcagcuggaccagagaagagcccugcugaacaugaucggcaugagcggcggcaaccagggcgccagagccggcagagacggcguggugagagugugggacgugaagaacgccgagcugcugagcaaccaguucggcaccaugcccagccugacccuggccugccugaccaagcagggccagguggaccugaacgacgccgugcaggcccugaccgaccugggccugaucuacaccgccaaguaccccaacaccagcgaccuggacagacugacccagagccaccccauccugaacaugaucgacaccaagaagagcagccugaacaucagcggcuacaacuucagccugggcgccgccgugaaggccggcgccugcaugcuggacggcggcaacaugcuggagaccaucaaggugagcccccagaccauggacggcauccugaagagcauccugaaggugaagaaggcccugggcauguucaucagcgacacccccggcgagagaaaccccuacgagaacauccuguacaagaucugccugagcggcgacggcuggcccuacaucgccagcagaaccagcaucaccggcagagccugggagaacaccgugguggaccuggagagcgacggcaagccccagaaggccgacagcaacaacagcagcaagagccugcagagcgccggcuucaccgccggccugaccuacagccagcugaugacccugaaggacgccaugcugcagcuggaccccaacgccaagaccuggauggacaucgagggcagacccgaggaccccguggagaucgcccuguaccagcccagcagcggcugcuacauccacuucuucagagagcccaccgaccugaagcaguucaagcaggacgccaaguacagccacggcaucgacgugaccgaccuguucgccacccagcccggccugaccagcgccgugaucgacgcccugcccagaaacauggugaucaccugccagggcagcgacgacaucagaaagcugcuggagagccagggcagaaaggacaucaagcugaucgacaucgaccugagcaagaccgacagcagaaaguacgagaacgccgugugggaccaguacaaggaccugugccacaugcacaccggcguggugguggagaagaagaagagaggcggcaaggaggagaucaccccccacugcgcccugauggacugcaucauguucgacgccgccgugagcggcggccugaacaccagcgugcugagagccgugcugcccagagacaugguguucagaaccagcacccccagaguggugcugugaggacuagucccuguucccagagcccacuuuuuuuucuuuuuuugaaauaaaauagccugucuuucagaucucaaaggcucuuuucagagccaccaaaaaaaaaaaaaaaaaaaaaaaaaaaaaaaaaaaaaaaaaaaaaaaaaaaaaaaaaaaaaaaaaaaaaaaaaaaaaaaaaaaaaaaaaaaaaaaaaaaaa

SEQ ID NO: 19630 - RNA, 2033 nt, Artificial Sequence
  mRNA product Design a-1 (hSL-A100) comprising derived and/or modified sequence from LASV(LM765-SLE-2012;Clade IV)__AIT17815__SP-HsALB_NP(2-569) (opt4)
aggagagucccgcagucggcguccagcggcucugcuuguucgugugugugucguugcaggccuuauucaagcuuaccaugaagugggugaccuucaucagccugcuguuccuguucagcagcgccuacagcagcgccagcaaggagaucaagagcuuccuguggacccagagccugagaagagagcugagcggcuacugcagcaacaucaagcugcagguggugaaggacgcccaggcccugcugcacggccuggacuucagcgaggugagcaacgugcagagacugaugagaaaggagagaagagacgacaacgaccugaagagacugagagaccugaaccaggccgugaacaaccugguggagcugaagagcacccagcagaagagcauccugagagugggcacccugaccagcgacgaccugcugauccuggccgccgaccuggagaagcugaagagcaaggugaccagaaccgagagaccccugagcgccggcguguacaugggcaaccugagcagccagcagcuggaccagagaagagcccugcuggacaugaucggcaugagcggcagcaaccagggcgccagagccggcagagacggcguggugagagugugggacgugaagaacgccgagcugcugaacaaccaguucggcaccaugcccagccugacccuggccugccugaccaagcagggccagguggaccugaacgacgccgugcaggcccugaccgaccugggccugaucuacaccgccaaguaccccaacaccagcgaccuggacagacugacccagagccaccccauccugaacaugaucgacaccaagaagagcagccugaacaucagcggcuacaacuucagccugggcgccgccgugaaggccggcgccugcaugcuggacggcggcaacaugcuggagaccaucaaggugagcccccagaccauggacggcauccugaagagcauccugaaggugaagaaggcccugggcauguucaucagcgacgcccccggcgagagaaaccccuacgagaacauccuguacaagaucugccugagcggcgacggcuggcccuacaucgccagcagaaccagcaucaccggcagagccugggagaacaccgugguggaccuggagagcgacggcaagccccagaaggccggcagcaacggcagcaacaagagccugcagagcgccggcuucaccgccggccugaccuacagccagcugaugacccugaaggacgccaugcugcagcuggaccccaacgccaagaccuggauggacaucgagggcagacccgaggaccccguggagaucgcccuguaccagcccagcagcggcugcuacauccacuucuucagagagcccaccgaccugaagcaguucaagcaggacgccaaguacagccacggcaucgacgugaccgaccuguucgccgcccagcccggccugaccagcgccgugaucgacgcccugcccagaaacauggugaucaccugccagggcagcgacgacaucagaaagcuguucgagagccagggcagaaaggacaucaagcugaucgacaucgcccugagcaagaccgacagcagaaaguacgagaacgccgugugggaccaguacaaggaccugugccacaugcacaccggcaucgugguggagaagaagaagagaggcggcaaggaggagaucaccccccacugcgcccugauggacugcaucauguucgacgccgccgugagcggcggccugaacaccagcgugcugagagccgugcugcccagagacaugguguucagaaccagcacccccagaguggugcugugaggacuagucccuguucccagagcccacuuuuuuuucuuuuuuugaaauaaaauagccugucuuucagaucucaaaggcucuuuucagagccaccaaaaaaaaaaaaaaaaaaaaaaaaaaaaaaaaaaaaaaaaaaaaaaaaaaaaaaaaaaaaaaaaaaaaaaaaaaaaaaaaaaaaaaaaaaaaaaaaaaaaa

SEQ ID NO: 19631 - RNA, 2033 nt, Artificial Sequence
  mRNA product Design a-1 (hSL-A100) comprising derived and/or modified sequence from LASV(LM776-SLE-2012;Clade IV)__AIT17825__SP-HsALB_NP(2-569) (opt4)
aggagagucccgcagucggcguccagcggcucugcuuguucgugugugugucguugcaggccuuauucaagcuuaccaugaagugggugaccuucaucagccugcuguuccuguucagcagcgccuacagcagcgccagcaaggagaucaagagcuuccuguggacccagagccugagaagagagcugagcagcuacugcagcaacaucaagcugcagguggugaaggacgcccaggcccugcugcacggccuggacuucagcgaggugagcaacgugcagagacugaugagaaaggagagaagagacgacaacgaccugaagagacugagagaccugaaccaggccgugaacaaccugguggagcugaagagcacccagcagaagagcauccugagagugggcacccugaccagcgacgaccugcugauccuggccgccgaccuggagaagcugaagagcaaggugaccagaaccgagagaccccugagcgccggcguguacaugggcaaccugagcagccagcagcuggaccagagaagagcccugcugagcaugaucggcaugagcggcagcaaccagggcgccagagccggcagagacggcguggugagagugugggacgugaagaacgccgagcugcugaacaaccaguucggcaccaugcccagccugacccuggccugccugaccaagcagggccagguggaccugaacgacgccgugcaggcccugaccgaccugggccugaucuacaccgccaaguaccccaacaccagcgaccuggacagacugacccagagccaccccauccugaacaugaucgacaccaagaagagcagccugaacaucagcggcuacaacuucagccugggcgccgccgugaaggccggcgccugcaugcuggacggcggcaacaugcuggagaccaucaaggugagcccccagaccauggacggcauccugaagagcauccugaaggugaagaaggcccugggcauguucaucagcgacacccccggcgagagaaaccccuacgagaacauccuguacaagaucugccugagcggcgacggcuggcccuacaucgccagcagaaccagcaucaccggcagagccugggagaacaccgugguggaccuggagagcgacggcaagccccagaaggccggcagcaacaacagcaacaagagccugcagagcgccggcuucaccgccggccugaccuacagccagcugaugacccugaaggacgccaugcugcagcuggaccccaacgccaagaccuggauggacaucgagggcagacccgaggaccccguggagguggcccuguaccagcccagcagcggcugcuacauccacuucuucagagagcccaccgaccugaagcaguucaagcaggacgccaaguacagccacggcaucgacgugaccgaccuguucgccgcccagcccggccugaccagcgccgugaucgacgcccugcccagaaacauggugaucaccugccagggcagcgacgacaucagaaagcugcuggagagccagggcagaaaggacaucaagcugaucgacaucgcccugagcaagaccgacagcagaaaguacgagaacgccgugugggaccaguacaaggaccugugccacaugcacaccggcguggugguggagaagaagaagagaggcggcaaggaggagaucaccccccacugcgcccugauggacugcaucauguucgacgccgccgugagcggcggccugaacaccagcgugcugagagccgugcugcccagagacaugguguucagaaccagcacccccagaguggugcugugaggacuagucccuguucccagagcccacuuuuuuuucuuuuuuugaaauaaaauagccugucuuucagaucucaaaggcucuuuucagagccaccaaaaaaaaaaaaaaaaaaaaaaaaaaaaaaaaaaaaaaaaaaaaaaaaaaaaaaaaaaaaaaaaaaaaaaaaaaaaaaaaaaaaaaaaaaaaaaaaaaaaa

SEQ ID NO: 19632 - RNA, 2033 nt, Artificial Sequence
  mRNA product Design a-1 (hSL-A100) comprising derived and/or modified sequence from LASV(Mad39;Clade IV)__ANH09723__SP-HsALB_NP(2-569) (opt4)
aggagagucccgcagucggcguccagcggcucugcuuguucgugugugugucguugcaggccuuauucaagcuuaccaugaagugggugaccuucaucagccugcuguuccuguucagcagcgccuacagcagcgccagcaaggagaucaagagcuuccuguggacccagagccugagaagagagcugagcggcuacugcagcaacaucaagcugcagguggugaaggacgcccaggcccugcugcacggccuggacuucagcgaggugagcaacgugcagagacugaugagaaagcagagaagagacgacaacgaccugaagagacugagagaccugaaccaggccgugaacaaccugguggagcugaagagcacccagcagaagagcgugcugagagugggcacccugaccagcgacgaccugcugacccuggccgccgaccuggagaagcugaagagcaaggugaccagaaccgagagaccccugaccgccggcguguacaugggcaaccugagcagccagcagcuggaccagagaagagcccugcugaacaugaucggcaugagcggcggcaaccagggcgccagaaccggcagagacggcguggugagagugugggacgugaagaacgccgagcugcugaacaaccaguucggcaccaugcccagccugacccuggccugccugaccaagcagggccagguggaccugaacgacguggugcaggcccugaccgaccugggccugaucuacaccgccaaguaccccaacaccagcgaccuggacagacugacccagagccaccccauccugaacaugaucgacaccaacaagagcagccugaacaucagcggcuacaacuucagccugggcgccgccgugaaggccggcgccugcaugcuggacggcggcaacaugcuggagaccaucaaggugagcccccagaccauggacggcauccugaagagcauccugaaggugaagaagagccugggcauguucaucagcgacacccccggcgagagaaaccccuacgagaacauccuguacaagaucugccugagcggcgacggcuggcccuacaucgccagcagaaccagcaucaccggcagagccugggagaacaccgugguggaccuggagagcggcggcaagccccagaaggccggcagcaacaacagcaacaagagccugcagagcgccggcuucgccgccggccugaccuacagccagcugaugacccugaaggacgccaugcugcagcuggaccccaacgccaagaccuggauggacaucgagggcagacccgaggaccccguggagaucgcccuguaccagcccaucagcggcugcuacauccacuucuucagagagcccaccgaccugaagcaguucaagcaggacgccaaguacagccacggcaucgacgugaccgaccuguucgccgcccagcccggccugaccagcgccgugaucgaggcccugcccagaaacauggugaucaccugccagggcagcgacgacaucagaaagcuguucgagagccagggcagaaaggacaucaagcugaucgacaucgcccugagcaagaccgacagcagaaaguacgagaacgccgugugggaccaguacaaggaccugugccacaugcacaccggcguggugguggagaagaagaagaagggcggcaaggaggagaucaccccccacugcgcccugauggacugcaucauguucgacgccgccgugagcggcggccugaacacccuggugcugagagccgugcugcccagagacaugguguucagaaccagcacccccaagguggugcugugaggacuagucccuguucccagagcccacuuuuuuuucuuuuuuugaaauaaaauagccugucuuucagaucucaaaggcucuuuucagagccaccaaaaaaaaaaaaaaaaaaaaaaaaaaaaaaaaaaaaaaaaaaaaaaaaaaaaaaaaaaaaaaaaaaaaaaaaaaaaaaaaaaaaaaaaaaaaaaaaaaaaa

SEQ ID NO: 19633 - RNA, 2033 nt, Artificial Sequence
  mRNA product Design a-1 (hSL-A100) comprising derived and/or modified sequence from LASV(Z0947-SLE-2011;Clade IV)__AIT17841__SP-HsALB_NP(2-569) (opt4)
aggagagucccgcagucggcguccagcggcucugcuuguucgugugugugucguugcaggccuuauucaagcuuaccaugaagugggugaccuucaucagccugcuguuccuguucagcagcgccuacagcagcgccagcaaggagaucaagagcuuccuguggacccagagccugagaagagagcugagcggcuacugcagcaacaucaagcugcagguggugaaggacgcccaggcccugcugcacggccuggacuucagcgaggugagcaacgugcagagacugaugagaaaggagagaagagacgacaacgaccugaagagacugagagaccugaaccaggccgugaacaaccugguggagcugaagagcacccagcagaagagcauccugagagugggcacccugaccagcgacgaccugcugauccuggccgccgaccuggagaagcugaagagcaaggugaccagaaccgagagaccccugagcgccggcguguacaugggcaaccugagcagccagcagcuggaccagagaagagcccugcugaacaugaucggcaugagcggcagcaaccagggcgccagaaccggcagagacggcguggugagagugugggacgugaagaacgccgagcugcugaacaaccaguucggcaccaugcccagccugacccuggccugccugaccaagcagggccagguggaccugaacgacgccgugcaggcccugaccgaccugggccugaucuacaccgccaaguaccccaacaccagcgaccuggacagacugacccagagccaccccauccugaacaugaucgacaccaagaagagcagccugaacaucagcggcuacaacuucagccugggcgccgccgugaaggccggcgccugcaugcuggacggcggcaacaugcuggagaccaucaaggugagcccccagaccauggacggcauccugaagagcauccugaaggugaagaaggcccugggcauguucaucagcgacgcccccggcgagagaaaccccuacgagaacauccuguacaagaucugccugagcggcgacggcuggcccuacaucgccagcagaaccagcaucaccggcagagccugggagaacaccgugguggaccuggagagcgacggcaagccccagaaggccggcagcaacggcagcaacaagagccugcagagcgccggcuucaccgccggccugaccuacagccagcugaugacccugaaggacgccaugcugcagcuggaccccaacgccaagaccuggauggacaucgagggcagacccgaggaccccguggagaucgcccuguaccagcccagcagcggcugcuacauccacuucuucagagagcccaccgaccugaagcaguucaagcaggacgccaaguacagccacggcaucgacgugaccgaccuguucgccgcccagcccggccugaccagcgccgugaucgacgcccugcccagaaacauggugaucaccugccagggcagcgacgacaucagaaagcuguucgagagccagggcagaaaggacaucaagcugaucgacaucgcccugagcaagaccgacagcagaaaguacgagaacgccgugugggaccaguacaaggaccugugccacaugcacaccggcaucgugguggagaagaagaagagaggcggcaaggaggagaucaccccccacugcgcccugauggacugcaucauguucgacgccgccgugagcggcggccugaacaccagcgugcugagagccgugcugcccagagacaugguguucagaaccagcacccccagaguggugcugugaggacuagucccuguucccagagcccacuuuuuuuucuuuuuuugaaauaaaauagccugucuuucagaucucaaaggcucuuuucagagccaccaaaaaaaaaaaaaaaaaaaaaaaaaaaaaaaaaaaaaaaaaaaaaaaaaaaaaaaaaaaaaaaaaaaaaaaaaaaaaaaaaaaaaaaaaaaaaaaaaaaaa

SEQ ID NO: 19634 - RNA, 2033 nt, Artificial Sequence
  mRNA product Design a-1 (hSL-A100) comprising derived and/or modified sequence from LASV(Josiah;Clade IV)__NP_694869__SP-HsALB_NP(2-569) (opt5)
aggagagucccgcagucggcguccagcggcucugcuuguucgugugugugucguugcaggccuuauucaagcuuaccaugaagugggugaccuucaucagccugcucuuucuguucuccucugccuacagcagcgccuccaaggagaucaaaucuuuccuguggacccagagccucagacgggaacuguccggcuacugcucuaacauuaagcugcaaguggucaaagacgcucaggcccugcuccacgggcuggauuuuagcgagguuuccaaugugcagcgccuuaugagaaaggaacggcgcgacgauaacgaccugaaaagacuccgggaucugaaucaggcggugaacaaucuggucgagcucaagucuacacaacaaaagagcauccugcgcgugggaacgcuuaccuccgacgaucugcucauucuggcugccgaccuugaaaaacuuaagagcaaaguuaucagaacagagcggccccucucugccggcguguauauggggaaccuguccagccagcagcuggaucagcgcagagcucuccugaauaugauuggaaugucuggcgggaaccagggagcccgggcuggccgcgacggcgucgugagaguuugggaugugaagaaugccgagcuucugaacaaucaguucgggaccaugccuucccucacacuggcgugucuuaccaaacagggacaagucgaccugaacgaugccgugcaggcucucacagaccugggccugaucuacaccgccaaguauccgaauacgagcgaccucgaucggcugacccagucucaucccauccuuaacaugauugacacaaagaaauccagccugaauaucuccggguacaacuuuucucucggagcugccgugaaggcgggcgccugcaugcuggaugggggaaacaugcuugaaaccauuaaagucagcccucaaacaauggacggcauccugaaguccauucucaaaguuaagaaagcucugggcauguucaucagcgauacccccggggagcgcaauccuuaugaaaacauucuguacaagaucugucucucuggagacggcuggcccuauaucgccuccagaacgagcauuacagggcgggcuugggagaauaccgugguggaucuggagucugacggaaagccucagaaagccgauagcaacaauuccucuaagagccuucaguccgccggcuuuacagcugggcugaccuacagccagcucaugacccugaaagacgcgaugcugcaacuugauccgaacgccaagacauggauggacaucgaaggaagacccgaggacccugucgaaauugcucucuaccagcccucuuccggcugcuauauccacuucuuucgcgagccuacggaucugaaacaguucaagcaggacgccaaguacagccauggcauugaugugaccgaccuguuugccacacaacccgggcucaccucugcuguuaucgaugcccugccgcggaauauggugaucacaugucagggauccgacgauauuagaaaacuucuggaaagccagggccgcaaggacaucaaacucauugauaucgcgcuguccaagaccgacucucggaaauaugagaacgcugucugggaucaguacaaggaccugugccacaugcauacgggggugguuguggagaagaaaaagagaggaggcaaagaagagauuacaccucacugugcccuuauggauugcaucauguucgacgccgcugucagcgggggccucaauaccuccgugcugcgcgccguccugccccgggacaugguguuuagaaccucuacaccucgcguugugcucugaggacuagucccuguucccagagcccacuuuuuuuucuuuuuuugaaauaaaauagccugucuuucagaucucaaaggcucuuuucagagccaccaaaaaaaaaaaaaaaaaaaaaaaaaaaaaaaaaaaaaaaaaaaaaaaaaaaaaaaaaaaaaaaaaaaaaaaaaaaaaaaaaaaaaaaaaaaaaaaaaaaaa

SEQ ID NO: 19635 - RNA, 2033 nt, Artificial Sequence
  mRNA product Design a-1 (hSL-A100) comprising derived and/or modified sequence from LASV(LP;Clade I)__AAF86702__SP-HsALB_NP(2-569) (opt5)
aggagagucccgcagucggcguccagcggcucugcuuguucgugugugugucguugcaggccuuauucaagcuuaccaugaagugggugaccuucaucagccugcucuuucuguucuccucugccuacagcagcaacuccaaggagaucaaaucuuuccuguggacccagagccucagacgggaacuguccggcuacugcucuaauauuaagcuccaaguggucaaagacgcccaggcucugcuccacgggcuggauuuuagcgagguuuccaacgugcagcgccuuaugagaaagcagaaacgggacgaugccgaccugaagcgccucagagaucugaaucaagcggugaacaaucuggucgaacucaagucuacacagcagaaaaacgugcugcggguuggaacgcuuagcuccgacgaucugaucacccucgcugccgaccuggagaaacuuaaaagcaaggugauucgcacagaaagaccccugucuuccggcgucuauauggggaaucucagcucucagcaacuggaucagcggcgcgcccugcucuccaugaucggaaugagcggcgggccucagggaaacagaaccggcggcgacggggugguucgggugugggaugucaaaaaugcugagcugcuuaacaaucaguucggaacaaugccgucucugacccucgccugucugacaaagcaaggccagguggaccuuaacgaugcugugcaggcccugaccgaccucgggcugauuuacacggcgaaguaucccaauuccagcgaccuggauaugcucacccaaucccauccuauccugggaauggucgacacaaagaagucuagccuuaacaucuccggcuacaauuuuagccugggggccgcuguuaaagccggagcuugcaugcucgauggcggcaacaugcuggagaccauuaaggugucuccccagacaauggacgggauccuuaaauccauucugaaggugaaacgcagccucggaauguucaucucugauaccccuggcgaaagaaaccccuaugagaauauucuguacaagaucugucugagcggggaaggauggccuuauauugccucccggacgucuaucacaggccgcgcgugggagaacacccucgucgaccuggagagcgauaauaagccgcccaaacuuaacuccgccgggagcaauaagucucugcaggcugccggacucaacgcuggccugacauacucccagcugaugacccuuaaagacugcaugcuccaacuggauccuagcucuaagaccuggaucgacauugaaggcagacccgaggauccuguggaaaucgcccuguuucagcccuccagcggguguuacauucacuucuuucgggagccgacagaccucaaacaguucaagcaggacgccaaguauucccauggaaucgauguuacggaccuguuuucuacccaaccuggccuuacaagcgcugugauugaagcgcugcccagaaauaugguccuuaccugccagggguccgaugacaucaaaaagcugcuggagucucagggacgccgggauaucaaacuuauugacaucagccucuccaaggccgauagcagaaaauucgagaacgcugugugggaccaguacaaggaucugugucacaugcauacaggcguuguggucgaaaagaaaaagcgcgggggcaaagaggaaauuaccccucacugcgcccugcucgacuguaucauguuugaugccgcuacgacaggaucucugaauauuaccacccuucgggccgugcugcccagagacauggucuuccgcacauccacccccaaggugguucucugaggacuagucccuguucccagagcccacuuuuuuuucuuuuuuugaaauaaaauagccugucuuucagaucucaaaggcucuuuucagagccaccaaaaaaaaaaaaaaaaaaaaaaaaaaaaaaaaaaaaaaaaaaaaaaaaaaaaaaaaaaaaaaaaaaaaaaaaaaaaaaaaaaaaaaaaaaaaaaaaaaaaa

SEQ ID NO: 19636 - RNA, 2033 nt, Artificial Sequence
  mRNA product Design a-1 (hSL-A100) comprising derived and/or modified sequence from LASV(803213;Clade II)__AAF86704__SP-HsALB_NP(2-569) (opt5)
aggagagucccgcagucggcguccagcggcucugcuuguucgugugugugucguugcaggccuuauucaagcuuaccaugaagugggugaccuucaucagccugcucuuucuguucuccucugccuacagcagcgccuccaaggaggugaaaucuuuccuguggacccagagccucagacgggaacuguccggcuacugcucuaacaucaaacuucaagucguuaaggacgcucaggcccugcuccacgggcuggauuuuagcgaggugaauaacgugcagcgccuuaugagaaagcagaaacgggacgauggagaccugaagcgccucagagaucugaaucaagcggucaacaaucugguggaacucaaguccacacagcagaaaucuauucugcggguuggcacgcuuaccagcgacgaucugcucacacuggcugccgaccuugagaagcugaaauccaaggugauccgcaccgaaagaccccucagcucuggggucuauaugggaaaccuguccacacagcaacuggagcagcggcgcgcccuccugaauaugauuggcauggugggaggagcucagggcacccagccuggcagagaugggguugugcgggucugggacgugaaaaacccggaucuucugaauaaccaauucggaacaaugcccagccucacccuggccugucuuacgaagcagggccagguggaccugaaugaugcuguccucgcccugaccgaccuggggcucaucuacacagcgaaguauccuaacucuuccgaccuggaucgccuuagccaaucucaucccauucugaauaugguugacaccaaaaaguccagccucaacaucuccggauacaauuuuucucugggcgccgcugugaaagccggggcuugcaugcuugauggaggcaacaugcuggagacaaucaaggugaccccucagacgauggacggcauucucaaaagcauccugaaggucaaaagaucccuggggauguucgugagcgauacacccggagaacggaacccuuaugagaauauucucuacaagaucugucugucuggcgacggguggccguauauugccucccgcaccagcaucguugggagagcgugggaaaacacaaccguggaucuugagucugacggcaagccccagaaagucgggaccgccggaagcaauaagucccugcagucugcuggcuuuccuacaggccucacguacagccaacugaugacccugaaagauuccaugaugcagcuugaccccagcgccaagacauggauugauaucgaggggcggccugaagaccccguggagaucgcucucuaccagccgaugucuggaugcuauauucacuucuuuagagaaccuaccgaccugaaacaguucaagcaagaugccaaguacucccauggcaucgacguugccgaucuguuucccgcucagccugggcucacaagcgcggugauugaggcccugccccgcaacaugguccuuaccugucagggaucugacgauaucaaaaagcugcucgacucccagggccggagagauauuaaacugaucgacaucagccuguccaagguggauucucgcaaauucgaaaaugcugucugggaccaaugcaaggaucuuugucacaugcauacgggggugguuguggagaagaaaaagcggggcggaaaagaggaaauuacaccccacugcgcccucauggacuguaucauguuugaugccgcugucagcggcgggcugaacauuccugugcugagagccguucucccgcgcgacaugguguuccggaccuccucucccaaggucgugcugugaggacuagucccuguucccagagcccacuuuuuuuucuuuuuuugaaauaaaauagccugucuuucagaucucaaaggcucuuuucagagccaccaaaaaaaaaaaaaaaaaaaaaaaaaaaaaaaaaaaaaaaaaaaaaaaaaaaaaaaaaaaaaaaaaaaaaaaaaaaaaaaaaaaaaaaaaaaaaaaaaaaaa

SEQ ID NO: 19637 - RNA, 2036 nt, Artificial Sequence
  mRNA product Design a-1 (hSL-A100) comprising derived and/or modified sequence from LASV(GA391;Clade III)__CAA36646__SP-HsALB_NP(2-570) (opt5)
aggagagucccgcagucggcguccagcggcucugcuuguucgugugugugucguugcaggccuuauucaagcuuaccaugaagugggugaccuucaucagccugcucuuucuguucuccucugccuacagcagcgccuccaaggaggugagaucuuuccuguggacccagagccuccggcgcgaacuguccggcuacugcucuaacaucaaacuucaagucguuaaggacgcucaggcccugcuccacgggcuggauuuuagcgagguguccaaugugcagagacuuaugcggaaacagaagcgcgacgauggagaccugaaaagacuccgggaucugaaccaagcggucaauaaccugguggaacucaagucuacacagcagaaaagcguucugcgcgugggcacgcuuuccagcgacgaucugcucauucuggcugccgaccuugagaaacugaagucuaaagucaccagaacagaacggccccucuccagcgggguguauaugggaaaucugucuucccagcaacuggaucagcgcagagcccuccugaacaugaucggcaugaccgggguuagcggaggcggcaagggggcuucugacggaauugugcgggucugggaugugaaaaaugccgagcuucugaacaaucaguucggcacaaugccuucccucacccuggcuugucuuacaaagcaggggcaaguggaccugaacgaugccguccaggcgcucaccgaccugggacugaucuacacggccaaguauccgaauagcuccgaccucgaucgccugucucagagccaucccauucuuaacaugaucgacaccaaaaaguccagccugaauaucucuggcuacaacuuuucccucggggcugccguuaaagcuggagccugcaugcuggauggcggcaauaugcuugagacaauuaaggugagcccucaaaccauggacgggauccugaaaucuauucucaaggugaaaaagagccugggaauguucgucuccgauacacccggcgaaagaaacccuuaugagaacauccuguacaagauuugucucucuggggacggauggcccuauaucgcgagccggaccuccauugugggccgcgccugggaaaauacgguuguggaucuggagcaggacaacaaaccucagaagaucgggaauggaggcagcaacaaaucucuucaguccgcuggcuuugccgcugggcugacauacagccaacucaugacccugaaggauuucaaaugcuuuaaucugaucccgaacgccaagacauggauggacauugagggaagacccgaagauccugucgagaucgcccuuuaccagcccucuuccggcuguuaugugcacuucuuucgggaaccuaccgaccucaagcaguucaaacaggacgcuaaguacagccaugggauugauguuaccgaccuguuugcggcccaacccggacugacauccgcugugaucgaggcccucccgagaaauauggucauuacgugccagggcucugaagauauccgcaaacugcuugagagccaggggcggagagacaucaagcugauugauaucacccucuccaaagccgacucucgcaaguucgagaacgcugugugggaucaguuuaaggaccugugucacaugcauacaggcgucgugguugaaaagaagaaacggggaggcaaggaggaaauuaccccucacugcgcccugauggauuguaucauguucgacgcggcugugagcgggggacuugaugccaaaguccucagagugguucugccccgcgacaugguguuccggacauccaccccuaaggucgugcugugaggacuagucccuguucccagagcccacuuuuuuuucuuuuuuugaaauaaaauagccugucuuucagaucucaaaggcucuuuucagagccaccaaaaaaaaaaaaaaaaaaaaaaaaaaaaaaaaaaaaaaaaaaaaaaaaaaaaaaaaaaaaaaaaaaaaaaaaaaaaaaaaaaaaaaaaaaaaaaaaaaaaa

SEQ ID NO: 19638 - RNA, 2033 nt, Artificial Sequence
  mRNA product Design a-1 (hSL-A100) comprising derived and/or modified sequence from LASV(AV;Clade V)__CCA30315__SP-HsALB_NP(2-569) (opt5)
aggagagucccgcagucggcguccagcggcucugcuuguucgugugugugucguugcaggccuuauucaagcuuaccaugaagugggugaccuucaucagccugcucuuucuguucuccucugccuacagcagcgccuccaaggaggugaaaucuuuccuguggacccagagccucagacgggaacuguccggcuacugcucuaacaucaaacuucaagucguuaaggacgcucaggcccugcuccacgggcuggauuuuagcgagguguccaaugugcagcgccuuaugagaaagcagcggcgcgacgauucugaccugaaaagacuccgggaucugaaccaagcggucaauaaccugguggaacucaagagcacacagcagaaguccguucugcgcgugggaacgcuuagcucugacgaucugcucacccuggcugccgaccuugagaaacugaaguccaaagucacaagaaccgaacggccccucagcucuggcguguauauggggaaucuguccagccagcaacuggaucagcgcagagcccuccugaaccuuauuggaaugacaaauggcucucaggggucccaggcuggacgggacggcguugugcgcgucugggaugugaagaacgccgagcugcucaauaaccaauucggcaccaugccuagccugacacuugcuugucugaccaaacagggacagguggaccucaaugaugucguucaagcccugacggaccuggggcucaucuacaccgcgaaguauccgaacacauccgaccuggauagacuuacccagucucaucccauucugaauaugaucgacacaaagaaaagcucccucaacauuagcggcuacaauuuuucucugggggccgcugugaaggccggagcuugcaugcuugauggcgggaacaugcuggagaccaucaaaguguccccucagagcauggacggaauccucaagucuauucugaaagucaagcgggcccugggcauguucgugagcgauacgcccggcgaacgcaacccuuaugagaauauccucuacaaaauuugucuguccggggacggauggcccuauaucgcgucuagaacaagcauuguuggccgggccugggaaaacaccguggucgaucuugagacagacgggaagccucagaagaucggauccggcaauagcaacaaaucucugcaauccgcuggguuuagcgccggacucaccuacucucagcugaugacccugaaggaugcuaugcuucagcucgacccgaaugccaaaacauggauggauauugagggcagacccgaagacccuguggagguugcccuguaccagcccaucuccggcugcuauauccacuucuuucgcgaaccuacggaccugaagcaauucaaacaggaugcuaaguacagccaugggauugacaucgcggaucucuuugccgcucagcccggacugaccuccgccgugauugaggcccuuccgcggaacauggucaucacaugucagggcucugaagacauuaagaaacugcucgagagccaagggagaaaggauaucaaacugaucgacauugcucuguccaagaucgauucucgcaaauucgagaaugccgugugggaccaguauaaggaucuuugccacaugcauaccggagucgugguugaaaagaaaaagcggggcgggaaagaggaaauuacaccucacugugcgcucauggacugcaucauguuugaugcugccgugagcggcggacugaacacccugguccucagagccgugcugccccgcgacaugguuuuccggacguccacaccuagagugguccuuugaggacuagucccuguucccagagcccacuuuuuuuucuuuuuuugaaauaaaauagccugucuuucagaucucaaaggcucuuuucagagccaccaaaaaaaaaaaaaaaaaaaaaaaaaaaaaaaaaaaaaaaaaaaaaaaaaaaaaaaaaaaaaaaaaaaaaaaaaaaaaaaaaaaaaaaaaaaaaaaaaaaaa

SEQ ID NO: 19639 - RNA, 2033 nt, Artificial Sequence
  mRNA product Design a-1 (hSL-A100) comprising derived and/or modified sequence from LASV(Togo/2016/7082;Clade VI)__AMR44578__SP-HsALB_NP(2-569) (opt5)
aggagagucccgcagucggcguccagcggcucugcuuguucgugugugugucguugcaggccuuauucaagcuuaccaugaagugggugaccuucaucagccugcucuuucuguucuccucugccuacagcagcaacuccaaggaggugaaaucuuuccuguggacccagagccucagacgggaacuguccggcuacugcucuaauaucaaacuucaagucguuaaagacgcccaggcucugcuccacgggcuggauuuuagcgagguguccaacgugcagcgccuuaugagaaagcagaaacgggacgauggagaccugaagcgccucagagaucugaaucaagccgucaacaaucugguggaacucaagucuguucagcagaaaagcauucugcgggugggcacacuuacguccgacgaucugcucacccuggcggcugaccuugagaagcugaaaagcaaggucacacgcaccgaaagaccccucucuuccgggguguauaugggaaaccugagcucucagcaacuggaucagcggcgcgcccuccuguccaugaucggcaugagcgggggaaaucagaacucucagccuaaaggcgacggcguugugagagucugggaugugaagaaugccgaccuucugaacaaucaauucgggacaaugccgucccucacccuggcuugucuuacaaagcagggacagguggaucugaacgacgccguccaagcucucaccgaccugggccugauuuacacggccaaauaucccaauagcuccgaucucgaccggcugucucagagccauccuauccuuaacaugauugauaccaagaaauccagccugaauaucucuggguacaacuuuucccucggagcggccaucaagacaggcgcuugcaugcuggacgggggaaacaugcuugagaccauuaaaguuacaccccagaccauggauggcauccucaagagcauucugaaagugaagcgcucucugggcauguucaucagcgacacgccuggggagagaaaucccuaugaaaacauucuguacaagaucugucucuccggagauggcuggccuuauauugccucucggacagcuaucaucgggcgcgccugggagaauaccguggucgaccuggaaagcgauuccaaaccgcagaagauuggaagcaacggcucuaauaaaucccuucaaagcgcgggguuugcccccggacugacauacucucagcucaugacccugaaggacuccaugcugcagcuugauccuaacgcuaaaaccuggaucgacauugagggcagacccgaggacccuguggaaguugcccucuuccagcccaucagcggcugcuacauucacuuuuuccgggagccgacagaucugaagcaauuuaagcaggacgcuaaauauucccaugggaucgaugugacggaccuguucgccgcccagccuggacucaccucugcugucaucgaagcgcugcccagaaauauggugcuuacaugucagggcagcgaugacauuaagaaacugcucgauucccaagggcgccgggacaucaagcugauugauguuucucugaacaaaaucgacagcagaaaguuugagaaugccgugugggaucaguacaaggaccuuugccacaugcauaccggagucguggucgaaaagaagaaaaagggcgggaaagaggagauuacaccucacugugcucuccuggauugcaucauguucgacgccgccguguccggcggacugaacgcuaccguucuccgcgccgugcugccccgggacauggucuuuagaacgagcucucccaaggugguucuuugaggacuagucccuguucccagagcccacuuuuuuuucuuuuuuugaaauaaaauagccugucuuucagaucucaaaggcucuuuucagagccaccaaaaaaaaaaaaaaaaaaaaaaaaaaaaaaaaaaaaaaaaaaaaaaaaaaaaaaaaaaaaaaaaaaaaaaaaaaaaaaaaaaaaaaaaaaaaaaaaaaaaa

SEQ ID NO: 19640 - RNA, 2033 nt, Artificial Sequence
  mRNA product Design a-1 (hSL-A100) comprising derived and/or modified sequence from LASV(KAK-428;Clade n.d. (VII))__ANH09741__SP-HsALB_NP(2-569) (opt5)
aggagagucccgcagucggcguccagcggcucugcuuguucgugugugugucguugcaggccuuauucaagcuuaccaugaagugggugaccuucaucagccugcucuuucuguucuccucugccuacagcagcaacuccaaggaggugaaaucuuuccuguggacccagagccucagacgggaacuguccggcuacugcacaaauaucaaacuucaagucguuaaggacgcccaggcucugcuccacgggcuggauuuuucugaggugagcaacgugcagcgccuuaugagaaagcagaaacgggacgauaaugaccugaagcgccucagagaucugaaccaagccgucaauaaccugguggaacucaaguccguucagcagaaaucugugcugaaggucggaacgcuuaauagcgacgaucugcucacccuggcggcugaccuugagaaacugaaguccaaagugguucggacagaacgcccccucagcucuggcguguauauggggaaccuguccagccagcaacuggaucagagacgggcccuccugaauaugauuggaauggccggcgggucucagggaaaccagccuucccgcgacggcgucgugagagugugggaugucaagaaugcugaccuucugaacaaucaauucggcaccaugccgagccucacacuggccugucuuaccaagcaggggcagguugaucugaacgacguggugcucgcucugacagaccugggacucaucuacaccgccaaauaucccaauucuuccgaucuggaccggcuuagccaaaaccauccuguccugaacaugauugaugugaauaaguccucucucaacaucagcggcuacaauuuuucccugggggcggccguuaaagcuggagccugcaugcuugacggcgggaacaugcuggagacgauuaagaucagcccccagaccguggauggaauccucaaaucuauucugaaggucaaacgcgcucugggcauguucguguccgacacaccuggcgagagaaaucccuaugaaaacauccucuacaagguuugucugagcgggaauggauggccuuauauugccucucggaccagcaucgugggccgcgcgugggagaacacagucguggaucuugaauccaauaagaaccagccgaaagucgggaauaacggaucuaauaagaugcugcagagcuccggcuuugccaccgggcucacguacagccaacugaugacacugagagacucuaugcuucagcucgaucccaccgcuaaaacauggauugacaucgagggacggccugaggaucccguggaacuggcccuguuccagccuuccagcggcugcuacauucacuuuuucagagagcccaccgaccucaagcaguuuaaacaagacgcuaaguauucucauggcaucgauguuaacgaccuguucuccgcccagccggggcuuaccagcgccgugcuggaagcucucccucgcaauaugguccugacaugucagggauccgaugacauccggaagcugcuugauucucaggacagaaaagauauuaagcucaucgacauuagccuguccaaagcggaugcccgcaaguuugagaacgacgugugggaucaauucaaagaccugugccacaugcauacgggcaucguuguggaaaagaagaaaaagggagggaaacaggagaugacaccccacugugcucuccuggauugcauuauguuugacgccgccgucucuggcgggcuuaacgugccuacccugcgggcugugcuccccaccgacaugguuuucagaacaaucaccacgaaggucgugcugugaggacuagucccuguucccagagcccacuuuuuuuucuuuuuuugaaauaaaauagccugucuuucagaucucaaaggcucuuuucagagccaccaaaaaaaaaaaaaaaaaaaaaaaaaaaaaaaaaaaaaaaaaaaaaaaaaaaaaaaaaaaaaaaaaaaaaaaaaaaaaaaaaaaaaaaaaaaaaaaaaaaaa

SEQ ID NO: 19641 - RNA, 2033 nt, Artificial Sequence; identical to SEQ ID NO: 19635
  mRNA product Design a-1 (hSL-A100) comprising derived and/or modified sequence from LASV(Pinneo-NIG-1969;Clade I)__AIT17837__SP-HsALB_NP(2-569) (opt5)

SEQ ID NO: 19642 - RNA, 2033 nt, Artificial Sequence
  mRNA product Design a-1 (hSL-A100) comprising derived and/or modified sequence from LASV(ISTH0009-NIG-2011;Clade II)__AIT17405__SP-HsALB_NP(2-569) (opt5)
aggagagucccgcagucggcguccagcggcucugcuuguucgugugugugucguugcaggccuuauucaagcuuaccaugaagugggugaccuucaucagccugcucuuucuguucuccucugccuacagcagcguguccaaggaggucaaaucuuuccuguggacccagagccucagacgggaacuguccggcuacugcucuaacaucaaacuucaaguugugaaggacgcccaggcucugcuccacgggcuggauuuuagcgagguguccaauguccagcgccuuaugagaaagcagaaacgggacgauucugaccugaagcgccucagagaucugaaccaagccgugaauaaccugguugaacucaagagcacacagcagaaauccauucugcgggugggaacgcuuaccagcgacgaucugcucacacuggcggcugaccuugagaagcugaaaucuaaggucauccgcaccgaaagaccccucuccagcggcguguauauggggaaucugucuacacagcaacuggagcagcggcgcgcccuccugaacaugauuggaaugguuggcggggcccagggaacccagccuggcagagauggcgugguccgggugugggacgugaaaaauccggaucuucugaacaaucaauucgggacaaugcccucccucacccuggcuugucuuacgaagcagggacaggucgaccugaacgaugccguucucgcucugaccgaccugggccucaucuacacagccaaguauccuaauagcucugaccuggaucgccuuucccaaagccaucccauucugaacaugguggacaucaaaaaguccucucucaauaucagcggguacaacuuuucccugggagcggccgugaaagcuggcgccugcaugcuugaugggggaaauaugcuggagaccauuaaggucacaccucagaccauggacggcauccucaaaagcauucugaaggugaaaagaucucugggcauguucguuuccgauacgcccggggaacggaacccuuaugagaacauccucuacaagauuugucugagcggagacggcuggccguauaucgcuucucgcacaagcauuguggggagagccugggaaaauaccacagucgaucuugaguccgacggaaagccccagaaagugggcucugcggggagcaacaagucccugcagagcgccggauuuccuaccggccucaccuacucucaacugaugacacugaaagauuccaugaugcagcuugaccccagcgcuaagacguggaucgauaucgagggccggccugaagaccccguugagauugcccucuaccagccgaugucugggugcuauauccacuucuuuagagaaccuaccgaccugaaacaguucaagcaagaugcuaaguacucccauggaauugacguggccgaucuguuucccgcccagccuggccucacaagcgcugucaucgaggcgcugccccgcaauauggugcuuaccugucagggguccgacgauauuaaacggcugcucgacucucagggaagacgcgauaucaagcugaucgacauugcccugagcaaagcugauucccggagauucgaaaacgccgucugggaccaaugcaaggaucuuugucacaugcauacaggcgugguuguggagaaaaagaagcgcgggggcaaagaggaaaucacgccccacugcgcccucauggacuguauuauguaugaugcugccgucucuggaggccugaauaucccugugcugcgggcgguucucccgagagacaugguguuucgcaccagcucccccaaggucgugcugugaggacuagucccuguucccagagcccacuuuuuuuucuuuuuuugaaauaaaauagccugucuuucagaucucaaaggcucuuuucagagccaccaaaaaaaaaaaaaaaaaaaaaaaaaaaaaaaaaaaaaaaaaaaaaaaaaaaaaaaaaaaaaaaaaaaaaaaaaaaaaaaaaaaaaaaaaaaaaaaaaaaaa

SEQ ID NO: 19643 - RNA, 2033 nt, Artificial Sequence
  mRNA product Design a-1 (hSL-A100) comprising derived and/or modified sequence from LASV(ISTH2010-NIG-2012;Clade II)__AIT17483__SP-HsALB_NP(2-569) (opt5)
aggagagucccgcagucggcguccagcggcucugcuuguucgugugugugucguugcaggccuuauucaagcuuaccaugaagugggugaccuucaucagccugcucuuucuguucuccucugccuacagcagcgccuccaaggaggugaaaucuuuccuguggacccagagccucagacgggaacuguccggcuacugcucuaacaucaaacuucaagucguuaaggacgcucaggcccugcuccacgggcuggauuuuagcgagguguccaaugugcagcgccuuaugagaaagcagaaacgggacgauucugaccugaagcgccucagagaucugaaccaagcggucaauaaccugguggaacucaagagcacacagcagaaauccauucugcggguuggaacgcuuaccagcgacgaucugcucacacuggcugccgaccuugagaagcugaaaucuaaggugauccgcaccgaaagaccccucuccagcggcgucuauauggggaaucugucuacacagcaacuggagcagcggcgcgcccuccugaaccuuauuggaauggugggcggggcucagggaacccagccuggcagagauggcguugugcgggucugggacgugaaaaauccggaucugcucaacaaucaauucgggacaaugcccucccugacccuugccugucugacgaagcagggacagguggaccucaacgaugcuguccuggcccugaccgaccucggccugaucuacacagcgaaguauccuaauagcucugaccuugaucgccugucccaaagccaucccauucucaacaugguugacaccaaaaaguccucucugaauaucagcggguuuaacuucucccuuggagccgcugugaaagccggcgcuugcaugcuggaugggggaaauaugcucgagacaaucaaggugaccccucagacgauggacggcauucugaaaagcauccugaaggucaaaaagucucucggcauguuuguguccgauacacccggggaaagaaacccuuacgagaacauucuguauaagaucugucuuagcggagacggcuggccguacauugccucucggaccagcaucguugggcgcgcgugggaaaauacaaccguggaucuggaguccgacggaaaaccccacaaggucggcaccgccgggucuaacaaaagccuccaguccgcuggauucccuacaggccugacguauagccagcugaugacccuuaaggauucuaugaugcaacucgaccccuccgccaaaacauggauugauaucgagggcagaccugaagaccccguggagaucgcucuguaccagccgaugagcgggugcuacauucacuuuuuccgggaaccuaccgaccugaagcaguuuaagcaggaugccaaauauucucauggaaucgacguugccgaucucuuccccgcucaaccuggccugacauccgcggugauugaggcccuucccagaaauaugguccugaccugucaggggagcgacgauaucaagcgccuccuggacucccagggacggagagauauuaaacugaucgacaucgcucuuucuaaggccgauagccgccgguuugaaaacgccgugugggaccagugcaaagaucucugucauaugcacacgggcgucgugguugagaagaagaaaagagggggcaaggaggaaauuacaccccacugcgcucugauggacuguaucauguacgaugccgcgguguccggaggccugaauauuccuguccuccgcgcugugcugccgcgggacaugguuuucagaaccucuagccccaaagugguccuuugaggacuagucccuguucccagagcccacuuuuuuuucuuuuuuugaaauaaaauagccugucuuucagaucucaaaggcucuuuucagagccaccaaaaaaaaaaaaaaaaaaaaaaaaaaaaaaaaaaaaaaaaaaaaaaaaaaaaaaaaaaaaaaaaaaaaaaaaaaaaaaaaaaaaaaaaaaaaaaaaaaaaa

SEQ ID NO: 19644 - RNA, 2033 nt, Artificial Sequence
  mRNA product Design a-1 (hSL-A100) comprising derived and/or modified sequence from LASV(Lassa virus/H.sapiens-wt/NGA/2015/ISTH_0543;Clade II)__AVO03640__SP-HsALB_NP(2-569) (opt5)
aggagagucccgcagucggcguccagcggcucugcuuguucgugugugugucguugcaggccuuauucaagcuuaccaugaagugggugaccuucaucagccugcucuuucuguucuccucugccuacagcagcgccuccaaggaggugaaaucuuuccuguggacccagagccucagacgggaacuguccggcuacugcucuaacaucaaacuucaagucguuaaggacgcucaggcccugcuccacgggcuggauuuuagcgagguguccaaugugcagcgccuuaugagaaagcagaaacgggacgauucugaccugaagcgccucagagaucugaaccaagcggucaauaaccugguggaacucaagagcacacagcagaaauccauucugcggguuggaacgcuuaccagcgacgaucugcucacacuggcugccgaccuugagaagcugaaaucuaaggugauccgcaccgaaagaccccucuccagcggcgucuauauggggaaucugucuacacagcaacuggagcagcggcgcgcccuccugaacaugauuggaauggugggcggggcucagggaacccagccuggcagagauggcguugugcgggucugggacgugaaaaauccggaucuucugaacaaucaauucgggacaaugcccucccucacccuggccugucuuacgaagcagggacagguggaccugaacgaugcuguccucgcccugaccgaccugggccucaucuacacagcgaaguauccuaauagcucugaccuggaucgccuuucccaaagccaucccauucugaacaugguugacaccaaaaaguccucucucaauaucagcggguacaacuuuucccugggagccgcugugaaagccggcgcuugcaugcuugaugggggaaauaugcuggagacaaucaaggugaccccucagacgauggacggcauucucaaaagcauccugaaggucaaaaagucucugggcauguucguguccgauacacccggggaaagaaacccuuaugagaacauucucuacaagaucugucugagcggagacggcuggccguauauugccucucggaccagcaucguugggcgcgcgugggaaaauacaaccguggaucuugaguccgacggaaaaccccagaaggucggcucugccgggagcaacaaaucccugcagagcgcuggauuuccuaccggccucacauacucucaacugaugacgcugaaggauuccaugaugcagcuugaccccagcgccaaaaccuggauugauaucgagggcagaccugaagaccccguggagaucgcucucuaccagccgaugucugggugcuauauucacuucuuucgggaaccuacagaccugaagcaguucaagcaagaugccaaauacucccauggaaucgacguugccgaucuguuucccgcucagccuggccucaccagcgcggugauugaggcccugcccagaaauaugguccuuacaugucagggguccgacgauaucaagcgccugcucgacucucagggacggaaagauauuaagcugaucgacaucgcucugagcaaagccgauuccagacgcuucgaaaacgccgugugggaccaaugcaaggaucuuugucacaugcauaccggcgucgugguugagaagaaaaagagagggggcaaagaggaaauuacgccccacugcgcucucauggacuguaucauguaugaugccgcggugucuggaggccugaauauuccuguccugcgggcugugcucccgcgcgacaugguuuuucggacaagcucccccaaggugguccugugaggacuagucccuguucccagagcccacuuuuuuuucuuuuuuugaaauaaaauagccugucuuucagaucucaaaggcucuuuucagagccaccaaaaaaaaaaaaaaaaaaaaaaaaaaaaaaaaaaaaaaaaaaaaaaaaaaaaaaaaaaaaaaaaaaaaaaaaaaaaaaaaaaaaaaaaaaaaaaaaaaaaa

SEQ ID NO: 19645 - RNA, 2033 nt, Artificial Sequence
  mRNA product Design a-1 (hSL-A100) comprising derived and/or modified sequence from LASV(Lassa virus/H.sapiens-wt/NGA/2016/ISTH_0009;Clade II)__AVO03572__SP-HsALB_NP(2-569) (opt5)
aggagagucccgcagucggcguccagcggcucugcuuguucgugugugugucguugcaggccuuauucaagcuuaccaugaagugggugaccuucaucagccugcucuuucuguucuccucugccuacagcagcgccuccaaggaggugaaaucuuuccuguggacccagagccucagacgggaacuguccggcuacugcucuaacaucaaacuucaagucguuaaggacgcucaggcccugcuccacgggcuggauuuuagcgagguguccaaugugcagcgccuuaugagaaagcagaaacgggacgauucugaccugaagcgccucagagaucugaaccaagcggucaauaaccugguggaacucaagagcacacagcagaaauccauucugcggguuggaacgcuuaccagcgacgaucugcucacacuggcugccgaccuugagaagcugaaaucuaaggugauccgcaccgaaagaccccucuccagcggcgucuauauggggaaucugucuacacagcaacuggagcagcggcgcgcccuccugaacaugauuggaauggugggcggggcucagggaacccagccuggcagagauggcguugugcgggucugggacgugaaaaauccggaucuucugaacaaucaauucgggacaaugcccucccucacccuggccugucuuacgaagcagggacagguggaccugaacgaugcuguccucgcccugaccgaccugggccucaucuacacagcgaaguauccuaauagcucugaccuggaucgccuuucccaaagccaucccauucugaacaugguugacaccaaaaaguccucucucaauaucagcggguacaacuuuucccugggagccgcugugaaagccggcgcuugcaugcuugaugggggaaauaugcuggagacaaucaaggugaccccucagacgauggacggcauucucaaaagcauccugaaggucaaaaagucucugggcauguucguguccgauacacccggggaaagaaacccuuaugagaacauucucuacaagaucugucugagcggagacggcuggccguauauugccucucggaccagcaucguugggcgcgcgugggaaaauacaaccguggaucuugaguccgacggaaaaccccagaaggucggcucugccgggagcaacaaaucccugcagagcgcuggauuuccuaccggccucacauacucucaacugaugacgcugaaggauuccaugaugcagcuugaccccagcgccaaaaccuggauugauaucgagggcagaccugaagaccccguggagaucgcucucuaccagccgaugucugggugcuauauucacuucuuucgggaaccuacagaccugaagcaguucaagcaagaugccaaauacucccauggaaucgacguugccgaucuguuucccgcucagccuggccucaccagcgcggugauugaggcccugcccagaaauaugguccuuacaugucagggguccgacgauaucaagcgccugcucgacucucagggacggagagauauuaaacugaucgacaucgcucugagcaaggccgauucccgccgguucgaaaacgccgugugggaccaaugcaaagaucuuugucacaugcauaccggcgucgugguugagaagaagaaaagagggggcaaggaggaaauuacgccccacugcgcucucauggacuguaucauguaugaugccgcggugucuggaggccugaauauuccuguccugcgcgcugugcucccgcgggacaugguuuuuagaacaagcucccccaaagugguccugugaggacuagucccuguucccagagcccacuuuuuuuucuuuuuuugaaauaaaauagccugucuuucagaucucaaaggcucuuuucagagccaccaaaaaaaaaaaaaaaaaaaaaaaaaaaaaaaaaaaaaaaaaaaaaaaaaaaaaaaaaaaaaaaaaaaaaaaaaaaaaaaaaaaaaaaaaaaaaaaaaaaaa

SEQ ID NO: 19646 - RNA, 2033 nt, Artificial Sequence
  mRNA product Design a-1 (hSL-A100) comprising derived and/or modified sequence from LASV(Lassa virus/H.sapiens-wt/NGA/2016/ISTH_0017;Clade II)__AVO03568__SP-HsALB_NP(2-569) (opt5)
aggagagucccgcagucggcguccagcggcucugcuuguucgugugugugucguugcaggccuuauucaagcuuaccaugaagugggugaccuucaucagccugcucuuucuguucuccucugccuacagcagcgccuccaaggaggugaaaucuuuccuguggacccagagccucagacgggaacuguccggcuacugcucuagcaucaaacuucaagucguuaaggacgcucaggcccugcuccacgggcuggauuuuuccgaggugucuaacgugcagcgccuuaugagaaagcagaaacgggacgauagcgaccugaagcgccucagagaucugaaucaagcggucaacaaucugguggaacucaaguccacacagcagaaaagcauucugcggguuggaacgcuuaccucugacgaucugcucacacuggcugccgaccuugagaagcugaaauccaaggugauccgcaccgaaagaccccucagcucuggcgucuauauggggaaccuguccacacagcaacuggagcagcggcgcgcccuccugaauaugauuggaauggcuggcggggcccagggaacccagccuggcagagauggcgugguucgggugugggacgucaaaaacccggaucuucugaauaaccaauucgggacaaugcccagccucacccuggcuugucuuacgaagcagggacagguggaccugaaugaugccgugcucgcgcugaccgaccugggccucaucuacacagccaaguauccuaacucuuccgaccuggaucgccuuagccaaucccaucccauucugaauauggucgacaccaaaaagucuagccucaacaucuccggguacaauuuuagccugggagcugccguuaaagcuggcgccugcaugcuugaugggggaaacaugcuggagacaaucaaggugaccccucagacgauggacggcauucucaaaucuauccugaaggugaaaagaucccugggcauguucgucagcgaugcgcccggggaacggaauccuuaugagaacauucucuacaagaucugucugucuggagacggcuggccguauauugccagccgcacauccaucguggggagagcuugggaaaacaccacaguugaucuugagucugacggaaagccccagaaagugggcgccaccgggagcaauaagucccugcagagcgcuggauuuccuaccggccucacauacucucaacugaugacgcugaaagauuccaugaugcagcuugaccccagcgccaagaccuggauugauaucgagggccggccugaagaccccgucgagguggcccucuaccagccgguuucugggugcuauauccacuucuuuagagaaccuacagaccugaaacaguucaagcaagaugcuaaguacucccauggaauugacguggcggaucuguuucccgcccagccuggccucaccagcgcugucaucgaggcccugccccgcaacauggugcuuacaugucagggguccgacgauauuaaaaagcugcucgacucucagggacggaaagauaucaagcugauugacaucgcccugagcaaagcugauuccagacgcuucgaaaaugccgucugggaccaaugcaaggaucuuugucacaugcauaccggcgugguuguggagaagaaaaagagagggggcaaagaggaaaucacgccccacugcgcgcucauggacuguauuauguaugaugcugccgucucuggaggccugaacaucccugugcugcgggccguucucccgcgcgacaugguguuucggacaagcucccccaaggucgugcugugaggacuagucccuguucccagagcccacuuuuuuuucuuuuuuugaaauaaaauagccugucuuucagaucucaaaggcucuuuucagagccaccaaaaaaaaaaaaaaaaaaaaaaaaaaaaaaaaaaaaaaaaaaaaaaaaaaaaaaaaaaaaaaaaaaaaaaaaaaaaaaaaaaaaaaaaaaaaaaaaaaaaa

SEQ ID NO: 19647 - RNA, 2033 nt, Artificial Sequence
  mRNA product Design a-1 (hSL-A100) comprising derived and/or modified sequence from LASV(Lassa virus/H.sapiens-wt/NGA/2018/ISTH_0959;Clade II)__AVV65100__SP-HsALB_NP(2-569) (opt5)
aggagagucccgcagucggcguccagcggcucugcuuguucgugugugugucguugcaggccuuauucaagcuuaccaugaagugggugaccuucaucagccugcucuuucuguucuccucugccuacagcagcgccuccaaggaggugaaaucuuuccuguggacccagagccucagacgggaacuguccggcuacugcucuaacaucaaacuucaagucguuaaggacgcucaggcccugcuccacgggcuggauuuuagcgagguguccaaugugcagcgccuuaugagaaagcagaaacgggacgauucugaccugaagcgccucagagaucugaaccaagcggucaauaaccugguggaacucaagagcacccagcagaaauccauucugcggguuggaacgcuuaccagcgacgaucugcucacacuggcugccgaccuugagaagcugaaaucuaaggugauccgcaccgaaagaccccucuccagcggcgucuauauggggaaucugucuacacagcaacuggagcagcggcgcgcccuccugaaccuuauuggaauggugggcggggcucagggaacccagccuggcagagauggcguugugcgggucugggacgugaaaaauccggaucugcucaacaaucaauucgggacaaugcccucccugacccuugccugucugacgaagcagggacagguggaccucaacgaugucguucuggcucugaccgaccucggccugaucuacacagccaaguauccuaauagcucugaccuugaucgccugucccaaagccaucccauucucaacaugguggacaccaaaaaguccucucugaauaucagcggguuuaacuucucccuuggagcggccgugaaagcuggcgccugcaugcuggaugggggaaauaugcucgagacaaucaaggucaccccucagacgauggacggcauucugaaaagcauccugaaggugaaaaagucucucggcauguuuguuuccgauacacccggggaaagaaacccuuacgagaacauucuguauaagaucugucuuagcggagacggcuggccguacauugcuucucggaccagcaucguggggcgcgccugggaaaauacaaccgucgaucuggaguccgacggaaaaccccacaaggugggcaccgcggggucuaacaaaagccuccaguccgccggauucccuacaggccugacguauagccagcugaugacccuuaaggauucuaugaugcaacucgaccccuccgcuaaaacauggauugauaucgagggcagaccugaagaccccguugagaucgcccuguaccagccgaugagcgggugcuacauucacuuuuuccgggaaccuaccgaccugaagcaguuuaagcaggaugcuaaauauucucauggaaucgacguggccgaucucuuccccgcccaaccuggccugacauccgcugucauugaggcgcuucccagaaauauggugcugaccugucaggggagcgacgauaucaagcgccuccuggacucccagggacggaaagauauuaagcugaucgacaucgcccuuucuaaaacggauagcagacgcuuugaaaacgcugucugggaccagugcaaggaucucugucauaugcacacaggcgugguuguggagaagaaaaagagagggggcaaagaggaaauuacaccccacugcgcccugauggacuguaucauguacgaugccgcugucuccggaggccugaauauuccugugcuccgggccguucugccgcgcgacaugguguuccggaccucuagccccaaggucgugcuuugaggacuagucccuguucccagagcccacuuuuuuuucuuuuuuugaaauaaaauagccugucuuucagaucucaaaggcucuuuucagagccaccaaaaaaaaaaaaaaaaaaaaaaaaaaaaaaaaaaaaaaaaaaaaaaaaaaaaaaaaaaaaaaaaaaaaaaaaaaaaaaaaaaaaaaaaaaaaaaaaaaaaa

SEQ ID NO: 19648 - RNA, 2033 nt, Artificial Sequence
  mRNA product Design a-1 (hSL-A100) comprising derived and/or modified sequence from LASV(LASV003-NIG-2008;Clade II)__AIT17581__SP-HsALB_NP(2-569) (opt5)
aggagagucccgcagucggcguccagcggcucugcuuguucgugugugugucguugcaggccuuauucaagcuuaccaugaagugggugaccuucaucagccugcucuuucuguucuccucugccuacagcagcgccuccaaggaggugaaaucuuuccuguggacccagagccucagacgggaacuguccggcuacugcucuagcaucaaacuucaagucguuaaggacgcucaggcccugcuccacgggcuggauuuuuccgaggugucuaacgugcagcgccuuaugagaaagcagaaacgggacgauagcgaccugaagcgccucagagaucugaaucaagcggucaacaaucugguggaacucaaguccacccagcagaaaagcguucugcgggugggaacgcuuaccucugacgaucugcucacacuggcugccgaccuugagaagcugaaauccaaggucauucgcaccgaaagaccccucagcucuggcguguauauggggaaccuguccgcccagcaacuggagcagcggcgcacacuccugaauaugaucggaaugguuggcggggcucagggaacccagccuggcagagauggcgugguccgggugugggacgugaaaaacccggaucuucugaauaaccaauucgggacaaugcccagccucacccuggccugucuuacgaagcagggacaggucgaccugaaugauguugugcucgcucugaccgaccugggccucauuuacacagccaaguauccuaacucuuccgaccuggaucgccuuagccaaucccaucccauccugucuaugguggacaccaaaaagagcucccucaauauuagcggguacaacuuuucucugggagcggccgucaaagcuggcgccugcaugcuugaugggggaaauaugcuggagacaaucaaggugaccccucagacgauggacggcauccucaaauccauucugaagguuaaaaagagccugggcauguucgugucugauacacccggggaaagaaacccuuaugagaauauccucuacaagauuugucugagcggagacggcuggccguauaucgcuucccggaccucuauugucgggcgcgccugggaaaacacaaccguggaucuugagagcgacggaaaaccccagaagguuggcaccgcgggguccaacaaaagccugcagucugccggauuuccuacaggccucacguacucccaacugaugacccugaaggauagcaugaugcagcuugaccccucugcuaaaacauggaucgauauugagggcagaccugaagaccccguggagaucgcccucuaccagccgauguccgggugcuauauccacuucuuucgggaaccuaccgaccugaagcaguucaagcaagaugcuaaauacagccauggaauugacgucacagaucuguuucccgcccagccuggccucaccuccgccgugaucgaggcucugcccagaaauaugguccuuacgugucaggggucugacgauauuaagcgccugcucgacagccagggacggagagauaucaaacugauugacaucgcgcuguccaaggccgauucucgccgguucgaaaacgcugugugggaccaaugcaaagaucuuugucacaugcauacaggcguuguggucgagaagaagaaaagagggggcaaggaggaaaucacaccccacugcgcccucauggacuguauuauguaugaugccgcugugagcggaggccugaauaucccuguucugcgcgccgugcucccgcgggacauggucuuuagaaccuccagccccaaaguggugcugugaggacuagucccuguucccagagcccacuuuuuuuucuuuuuuugaaauaaaauagccugucuuucagaucucaaaggcucuuuucagagccaccaaaaaaaaaaaaaaaaaaaaaaaaaaaaaaaaaaaaaaaaaaaaaaaaaaaaaaaaaaaaaaaaaaaaaaaaaaaaaaaaaaaaaaaaaaaaaaaaaaaaa

SEQ ID NO: 19649 - RNA, 2033 nt, Artificial Sequence
  mRNA product Design a-1 (hSL-A100) comprising derived and/or modified sequence from LASV(LASV035-NIG-2009;Clade II)__AIT17589__SP-HsALB_NP(2-569) (opt5)
aggagagucccgcagucggcguccagcggcucugcuuguucgugugugugucguugcaggccuuauucaagcuuaccaugaagugggugaccuucaucagccugcucuuucuguucuccucugccuacagcagcgccuccaaggaggugaaaucuuuccuguggacccagagccucagacgggaacuguccggcuacugcucuagcaucaaacuucaagucguuaaagacgcucaggcccugcuccacgggcuggauuuuuccgaggugucuaacgugcagcgccuuaugagaaagcagaaacgggacgauagcgaccugaagcgccucagagaucugaaucaagcggucaacaaucugguggaacucaaguccacacagcagaaaagcauucugcggguuggaacgcuuaccucugacgaucugcucacacuggcugccgaccuugagaagcugaaauccaaggugauccgcaccgaaagaccccucagcucuggcgucuauauggggaaccuguccgcccagcaacuggagcagcggcgcgcucuccugaauaugauuggaauggugggcggggcccagggaacacagccuggcagagauggcguugugcgggucugggacgugaaaaacccggaucuucugaauaaccaauucgggaccaugcccagccucacacuggcuugucuuaccaagcagggacagguggaccugaaugaugccguccucgcgcugacggaccugggccucaucuacaccgccaaguauccuaacucuuccgaccuggaucgccuuagccaaucccaucccauucugaauaugguugacacaaagaagucuagccucaacaucuccggguacaauuuuagccugggagcugccgugaaagcuggcgccugcaugcuugaugggggaaacaugcuggagaccaucaaggugacaccucagaccauggacggcauucucaaaucuauccugaaggucaaaagaucccugggcauguucgugagcgauacgcccggggaacggaauccuuaugagaacauucucuacaagaucugucugucuggagacggcuggccguauauugcgagccgcacauccaucguugggagagccugggaaaacaccacaguggaucuugagucugacggaaagccccagaaagucggcaccaccgggagcaauaagucccugcagagcgcuggauuuccuacaggccucacguacucucaacugaugacccugaaagauuccaugaugcagcuugaccccagcgccaagacauggauugauaucgagggccggccugaagaccccguggagaucgcucucuaccagccgaugucugggugcuauauucacuucuuuagagaaccuaccgaccugaaacaguucaagcaagaugccaaguacucccauggaaucgacguugccgaucuguuucccgcucagccuggccucacaagcgcggugauugaggcccugccccgcaacaugguccuuaccugucagggguccgacgauaucaaaaagcugcucgacucucagggacggagagauauuaaacugaucgacaucgcucugagcaaggccgauucccgcaaauucgaaaaugccgugugggaccaaugcaaggaucuuugucacaugcauacgggcgucgugguugagaagaaaaagagagggggcaaagaggaaauuacaccccacugcgcucucauggacuguaucauguaugaugccgcggugucuggaggccugaacauuccuguccugcgggcugugcucccgcgcgacaugguuuuucggaccagcucccccaaggugguccugugaggacuagucccuguucccagagcccacuuuuuuuucuuuuuuugaaauaaaauagccugucuuucagaucucaaaggcucuuuucagagccaccaaaaaaaaaaaaaaaaaaaaaaaaaaaaaaaaaaaaaaaaaaaaaaaaaaaaaaaaaaaaaaaaaaaaaaaaaaaaaaaaaaaaaaaaaaaaaaaaaaaaa

SEQ ID NO: 19650 - RNA, 2033 nt, Artificial Sequence
  mRNA product Design a-1 (hSL-A100) comprising derived and/or modified sequence from LASV(LASV1000-NIG-2009;Clade II)__AIT17783__SP-HsALB_NP(2-569) (opt5)
aggagagucccgcagucggcguccagcggcucugcuuguucgugugugugucguugcaggccuuauucaagcuuaccaugaagugggugaccuucaucagccugcucuuucuguucuccucugccuacagcagcgccuccaaggaggugaaaucuuuccuguggacccagagccucagacgggaacuguccggcuacugcucuaacaucaaacuucaagucguuaaggacgcucaggcccugcuccacgggcuggauuuuagcgagguguccaaugugcagcgccuuaugagaaagcagaaacgggacgauucugaccugaagcgccucagagaucugaaccaagcggucaauaaccugguggaacucaagagcacacagcagaaauccauucugcggguuggaacgcuuaccagcgacgaucugcucacacuggcugccgaccuugagaagcugaaaucuaaggugauccgcaccgaaagaccccucuccagcggcgucuauauggggaaucugucuacacagcaacuggagcagcggcgcgcccuccugaacaugauuggaauggugggcggggcucagggaacccagccuggcagagauggcguugugcgggucugggacgugaaaaauccggaucuucugaacaaucaauucgggacaaugcccucccucacccuggccugucuuacgaagcagggacagguggaccugaacgaugucguucucgcucugaccgaccugggccucaucuacacagccaaguauccuaauagcucugaccuggaucgccuuucccaaagccaucccauucugaacaugguggacaccaaaaaguccucucucaauaucagcggguacaacuuuucccugggagcggccgugaaagcuggcgccugcaugcuugaugggggaaauaugcuggagacaaucaaggucaccccucagacgauggacggcauucucaaaagcauccugaaggugaaaaagucucugggcauguucguuuccgauacacccggggaaagaaacccuuaugagaacauucucuacaagaucugucugagcggagacggcuggccguauauugcuucucggaccagcaucguggggcgcgccugggaaaauacaaccgucgaucuugaguccgacggaaaaccccagaaggugggcaccgcggggucuaacaaaagccugcaguccgccggauuuccuacaggccucacguacagccaacugaugacccugaaggauucuaugaugcagcuugaccccuccgcuaaaacauggauugauaucgagggcagaccugaagaccccguugagaucgcccucuaccagccggugagcgggugcuauauucacuucuuucgggaaccuaccgaccugaagcaguucaagcaagaugcuaaauacucucauggaaucgacgucgccgaucuguuucccgcccagccuggccucacauccgcugugauugaggcgcugcccagaaauaugguccuuaccugucaggggagcgacgauaucaagcgccugcucgacucccagggacggagagauauuaaacugaucgacaucgcccugucuaaggcugauagccgccgguucgaaaacgccgugugggaccaaugcaaagaucuuugucacaugcauacgggcguuguggucgagaagaagaaaagagggggcaaggaggaaauuacaccccacugcgcccucauggacuguaucauguaugaugcugccguguccggaggccugaauauuccuguucugcgcgcggugcucccgcgggacauggucuuuagaaccucuagccccaaaguggugcugugaggacuagucccuguucccagagcccacuuuuuuuucuuuuuuugaaauaaaauagccugucuuucagaucucaaaggcucuuuucagagccaccaaaaaaaaaaaaaaaaaaaaaaaaaaaaaaaaaaaaaaaaaaaaaaaaaaaaaaaaaaaaaaaaaaaaaaaaaaaaaaaaaaaaaaaaaaaaaaaaaaaaa

SEQ ID NO: 19651 - RNA, 2033 nt, Artificial Sequence
  mRNA product Design a-1 (hSL-A100) comprising derived and/or modified sequence from LASV(LASV221-NIG-2010;Clade II)__AIT17625__SP-HsALB_NP(2-569) (opt5)
aggagagucccgcagucggcguccagcggcucugcuuguucgugugugugucguugcaggccuuauucaagcuuaccaugaagugggugaccuucaucagccugcucuuucuguucuccucugccuacagcagcgccuccaaggaggugaaaucuuuccuguggacccagagccucagacgggaacuguccggcuacugcucuagcaucaaacuucaagucguuaaggacgcucaggcccugcuccacgggcuggauuuuuccgaggugucuaacgugcagcgccuuaugagaaagcagcggcgcgacgauagcgaccugaaaagacuccgggaucugaaucaagcggucaacaaucugguggaacucaaguccacacagcaaaagagcauucugcgcguuggaacgcuuaccucugacgaucugcucacacuggcugccgaccuugagaaacugaaguccaaagugaucagaaccgaacggccccucagcucuggcgucuauauggggaaccuguccacacagcagcuggagcagcgcagagcccuccugaauaugauuggaauggugggcggggcucagggaacccagccuggccgggauggcguugugcgcgucugggacgugaagaacccggaucuucugaauaaccaauucgggacaaugcccagccucacccuggccugucuuacgaaacagggacagguggaccugaaugaugcuguccucgcccugaccgaccugggccucaucuacacagcgaaguauccuaacucuuccgaccuggauagacuuagccaaucccaucccauucugaauaugguugacaccaagaaaucuagccucaacaucuccggguacaauuuuagccugggagccgcugugaaggccggcgcuugcaugcuugaugggggaaacaugcuggagacaaucaaagugaccccucagacggucgacggcauucucaagucuauccugaaagugaagcggucccugggcauguucguuagcgauacacccggggaacgcaauccuuaugagaacauucucuacaaaaucugucugucuggagacggcuggccguauauugccagcagaaccuccaucguggggcgggcgugggaaaacacaaccgucgaucuugagucugacggaaagccccagaaggugggcaccgccgggagcaauaaaucccugcagagcgcuggauuuccuacaggccucacguacucucaacugaugacccugaaggauuccaugaugcagcuugaccccagcgccaaaacauggauugauaucgagggcagaccugaagaccccguugagaucgcucucuaccagccgaugucugggugcuauauucacuucuuucgcgaaccuaccgaccugaagcaguucaaacaagaugccaaguacucccauggaaucgacguggccgaucuguuucccgcucagccuggccucacaagcgcggucauugaggcccugccccggaacauggugcuuaccugucagggguccgacgauaucaagagacugcucgacucucagggacgccgggauauuaaacugaucgacaucgcucugagcaaggccgauuccagaaaauucgaaaaugccgucugggaccaaugcaaggaucuuugucacaugcauacgggcgugguuguggagaaaaagaagcgcgggggcaaagaggaaauuacaccccacugcgcucucauggacuguaucauguaugaugccgcggucucuggaggccugaacauuccugugcugcgggcuguucucccgagagacaugguguuucgcaccagcucccccaaggucgugcugugaggacuagucccuguucccagagcccacuuuuuuuucuuuuuuugaaauaaaauagccugucuuucagaucucaaaggcucuuuucagagccaccaaaaaaaaaaaaaaaaaaaaaaaaaaaaaaaaaaaaaaaaaaaaaaaaaaaaaaaaaaaaaaaaaaaaaaaaaaaaaaaaaaaaaaaaaaaaaaaaaaaaa

SEQ ID NO: 19652 - RNA, 2033 nt, Artificial Sequence
  mRNA product Design a-1 (hSL-A100) comprising derived and/or modified sequence from LASV(LASV237-NIG-2010;Clade II)__AIT17639__SP-HsALB_NP(2-569) (opt5)
aggagagucccgcagucggcguccagcggcucugcuuguucgugugugugucguugcaggccuuauucaagcuuaccaugaagugggugaccuucaucagccugcucuuucuguucuccucugccuacagcagcgccuccaaggaggugaaaucuuuccuguggacccagagccucagacgggaacuguccggcuacugcucuaacaucaaacuucaagucguuaaggacgcucaggcccugcuccacgggcuggauuuuagcgagguguccaaugugcagcgccuuaugagaaagcagaaacgggacgauucugaccugaagcgccucagagaucugaaccaagcggucaauaaccugguggaacucaagagcacacagcagaaauccauucugcggguuggaacgcuuaccagcgacgaucugcucacacuggcugccgaccuugagaagcugaaaucuaaggugauccgcaccgaaagaccccucuccagcggcgucuauauggggaaucugucuacacagcaacuggagcagcggcgcgcccuccugaacaugauuggaauggugggcggggcucagggaacccagccuggcagagauggcguugugcgggucugggacgugaaaaauccggaucuucugaacaaucaauucgggacaaugcccucccucacccuggccugucuuacgaagcagggacagguggaccugaacgaugcuguccucgcccugaccgaccugggccucaucuacacagcgaaguauccuaauagcucugaccuggaucgccuuucccaaagccaucccauucugaacaugguugacaucaaaaaguccucucucaauaucagcggguacaacuuuucccugggagccgcugugaaagccggcgcuugcaugcuugaugggggaaauaugcuggagaccauuaaggugacaccucagaccauggacggcauccucaaaagcauucugaaggucaaaagaucucugggcauguucguguccgauacgcccggggaacggaacccuuaugagaacauccucuacaagauuugucugagcggagacggcuggccguauaucgccucucgcacaagcauuguugggagagcgugggaaaauaccacaguggaucuugaguccgacggaaagccccagaaagucggcucugccgggagcaacaagucccugcagagcgcuggauuuccuaccggccucaccuacucucaacugaugacacugaaagauuccaugaugcagcuugaccccagcgccaagacguggaucgauaucgagggccggccugaagaccccguggagauugcucucuaccagccgaugucugggugcuauauccacuucuuuagagaaccuaccgaccugaaacaguucaagcaagaugccaaguacucccauggaauugacguugccgaucuguuucccgcucagccuggccucacaagcgcggugaucgaggcccugccccgcaauaugguccuuaccugucagggguccgacgauauuaaacggcugcucgacucucagggaagacgcgauaucaagcugaucgacauugcucugagcaaagccgauucccggagauucgaaaacgccgugugggaccaaugcaaggaucuuugucacaugcauacaggcgucgugguugagaaaaagaagcgcgggggcaaagaggaaaucacgccccacugcgcucucauggacuguauuauguaugaugccgcggugucuggaggccugaauaucccuguccugcgggcugugcucccgagagacaugguuuuucgcaccagcucccccaaggugguccugugaggacuagucccuguucccagagcccacuuuuuuuucuuuuuuugaaauaaaauagccugucuuucagaucucaaaggcucuuuucagagccaccaaaaaaaaaaaaaaaaaaaaaaaaaaaaaaaaaaaaaaaaaaaaaaaaaaaaaaaaaaaaaaaaaaaaaaaaaaaaaaaaaaaaaaaaaaaaaaaaaaaaa

SEQ ID NO: 19653 - RNA, 2033 nt, Artificial Sequence
  mRNA product Design a-1 (hSL-A100) comprising derived and/or modified sequence from LASV(LASV253-NIG-2011;Clade II)__AIT17671__SP-HsALB_NP(2-569) (opt5)
aggagagucccgcagucggcguccagcggcucugcuuguucgugugugugucguugcaggccuuauucaagcuuaccaugaagugggugaccuucaucagccugcucuuucuguucuccucugccuacagcagcgccuccaaggaggugaaaucuuuccuguggacccagagccucagacgggaacuguccggcuacugcucuagcaucaaacuucaagucguuaaggacgcucaggcccugcuccacgggcuggauuuuuccgaggugucuaacgugcagcgccuuaugagaaagcagaaacgggacgauagcgaccugaagcgccucagagaucugaaucaagcggucaacaaucugguggaacucaaguccacccagcagaaaagcguucugcgggugggaacgcuuaccucugacgaucugcucacacuggcugccgaccuugagaagcugaaauccaaggucauucgcaccgaaagaccccucagcucuggcguguauauggggaaccuguccacacagcaacuggagcagcggcgcgcccuccugaauaugaucggaaugguuggcggggcucagggaacccagccuggcagagauggcgugguccgggugugggacgugaaaaacccggaucuucugaauaaccaauucgggacaaugcccagccucacccuggccugucuuacgaagcagggacaggucgaccugaaugauguugugcucgcucugaccgaccugggccucauuuacacagccaaguauccuaacucuuccgaccuggaucgccuuagccaaucccaucccauccugaauaugguggacaccaaaaagucuagccucaacauuuccggguacaauuuuagccugggagcggccgucaaagcuggcgccugcaugcuugaugggggaaacaugcuggagacaaucaaggugaccccucagacgauggacggcauccucaaaucuauucugaagguuaaaaagucccugggcauguucgugagcgauacacccggggaaagaaauccuuaugagaacauccucuacaagauuugucugucuggagacggcuggccguauaucgcuagccggaccuccauugucgggcgcgccugggaaaacacaaccguggaucuugagucugacggaaaaccccagaagguuggcaccgcggggagcaauaaaucccugcagagcgccggauuuccuacaggccucacguacucucaacugaugacccugaaggauuccaugaugcagcuugaccccagcgcuaaaacauggaucgauauugagggcagaccugaagaccccguggagaucgcccucuaccagccgaugucugggugcuauauccacuucuuucgggaaccuaccgaccugaagcaguucaagcaagaugcuaaauacucccauggaauugacgucacagaucuguuucccgcccagccuggccucaccagcgccgugaucgaggcucugcccagaaacaugguccuuacgugucagggguccgacgauauuaagcgccugcucgacucucagggacggagagauaucaaacugauugacaucgcgcugagcaaggccgauucccgccgguucgaaaaugcugugugggaccaaugcaaagaucuuugucacaugcauacaggcguuguggucgagaagaagaaaagagggggcaaggaggaaaucacaccccacugcgcccucauggacuguauuauguaugaugccgcugugucuggaggccugaacaucccuguucugcgcgccgugcucccgcgggacauggucuuuagaaccagcucccccaaaguggugcugugaggacuagucccuguucccagagcccacuuuuuuuucuuuuuuugaaauaaaauagccugucuuucagaucucaaaggcucuuuucagagccaccaaaaaaaaaaaaaaaaaaaaaaaaaaaaaaaaaaaaaaaaaaaaaaaaaaaaaaaaaaaaaaaaaaaaaaaaaaaaaaaaaaaaaaaaaaaaaaaaaaaaa

SEQ ID NO: 19654 - RNA, 2033 nt, Artificial Sequence
  mRNA product Design a-1 (hSL-A100) comprising derived and/or modified sequence from LASV(LASV254-NIG-2011;Clade II)__AIT17675__SP-HsALB_NP(2-569) (opt5)
aggagagucccgcagucggcguccagcggcucugcuuguucgugugugugucguugcaggccuuauucaagcuuaccaugaagugggugaccuucaucagccugcucuuucuguucuccucugccuacagcagcgccuccaaggaggugaaaucuuuccuguggacccagagccucagacgggaacuguccggcuacugcucuagcaucaaacuucaagucguuaaggacgcucaggcccugcuccacgggcuggauuuuuccgaggugucuaacgugcagcgccuuaugagaaagcagaaacgggacgauagcgaccugaagcgccucagagaucugaaucaagcggucaacaaucugguggaacucaaguccacacagcagaaaagcguucugcgggugggaacgcuuaccucugacgaucugcucacacuggcugccgaccuugagaagcugaaauccaaggucauucgcaccgaaagaccccucagcucuggcguguauauggggaaccuguccacacagcaacuggagcagcggcgcgcccuccugaauaugaucggaaugguuggcggggcucagggaacccagccuggcagagauggcgugguccgggugugggacgugaaaaacccggaucuucugaauaaccaauucgggacaaugcccagccucacccuggccugucuuacgaagcagggacaggucgaccugaaugaugcuguucucgcccugaccgaccugggccucauuuacacagcgaaguauccuaacucuuccgaccuggaucgccuuagccaaucccaucccauccugaauaugguggacaccaaaaagucuagccucaacauuuccggguacaauuuuagccugggagccgcugugaaagccggcgcuugcaugcuugaugggggaaacaugcuggagacaaucaaggucaccccucagacgauggacggcauccucaaaucuauucugaaggugaaaaagucccugggcauguucguuagcgauacacccggggaaagaaauccuuaugagaacauccucuacaagauuugucugucuggagacggcuggccguauaucgccagccggaccuccauuguggggcgcgcgugggaaaacacaaucgucgaucuugagucugacggaaaaccccagaaggugggcaccgccgggagcaauaaaucccugcagagcgcuggauuuccuaccggccucacauacucucaacugaugacgcugaaggauuccaugaugcagcuugaccccagcgccaaaaccuggauugauaucgagggcagaccugaagaccccguugagaucgcucucuaccagccgaugucugggugcuauauucacuucuuucgggaaccuacagaccugaagcaguucaagcaagaugccaaauacucccauggaaucgacguggccgaucuguuucccgcucagccuggccucaccagcgcggucauugaggcccugcccagaaacauggugcuuacaugucagggguccgacgauaucaagcgccugcucgacucucagggacggagagauauuaaacugaucgacaucgcucugagcaaggccgauucccgccgguucgaaaaugccgucugggaccaaugcaaagaucuuugucacaugcauaccggcgugguuguggagaagaagaaaagagggggcaaggaggaaauuacgccccacugcgcucucauggacuguaucauguaugaugccgcggucucuggaggccugaacauuccugugcugcgcgcuguucucccgcgggacaugguguuuagaacaagcucccccaaagucgugcugugaggacuagucccuguucccagagcccacuuuuuuuucuuuuuuugaaauaaaauagccugucuuucagaucucaaaggcucuuuucagagccaccaaaaaaaaaaaaaaaaaaaaaaaaaaaaaaaaaaaaaaaaaaaaaaaaaaaaaaaaaaaaaaaaaaaaaaaaaaaaaaaaaaaaaaaaaaaaaaaaaaaaa

SEQ ID NO: 19655 - RNA, 2033 nt, Artificial Sequence
  mRNA product Design a-1 (hSL-A100) comprising derived and/or modified sequence from LASV(Nig08-04;Clade II)__ADU56611__SP-HsALB_NP(2-569) (opt5)
aggagagucccgcagucggcguccagcggcucugcuuguucgugugugugucguugcaggccuuauucaagcuuaccaugaagugggugaccuucaucagccugcucuuucuguucuccucugccuacagcagcgccuccaaggaggugaaaucuuuccuguggacccagagccucagacgggaacuguccggcuacugcucuaacaucaaacuucaagucguuaaggacgcucaggcccugcuccacgggcuggauuuuagcgagguguccaaugugcagcgccuuaugagaaagcagaaacgggacgauggagaccugaagcgccucagagaucugaaccaagcggucaauaaccugguggaacucaagucuacccagcagaaaagcguucugcgggugggcacgcuuaccuccgacgaucugcucacacuggcugccgaccuugagaagcugaaaagcaaggucauucgcaccgaaagaccccucucuuccgggguguauaugggaaaucugagcacacagcaacuggagcagcggaaagcccuccugucuaugaucggcaugguugggggagcucagggcacccagccuggccgcgaugggguggucagagugugggacgugaagaacccggaucuucugaauaaccaauucggaacaaugcccucccucacccuggccugucuuacgaagcagggccaggucgaccugaaugaugcuguucucgcccugaccgaccuggggcucauuuacacagcgaaauauccuaacagcucugaccuggaucggcuuucccaaagccaucccauccugaauaugguggacaccaagaaauccucucucaacauuagcggauacaauuuuucccugggcgccgcugugaaggccggggcuugcaugcuugauggaggcaacaugcuggagacaaucaaagucaccccucagacgauggacggcauccucaagagcauucugaaagugaagcgcucucuggggauguucguuuccgauacacccggagaaagaaauccuuaugagaacauccucuacaagauuugucugagcggcgacggguggccguauaucgccucucggaccagcauugugggacgcgcgugggaaaacacaaccgucgaucuugaguccgacggcaaaccccagaagguggggaccgccggaucuaauaaaagccugcaguccgcuggcuuuccuacaggccucacguacagccaacugaugacccugaaggauucuaugaugcagcuugaccccuccgccaaaacauggaucgauauugaggggagaccugaagaccccguugagaucgcucucuaccagccgaugagcggaugcuauauccacuucuuucgggaaccuaccgaccugaagcaguucaagcaagaugccaaauacucucauggcauugacgugacagaucuguuuuccgcccagcccgggcucaccagcgcugucaucgaggcgcugccuagaaacauggugcuuacgugucagggauccgacgauauuaagaaacugcucgacucucagggccgccgggauaucaagcugauugacaucagccugaauaaagccgauuccagacgcuucgaaaacgcugucugggaccaaugcaaggaucuuugucacaugcauacaggggugguuguggagaagaaaaagcggggcggaaaagaggaaaucacaccccacugcgcccucauggacuguauuauguuugaugccgcugucucuggcgggcugaauauccccauucugagagccgugcucccucgcgacaugguuuuccggaccagcuccccgaaggugguccugugaggacuagucccuguucccagagcccacuuuuuuuucuuuuuuugaaauaaaauagccugucuuucagaucucaaaggcucuuuucagagccaccaaaaaaaaaaaaaaaaaaaaaaaaaaaaaaaaaaaaaaaaaaaaaaaaaaaaaaaaaaaaaaaaaaaaaaaaaaaaaaaaaaaaaaaaaaaaaaaaaaaaa

SEQ ID NO: 19656 - RNA, 2036 nt, Artificial Sequence
  mRNA product Design a-1 (hSL-A100) comprising derived and/or modified sequence from LASV(GA391;Clade III)__AAA46284__SP-HsALB_NP(2-570) (opt5)
aggagagucccgcagucggcguccagcggcucugcuuguucgugugugugucguugcaggccuuauucaagcuuaccaugaagugggugaccuucaucagccugcucuuucuguucuccucugccuacagcagcgccuccaaggaggugagaucuugccuguggacccagagccuccggcgcgaacuguccggcuacuguucuaacaucaaacuucaagucguuaaggacgcucaggcccugcuccacgggcuggauuucagcgagguguccaaugugcagagacuuaugcggaaacagaagcgcgacgauggagaccugaaaagacuccgggaucugaaccaagcggucaauaaccugguggaacucaagucuacacagcagaaaagcguucugcgcgugggcacgcuuuccagcgacgaucugcucauucuggcugccgaccuugagaaacugaagucuaaagucaccagaacagaacggccccucuccagcgggguguauaugggaaaucugucuucccagcaacuggaucagcgcagagcccuccugaacaugaucggcaugaccgggguuagcggaggcggcaagggggcuucuaauggaauugugcgggucugggacgugaaaaacgccgagcuucugaauaaccaguuuggcacaaugccuucccucacccuggcuugccuuacaaagcaggggcaaguggaucugaaugacgccguccaggcgcucaccgaucugggacugaucuacacggccaaguauccgaacagcuccgaccucgaccgccugucucagagccaucccauucuuaauaugaucgauaccaaaaaguccagccugaacaucucuggcuacaauuucucccucggggcugccguuaaagcuggagccuguaugcuggacggcggcaacaugcuugagacaauuaaggugagcccucaaaccauggaugggauccugaaaucuauucucaaggugaaaaagagccugggaauguuugucuccgacacacccggcgaaagaaacccuuaugagaauauccuguacaagauuugccucucuggggauggauggagcuauaucgcgucccggaccagcauugugggccgcgccugggaaaacacgguuguggaccuggagcaggauaauaaaccccagaagaucgggaacggaggcucuaauaaaucccuucagagcgcuggcuucgccgcugggcugaucuacucucaacucaugacacugaaggacuuuaaauguuucaaccugauuccuaaugccaagaccuggauggauaucgagggaagaccggaagaccccgucgagauugcccuuuaccagccuuccagcggcugcuaugugcacuuuuuccgggaacccacagaucucaagcaguuuaaacaggacgcuaaguacucccaugggagagacguuaccgaucuguucgcggcccaaccuggacugaccucugcugugaucgaggcccucccccgcaacauggucauuacaugucagggcagcgaagacauccggaaacugcuugagucccaggggagacgcgauaucaagcugauugacaucacgcucucuaaagccgauagccggaaguuugagaaugcugugugggaccaguucaaggaucugugccacaugcauaccggcgucgugguugaaaagaagaaaagaggaggcaaggaggaaauuacaccgcacugugcccugauggacugcaucauguuugaugcggcuguguccgggggacuugacgccaaaguccuccgcgugguucugccucgggauaugguguucagaaccagcacacccaaggucgugcugugaggacuagucccuguucccagagcccacuuuuuuuucuuuuuuugaaauaaaauagccugucuuucagaucucaaaggcucuuuucagagccaccaaaaaaaaaaaaaaaaaaaaaaaaaaaaaaaaaaaaaaaaaaaaaaaaaaaaaaaaaaaaaaaaaaaaaaaaaaaaaaaaaaaaaaaaaaaaaaaaaaaaa

SEQ ID NO: 19657 - RNA, 2033 nt, Artificial Sequence
  mRNA product Design a-1 (hSL-A100) comprising derived and/or modified sequence from LASV(Nig08-A19;Clade III)__ADU56619__SP-HsALB_NP(2-569) (opt5)
aggagagucccgcagucggcguccagcggcucugcuuguucgugugugugucguugcaggccuuauucaagcuuaccaugaagugggugaccuucaucagccugcucuuucuguucuccucugccuacagcagcgccuccaaggaggugaaaucuuuccuguggacccagagccucagacgggaacuguccggcuacugcucuaacaucaaacuucaagucguuaaggacgcucaggcccugcuccacgggcuggauuuuagcgagguguccaaugugcagcgccuuaugagaaagcagaaacgggacgauggagaccugaagcgccucagagaucugaaccaagcggucaauaaccugguggaacucaagucuacacagcagaaaagcguucugcgggugggcacgcuuuccagcgacgaucugcucguccuggcugccgaccuugagaagcugaaaucuaaggugguucgcaccgaaagaccccucuccagcgggauuuauaugggaaaucugucuucccagcaacuggaucagcggaaagcccuccugaacaugaucggcaugacagggggaaauggcggccgcaacaccacaagcgacgggauugugagagucugggaugugaagaaugcugagcuucugaacaaucaguucggaaccaugccuucucucacacuggccugucuuaccaagcagggccaaguggaccugaacgaugcuguccaggcccucacggaccuggggcugaucuacaccgcgaaauaucccaauuccagcgaccucgaucggcuggcccagucccauccgauucuuaacaugaucgacacaaagaaaucuagccugaauaucuccggauacaacuuuagccucggcgcugccguuaaggcuggggccugcaugcuggauggaggcaacaugcuugagaccauuaaagugucuccucaaacaauggacggcauccugaaguccauucucaaagugaagcgcagccuggggauguucaucucugauacccccggagaaagaaauccuuaugagaacauucuguacaagaucugucucagcggcgacggguggcccuauauugcgucccggacgucuaucgucggacgcgccugggaaaauacagugguugaucuggagagcgacaacaaaccucagaagaccggcaaugggggauccaacaaaagccuucagucugcuggcuuugccgcuggccugacauacucccagcucaugacccugaaggauagcaugcugcaacuugacccgaaugccaaaaccuggauggauaucgaggggagacccgaagacccuguggagauugcccucuaccagcccucuuccggaugcuauauccacuucuuucgggaaccuacagaccugaagcaguucaagcaggaugcuaaauacagccauggcauugacgucacggaucuguuugcggcccaacccgggcucaccuccgcugugaucgaggcccugccgagaaacaugguuauuacaugucagggaucugaagacauccgcaaacuucuggagagccagggccggagagauaucaagcucauugacaucucccugucuaagguggauagccgcaaauucgagaaugccgucugggaccaguuuaaggaucugugccacaugcauaccgggauuguggucgaaaagaaaaagcggggcggaaaagaggaaaucacaccucacugugcucuuauggacugcauuauguucgaugccgcgguguccggcgggguugacgcuaaggugcucagagccguccugccccgcgauaugguguuucggaccagcacgccuaaaguugugcugugaggacuagucccuguucccagagcccacuuuuuuuucuuuuuuugaaauaaaauagccugucuuucagaucucaaaggcucuuuucagagccaccaaaaaaaaaaaaaaaaaaaaaaaaaaaaaaaaaaaaaaaaaaaaaaaaaaaaaaaaaaaaaaaaaaaaaaaaaaaaaaaaaaaaaaaaaaaaaaaaaaaaa

SEQ ID NO: 19658 - RNA, 2033 nt, Artificial Sequence
  mRNA product Design a-1 (hSL-A100) comprising derived and/or modified sequence from LASV(G1180-SLE-2010;Clade IV)__AIT17169__SP-HsALB_NP(2-569) (opt5)
aggagagucccgcagucggcguccagcggcucugcuuguucgugugugugucguugcaggccuuauucaagcuuaccaugaagugggugaccuucaucagccugcucuuucuguucuccucugccuacagcagcgccuccaaggagaucaaaucuuuccuguggacccagagccucagacgggaacuguccggcuacugcucuaacauuaagcugcaaguggucaaagacgcucaggcccugcuccacgggcuggauuuuagcgagguuuccaaugugcagcgccuuaugagaaaggaacggcgcgacgauaacgaccugaaaagacuccgggaucugaaucaggcggugaacaaucuggucgagcucaagucuacacaacaaaagagcauccugcgcgugggaacgcuuaccuccgacgaucugcucauucuggcugccgaccuugaaaaacuuaagagcaaaguuaucagaacagagcggccccucucugccggcguguauauggggaaccuguccagccagcagcuggaucagcgcagagcucuccugucuaugauuggaauguccagcggcaaucagcgggcccaggcugggcgcgacggagucgugagaguuugggaugugaagaacgucgagcuucugaauaaccaguucggcaccaugccuucucucacacuggccugucuuaccaaacaaggccagguggaccugaaugaugcggugcaggcccucacagaccuggggcugaucuacaccgcuaaguauccgaacacguccgaccucgaucggcugacccaaagccaucccauccuuaauaugauugacacaaagaaauccucucugaacaucagcggauacaauuuuucccucggcgccgcugucaaggccggggcgugcaugcuggauggaggcaacaugcuugaaaccauuaaaguuagcccucagacaauggacgggauccugaagucuauucucaaagugaagaaagcccugggaauguucaucuccgauacccccggcgagcgcaacccuuaugaaaauauucuguacaagaucugucucagcggcgacggguggcccuauaucgcuucuagaacgagcauuacaggacgggccugggagaacaccguggucgaucuggaguccgacggcaagccucagaaagcugggucuaauaacagcaauaagucccuucagagcgugggauuuacagccggccugaccuacucucaacucaugacccugaaagaugccaugcugcagcuugacccgaacgcuaagacauggauggauaucgaagggagacccgaggacccuguugaaauugcgcucuaccagcccuccagcggaugcuauauccacuucuuucgcgagccuacggaccugaaacaguucaagcaagaugccaaguacucucauggcauugacgugaccgaucuguuugcugcccagcccggccucacauccgccgucaucgacgcucugccgcggaauauggugaucaccugucaggggagcgaugacauuagaaaacuucuggaaucccagggacgcaaggauaucaaacucauugacaucgcccugucuaagacagauagccggaaauaugagaacgcgguuugggaccaauacaaggaucugugccacaugcauaccggcguggucguggagaagaaaaagagagggggaaaagaagagauuacgccucacugugcucuuauggacugcaucauguucgaugccgccgucuccggcgggcucaauacaucugugcugcgcgcuguucugccccgggacaugguguuuagaaccagcaccccucgcgucgugcucugaggacuagucccuguucccagagcccacuuuuuuuucuuuuuuugaaauaaaauagccugucuuucagaucucaaaggcucuuuucagagccaccaaaaaaaaaaaaaaaaaaaaaaaaaaaaaaaaaaaaaaaaaaaaaaaaaaaaaaaaaaaaaaaaaaaaaaaaaaaaaaaaaaaaaaaaaaaaaaaaaaaaa

SEQ ID NO: 19659 - RNA, 2033 nt, Artificial Sequence
  mRNA product Design a-1 (hSL-A100) comprising derived and/or modified sequence from LASV(G1442-SLE-2011;Clade IV)__AIT17181__SP-HsALB_NP(2-569) (opt5)
aggagagucccgcagucggcguccagcggcucugcuuguucgugugugugucguugcaggccuuauucaagcuuaccaugaagugggugaccuucaucagccugcucuuucuguucuccucugccuacagcagcgccuccaaggaggugaaaucuuuccuguggacccagagccucagacgggaacuguccggcuacugcucuaacaucaaacuucaagucguuaaggacgcucaggcccugcuccacgggcuggauuuuagcgagguguccaaugugcagcgccuuaugagaaagcagcggcgcgacgauaacgaccugaaaagacuccgggaucugaaucaagcggucaacaaucugguggaacucaagucuacacagcaaaagagcguucugcgcgugggaacgcuuaccuccgacgaucugcucguccuggcugccgaccuugagaaacuuaagagcaaagugauuagaacagaacggccccucucugccggcguuuauauggggaaccuguccagccagcagcuggaucagcgcagagcucuccugaauaugaucggaaugucuggcgggauucagggaacccggacaggccgcgacggcguggucagagugugggaugugaagaacgccgaccuucugaauaaccaguucgggaccaugccuucccucacacuggcuugucuuaccaaacaaggacaggucgaucugaaugacguugugcaggcccucacggaccugggccugaucuacaccgcgaaguauccgaacgccagcgaucucgaccggcugacacaaucucaucccauucuuaauaugaucgauaccaagaaauccagccugaacaucuccggguacaauuuuucucucggagcugccgugaaggcuggcgccugcaugcuggacgggggaaacaugcuugagacaauuaaagucagcccucagaccauggauggcauccugaaguccauucucaaagugaagaaaacgcugggcauguucaucagcgacacacccggggagcgcaacccuuaugaaaauauucuguacaagaucugucucucuggagauggcuggcccuauauugcguccagaaccagcaucacagggcgggccugggagaacaccguuguggaccuggaaucugauggaaagccucagaaagcuggcagcaauaacuccaauaagucucuucagagcgccggguuugcugccggacugaccuacucccaacucaugacacugaaagacgccaugcugcagcuugauccgaacgcuaagacguggauggacaucgagggcagacccgaggacccugucgaaauugcgcucuaccagcccagcucuggcugcuauauccacuucuuucgcgagccuaccgaucugaaacaguucaagcaagacgccaaguacucccaugggauugaugugacagaccuguuugcugcccagcccggacucaccagcgccguuaucgaagcucugccgcggaauauggugauuacaugucagggcucugaugacaucaaaaagcugcuggagucccaggggagaaaagauaucaagcucauugacaucgcccugagcaaaaccgauucccgcaaguaugaaaacgcggucugggaccaauacaaggaucugugccacaugcauacgggaguggucguggagaaaaagaaacggggcgggaaggaggaaauuacaccucacugugcucuuauggacugcaucauguucgaugccgccguuucuggcggacucaauacccuggugcugagagcuguccucccccgcgacaugguguuucggaccagcacaccuagaguugugcugugaggacuagucccuguucccagagcccacuuuuuuuucuuuuuuugaaauaaaauagccugucuuucagaucucaaaggcucuuuucagagccaccaaaaaaaaaaaaaaaaaaaaaaaaaaaaaaaaaaaaaaaaaaaaaaaaaaaaaaaaaaaaaaaaaaaaaaaaaaaaaaaaaaaaaaaaaaaaaaaaaaaaa

SEQ ID NO: 19660 - RNA, 2033 nt, Artificial Sequence
  mRNA product Design a-1 (hSL-A100) comprising derived and/or modified sequence from LASV(G3010-SLE-2013;Clade IV)__AIT17345__SP-HsALB_NP(2-569) (opt5)
aggagagucccgcagucggcguccagcggcucugcuuguucgugugugugucguugcaggccuuauucaagcuuaccaugaagugggugaccuucaucagccugcucuuucuguucuccucugccuacagcagcgccuccaaggagaucaaaucuuuccuguggacccagagccucagacgggaacuguccggcuacugcucuaacauuaaacuucaaguggucaaagacgcucaggcccugcuccacgggcuggauuuuagcgagguuuccaaugugcagcgccuuaugagaaaggaacggcgcgacgauaacgaccugaaaagacuccgggaucugaaucaggcggugaacaaucuggucgagcucaagucuacacaacaaaagagcauccugcgcgugggaacgcuuaccuccgacgaucugcucauucuggcugccgaccuugaaaaacuuaagagcaaaguuacaagaaccgagcggccccucucugccggcguguauauggggaaccuguccagccagcagcuggaucagcgcagagcucuccugucuaugaucggaauguccagcggcguccagggggcccgggcuggacgcgacggcgugguuagagugugggaugucaagaaugccgagcuucugaacaaucaguucggcacaaugccuucucucacccuggcgugucuuacaaaacaggggcaaguggaccugaacgaugugguccaggcccucaccgaccugggacugauuuacacggcuaaguauccgaauaccuccgaccucgaucggcugacacagagccaucccauccuuaacaugaucgacaccaagaaauccucucugaauauuagcggcuacaacuuuucccucggggccgcuguuaaggccggagcgugcaugcuggauggcgggaauaugcuugaaacaaucaaagugagcccucaaaccauggacggcauucugaagucuauccucaaagugaagaaagcccugggaauguucauuuccgagacgcccggcgaacgcaacccuuaugagaacauccuguacaagauuugucucagcggggauggauggcccuauaucgcuucuagaacaagcaucaccggccgggccugggagaauacagucguggaccuggaauccgaugggaagccucagaaagcuggaucuaacaauagcaacaagucccuucagagcgccggcuuuaccgccgggcugaccuacucucagcucaugacacugaaagacgcuaugcugcaacuugauccgaaugcgaagacguggauggacauugagggaagacccgaagauccuguugagguggcccucuaccagcccuccagcggcugcuauauccacuucuuucgcgaaccuaccgaccugaaacaguucaagcaggacgcuaaguacucucauggcauugaugucacagaccuguuugccgcccaacccgggcucaccuccgcugugaucgaugcccugccgcggaacaugguuauuacaugucagggaagcgacgauaucaaaaagcugcuggagucccagggcagaaaagacaucaagcucauugauaucgcgcugucuaaaaccgacagccgcaaguaugagaaugcugugugggaucaguacaaggaccugugccacaugcauacgggggucguggucgaaaagaagaaacggggaggcaaggaggaaauuacaccucacugugcccuuauggauugcaucauguucgacgccgcuguguccgggggccucaacaccucuguucugagagccgugcugccccgcgauauggucuuucggaccagcacaccuagagugguucucugaggacuagucccuguucccagagcccacuuuuuuuucuuuuuuugaaauaaaauagccugucuuucagaucucaaaggcucuuuucagagccaccaaaaaaaaaaaaaaaaaaaaaaaaaaaaaaaaaaaaaaaaaaaaaaaaaaaaaaaaaaaaaaaaaaaaaaaaaaaaaaaaaaaaaaaaaaaaaaaaaaaaa

SEQ ID NO: 19661 - RNA, 2033 nt, Artificial Sequence
  mRNA product Design a-1 (hSL-A100) comprising derived and/or modified sequence from LASV(G502-SLE-2009;Clade IV)__AIT17127__SP-HsALB_NP(2-569) (opt5)
aggagagucccgcagucggcguccagcggcucugcuuguucgugugugugucguugcaggccuuauucaagcuuaccaugaagugggugaccuucaucagccugcucuuucuguucuccucugccuacagcagcgccuccaaggagaucaaaucuuuccuguggacccagagccucagacgggaacuguccggcuacugcucuaacauuaagcugcaaguggucaaagacgcucaggcccugcuccacgggcuggauuuuagcgagguuuccaaugugcagcgccuuaugagaaaggaacggcgcgacgauaacgaccugaaaagacuccgggaucugaaucaggcggugaacaaucuggucgagcucaagucuacacaacaaaagagcauccugcgcgugggaacgcuuaccuccgacgaucugcucauucuggcugccgaccuugaaaaacuuaagagcaaaguuaucagaacagagcggccccucucugccggcguguauauggggaaccuguccagccagcagcuggaucagcgcagagcucuccugucuaugauuggaauguccggcgggaaucagggaguccgggccggcaaggacggcgugguucgcgugugggaugucaaaaacgcugagcuucugaauaaccaguucgggaccaugccuagccucacacuggccugucuuaccaagcagggacaaguggaccugaaugaugcggugcaggcccucacagaccugggccugaucuacaccgcuaaguauccgaacacgucugaccucgauagacugacccagucccaucccauccuuaauaugauugacaccaaaaagagcucccugaacaucucuggguacaauuuuagccucggagccgcugucaaagccggcgcgugcaugcuggaugggggaaacaugcuugaaacaauuaagguuuccccucaaacaauggacggcauccugaaaagcauucucaaggugaaaaaggcccugggcauguucaucucugauacccccggggagcggaacccuuaugaaaauauucuguacaagaucugucucuccggagacggcuggcccuauaucgcuagccgcacgucuauuacagggagagccugggagaacaccguggucgaucuggagagcgacggaaaaccucagaaggcuggcuccaauaacucuaauaaaagccuucaguccgccggguuuacagccggacugaccuacagccagcucaugacccugaaggaugcuaugcugcaacuugacccgaacacaaaaacguggauggauaucgaaggccggcccgaggacccuguggaaauugcgcucuaccagcccucuuccggcugcuauauccacuucuuuagagagccuaccgaccugaagcaguucaagcaggaugccaaauacagccaugggauugacguuacagaucuguuugcugcccaacccggacucaccucugccgugaucgacgcucugccgcgcaauauggucaucacaugucagggcuccgaugacauucggaaacuucuggaaagccaggggagaaaggauaucaagcucauugacaucgcccugaacaaaaccgauucccgcaaguaugagaaugcggugugggaccaguacaaggaucugugccacaugcauacgggaguuguggucgagaaaaagaaacggggcgggaaggaagagauuacaccucacugugcucuuauggacugcaucauguucgaugccgccgugucuggcggacucaacaccagcguccugagagcugugcugccccgcgacaugguuuuucggaccuccacaccuagagugguccucugaggacuagucccuguucccagagcccacuuuuuuuucuuuuuuugaaauaaaauagccugucuuucagaucucaaaggcucuuuucagagccaccaaaaaaaaaaaaaaaaaaaaaaaaaaaaaaaaaaaaaaaaaaaaaaaaaaaaaaaaaaaaaaaaaaaaaaaaaaaaaaaaaaaaaaaaaaaaaaaaaaaaa

SEQ ID NO: 19662 - RNA, 2033 nt, Artificial Sequence
  mRNA product Design a-1 (hSL-A100) comprising derived and/or modified sequence from LASV(G733-SLE-2010;Clade IV)__AIT17155__SP-HsALB_NP(2-569) (opt5)
aggagagucccgcagucggcguccagcggcucugcuuguucgugugugugucguugcaggccuuauucaagcuuaccaugaagugggugaccuucaucagccugcucuuucuguucuccucugccuacagcagcgccuccaaggagaucaaaucuuuccuguggacccagagccucagacgggaacuguccggcuacugcucuaacauuaagcugcaaguggucaaagacgcucaggcccugcuccacgggcuggauuuuagcgagguuuccaaugugcagcgccuuaugagaaaggaacggcgcgacgauaacgaccugaaaagacuccgggaucugaaucaggcggugaacaaucuggucgagcucaagucuacacaacaaaagagcgugcugcgcguuggaacgcuuaccuccgacgaacugcucgugcuggcugccgaucuugagaaacuuaagagcaaagucaucagaacagagcggccccucucugccggcguguauauggggaaccuguccagccagcagcuggaccagcgcagagcucuccugucuaugauuggaauguccggcgggaaucagggagcccggaccggccgcgauggcguugugagagucugggacgugaagaacgcugaacuucugaauaaccaguucgggacaaugccuagccucacccuggccugucuuacaaaacagggacaaguggaucugaaugacgcgguccaggcccucaccgaucugggccugaucuacacggcuaaguauccgaacaccucugaccucgaccggcugacacagucccaucccauucuuaauaugaucgauaccaagaaaagcucccugaacaucucuggguacaauuuuagccucggagccgcuguuaaggccggcgcgugcaugcuggacgggggaaacaugcuugagacaauuaaaguguccccucaaaccauggauggcauccucaagagcauucugaaagugaagaaagcccugggcauguucaucucugacacgcccggggaacgcaacccuuaugagaauauucuguacaagaucugucucuccggagauggcuggcccuauauugcuagcagaacaucuaucaccgggcgggccugggagaacacagucguggaccuggaaagcgauggaaagccucagaaagcuggcuccaauaacucuaauaagagccuucaguccgccggguuuaccgccggacugaccuacagccagcucaugacacugaaagacgcuaugcugcaacuugauccgaacgcgaagacguggauggacaucgagggcagacccgaagauccuguugagauugcccucuaccagcccucuuccggcugcuauauccacuucuuucgcgaaccuaccgaccugaaacaguucaagcaggacgcuaaguacagccaugggauugaugugacagaccuguuugccgcccaacccggacucaccucugcugucaucgaugcccugccgcggaauauggugauuacaugucagggcuccgacgauaucagaaaacuucuggagagccaggggcgcaaggacaucaaacucauugauaucgcgcuguccaagauugacucucggaaauaugagaacgcuguuugggaucaguacaaggaccugugccacaugcauaccggaguggucguggaaaagaaaaagagaggcgggaaagaggaaaucacgccucacugugcccuuauggauugcauuauguucgacgccgcugucagcggcggacucaauucccuggugcugcgcgccguucucccccgggauaugguguuuagaacaucuaccccucgcgucgugcugugaggacuagucccuguucccagagcccacuuuuuuuucuuuuuuugaaauaaaauagccugucuuucagaucucaaaggcucuuuucagagccaccaaaaaaaaaaaaaaaaaaaaaaaaaaaaaaaaaaaaaaaaaaaaaaaaaaaaaaaaaaaaaaaaaaaaaaaaaaaaaaaaaaaaaaaaaaaaaaaaaaaaa

SEQ ID NO: 19663 - RNA, 2033 nt, Artificial Sequence
  mRNA product Design a-1 (hSL-A100) comprising derived and/or modified sequence from MOPV/LASV reassortant(IGS-1;Clade IV)__AFY05578__SP-HsALB_NP(2-569) (opt5)
aggagagucccgcagucggcguccagcggcucugcuuguucgugugugugucguugcaggccuuauucaagcuuaccaugaagugggugaccuucaucagccugcucuuucuguucuccucugccuacagcagcgccuccaaggagaucaaaucuuuccuguggacccagagccucagacgggaacuguccggcuacugcucuaacauuaaacuucaaguggucaaggacgcucaggcccugcuccacgggcuggauuuuagcgagguuuccaaugugcagcgccuuaugagaaaggaacggcgcgacgauaacgaccugaaaagacuccgggaucugaaucaggcggugaacaaucuggucgagcucaagucuacacaacaaaagagcauccugcgcgugggaacgcuuaccuccgacgaucugcucauucuggcugccgaccuugaaaaacugagaagcaagguuauccggacagagcgcccccucucugccggcguguauauggggaaccuguccagccagcagcuggaucagagacgggcucuccugaauaugauuggaaugucuggcgggaaccagggagcccgcgcuggcagagacggcgucgugcggguuugggaugugaaaaaugccgagcuucuguccaaccaguucgggaccaugccuagccucacacuggcgugucuuaccaagcagggacaagucgaccugaaugaugccgugcaggcucucacagaccugggccugaucuacaccgccaaauauccgaacacgucugaccucgaucgccugacccagucccaucccauccuuaauaugauugacacaaagaaaagcucccugaacaucucuggguacaauuuuagccucggagcugccgugaaggcgggcgccugcaugcuggaugggggaaacaugcuugaaaccauuaaggucuccccucaaacaauggacggcauccugaaaagcauucucaagguuaaaaaggcucugggcauguucaucucugauacccccggggagagaaacccuuaugaaaauauucuguacaaaaucugucucuccggagacggcuggcccuauaucgccagccggacgucuauuacagggagagcuugggagaacaccgugguggaucuggagagcgacggaaagccucagaaggccgauuccaauaacucuagcaaaucccuucagagcgccggcuuuacagcugggcugaccuacucucagcucaugacccugaaggacgcgaugcugcaacuugauccgaaugccaaaacauggauggacaucgaaggacgccccgaggacccugucgaaauugcucucuaccagcccuccagcggcugcuauauccacuucuuucgggagccuacggaucugaagcaguucaaacaggacgccaaguacucucauggcauugaugugaccgaccuguuugccacacaacccgggcucaccuccgcuguuaucgaugcccugccgagaaacauggugaucacaugucagggaagcgacgauauucgcaaacuucuggaaucccagggccggaaggacaucaagcucauugauaucgaccugucuaaaaccgauagcagaaaguaugagaaugcggucugggaccaguacaaagaucugugccacaugcauacgggggugguuguggagaagaagaaacgcggaggcaaggaagagauuacaccucacugugcucuuauggacugcaucauguucgacgccgccgucuccgggggccucaacaccucugugcugcgggcuguccugcccagagauaugguguuucgcaccagcacaccucggguugugcucugaggacuagucccuguucccagagcccacuuuuuuuucuuuuuuugaaauaaaauagccugucuuucagaucucaaaggcucuuuucagagccaccaaaaaaaaaaaaaaaaaaaaaaaaaaaaaaaaaaaaaaaaaaaaaaaaaaaaaaaaaaaaaaaaaaaaaaaaaaaaaaaaaaaaaaaaaaaaaaaaaaaaa

SEQ ID NO: 19664 - RNA, 2033 nt, Artificial Sequence
  mRNA product Design a-1 (hSL-A100) comprising derived and/or modified sequence from LASV(LM765-SLE-2012;Clade IV)__AIT17815__SP-HsALB_NP(2-569) (opt5)
aggagagucccgcagucggcguccagcggcucugcuuguucgugugugugucguugcaggccuuauucaagcuuaccaugaagugggugaccuucaucagccugcucuuucuguucuccucugccuacagcagcgccuccaaggagaucaaaucuuuccuguggacccagagccucagacgggaacuguccggcuacugcucuaacauuaagcugcaaguggucaaagacgcucaggcccugcuccacgggcuggauuuuagcgagguuuccaaugugcagcgccuuaugagaaaggaacggcgcgacgauaacgaccugaaaagacuccgggaucugaaucaggcggugaacaaucuggucgagcucaagucuacacaacaaaagagcauccugcgcgugggaacgcuuaccuccgacgaucugcucauucuggcugccgaccuugaaaaacuuaagagcaaaguuacaagaaccgagcggccccucucugccggcguguauauggggaaccuguccagccagcagcuggaucagcgcagagcucuccuggacaugaucggaaugucuggcuccaaucagggggcccgggcuggacgcgauggcgucgugagaguuugggacgugaagaacgccgagcuucugaauaaccaguucggcacaaugccuagccucacccuggcgugucuuacaaaacaggggcaagucgaucugaaugacgccgugcaggcucucaccgaccugggacugauuuacacggccaaguauccgaacaccucugaucucgaccggcugacacagucccaucccauccuuaauaugaucgauaccaagaaaagcucccugaacauuucuggcuacaauuuuagccucggggcugccgugaaggcgggagccugcaugcuggacggcgggaacaugcuugaaacaaucaaagucuccccucaaaccauggauggcauucucaagagcauccugaaaguuaagaaagcucugggaauguucauuucugacgcccccggcgagcgcaacccuuaugaaaauauccuguacaagauuugucucuccggggauggauggcccuauaucgcuagcagaacgucuaucacaggccgggccugggagaacaccgugguggaccuggagagcgaugggaagccucagaaagccggauccaauggcucuaacaagagccuucaguccgcuggguuuacagcgggacugaccuacagccagcucaugacccugaaagacgccaugcugcaacuugauccgaaugcuaagacauggauggacauugaaggcagacccgaggacccugucgaaaucgcccucuaccagcccucuuccggcugcuauauucacuucuuucgcgagccuacggaucugaaacaguucaagcaggacgccaaguacagccaugggaucgaugugaccgaccuguuugcugcccaacccggacucacaucugcgguuauugaugcucugccgcggaacauggugaucaccugucagggcuccgacgauaucagaaaacuuuucgaaagccaggggcgcaaggacauuaaacugaucgauauugcccucuccaagacagacucucggaaauaugagaaugccgucugggaucaguacaaggaccugugccacaugcauaccggaaucgugguugagaagaaaaagagaggcgggaaagaagagauuacgccucacugugcucugauggauugcaucauguuugacgccgcugugagcggcggacuuaacacauccguccuccgcgccgugcugccccgggacauggucuucagaaccucuaccccucgcgugguucugugaggacuagucccuguucccagagcccacuuuuuuuucuuuuuuugaaauaaaauagccugucuuucagaucucaaaggcucuuuucagagccaccaaaaaaaaaaaaaaaaaaaaaaaaaaaaaaaaaaaaaaaaaaaaaaaaaaaaaaaaaaaaaaaaaaaaaaaaaaaaaaaaaaaaaaaaaaaaaaaaaaaaa

SEQ ID NO: 19665 - RNA, 2033 nt, Artificial Sequence
  mRNA product Design a-1 (hSL-A100) comprising derived and/or modified sequence from LASV(LM776-SLE-2012;Clade IV)__AIT17825__SP-HsALB_NP(2-569) (opt5)
aggagagucccgcagucggcguccagcggcucugcuuguucgugugugugucguugcaggccuuauucaagcuuaccaugaagugggugaccuucaucagccugcucuuucuguucuccucugccuacagcagcgccuccaaggagaucaaaucuuuccuguggacccagagccucagacgggaacuguccucuuacugcagcaacauuaaacuucaaguggucaaggacgcucaggcccugcuccacggccuggauuuuuccgagguuucuaaugugcagcgccuuaugagaaaggaacggcgcgacgauaacgaccugaaaagacuccgggaucugaaucaggcggugaacaaucuggucgagcucaagagcacacaacagaaguccauccugcgcguggggacgcuuaccagcgacgaucugcucauucuggcugccgaccuugaaaaacugaagucuaaaguuacaagaaccgagcggccccucuccgccggaguguauaugggcaaccugagcucucagcagcuggaucaacgcagagcucuccuguccaugaucgggaugagcggaucuaaucagggcgcccgggcugggcgcgacggagucgugagaguuugggaugugaagaacgccgagcuucugaauaaccaguucggcacaaugccuucccucacccuggcgugucuuacaaaacagggccaagucgaccugaaugaugccgugcaggcucucaccgaccuggggcugauuuacacggccaaguauccgaacaccagcgaccucgaucggcugacacagucccaucccauccuuaauaugaucgacaccaagaaaucuagccugaacauuuccggauacaauuuuagccucggcgcugccgugaaggcgggggccugcaugcuggauggaggcaacaugcuugaaacaaucaaagucucuccucaaaccauggacgggauucugaaguccauccucaaaguuaagaaagcucugggaauguucauuagcgauacgcccggcgagcgcaacccuuaugaaaauauccuguacaagauuugucucucuggcgacggguggcccuauaucgccagcagaacauccaucaccggacgggcuugggagaacacagugguggaucuggagucugacggcaagccucagaaagccgggagcaauaacuccaauaagagccuucagucugccggauuuaccgcuggccugaccuacucccagcucaugacacugaaagaugcgaugcugcaacuugacccgaacgccaagacguggauggauauugaagggagacccgaggacccugucgaaguggcucucuaccagcccagcucuggaugcuauauccacuucuuucgcgagccuaccgaccugaaacaguucaagcaggaugccaaguacucccauggcauugacguuacagaucuguuugccgcucaacccggccucaccagcgccgugaucgacgcgcugccgcggaauauggucauuacaugucagggguccgaugacaucagaaaacuucuggaaucucagggacgcaaggauaucaaacucauugacaucgcucugagcaagaccgauucccggaaauaugagaacgccgugugggaccaguacaaggaucugugccacaugcauacgggcguuguggucgagaagaaaaagagagggggaaaagaagagauuacaccucacugugcccuuauggacugcaucauguucgaugcugccgugucuggcgggcucaauaccagcguccugcgcgcugugcugccccgggacaugguuuuuagaaccuccacaccucgcgugguccucugaggacuagucccuguucccagagcccacuuuuuuuucuuuuuuugaaauaaaauagccugucuuucagaucucaaaggcucuuuucagagccaccaaaaaaaaaaaaaaaaaaaaaaaaaaaaaaaaaaaaaaaaaaaaaaaaaaaaaaaaaaaaaaaaaaaaaaaaaaaaaaaaaaaaaaaaaaaaaaaaaaaaa

SEQ ID NO: 19666 - RNA, 2033 nt, Artificial Sequence
  mRNA product Design a-1 (hSL-A100) comprising derived and/or modified sequence from LASV(Mad39;Clade IV)__ANH09723__SP-HsALB_NP(2-569) (opt5)
aggagagucccgcagucggcguccagcggcucugcuuguucgugugugugucguugcaggccuuauucaagcuuaccaugaagugggugaccuucaucagccugcucuuucuguucuccucugccuacagcagcgccuccaaggagaucaaaucuuuccuguggacccagagccucagacgggaacuguccggcuacugcucuaacauuaagcugcaaguggucaaagacgcucaggcccugcuccacgggcuggauuuuagcgagguuuccaaugugcagcgccuuaugagaaagcagcggcgcgacgauaacgaccugaaaagacuccgggaucugaaucaagcggugaacaaucuggucgaacucaagucuacacagcaaaagagcgugcugcgcguuggaacgcuuaccuccgacgaucugcucacacuggcugccgaccuugagaaacuuaagagcaaagugaccagaacagaacggccccucaccgccggcgucuauauggggaaccugucuucccagcagcuggaucagcgcagagcucuccugaauaugaucggaaugagcggcgggaaccagggagcccggacaggccgcgacggcgugguuagagugugggaugucaagaaugcugagcuucugaacaaucaguucgggaccaugccuucucucacgcuggccugucuuaccaaacaaggacagguggaccugaacgaugugguccaggcgcucacagaccugggccugauuuacaccgccaaguauccgaauacauccgaccucgaucggcugacccaaagccaucccauccuuaacaugauugacacgaauaagucuucccugaacaucagcggguacaacuuuucccucggagcugccguuaaagcuggcgccugcaugcuggaugggggaaauaugcuugagacaaucaaggugucuccucagaccauggacggcauucugaaaagcauccucaaggugaaaaagucccugggcauguucauuagcgauacacccggggaacgcaacccuuaugagaauauccuguacaaaauuugucucucuggagacggcuggcccuauaucgcguccagaaccagcauuaccgggcgggccugggaaaacacagucguggaucuggagucuggaggcaagccucagaaggcugggagcaauaacuccaauaaaucucuucagagcgccggauuugcugccggccugacguacucccaacucaugacccugaaggacgccaugcugcagcuugauccgaacgcuaaaacauggauggacaucgagggcagacccgaagauccuguugagaucgcgcucuaccagcccauuagcgggugcuauauccacuucuuucgcgaaccuaccgaccugaagcaguucaaacaagacgccaaguacucucauggaauugaugugacagaccuguuugcugcccagcccggccucaccuccgccgucaucgaggcucugccgcggaauauggugauuacgugucaggggagcgaugacaucagaaaacuuuucgaaucucagggacgcaaggauaucaagcugauugacaucgcccucuccaaaacagauagccggaaguaugagaacgcgguuugggaccaauacaaagaucugugccacaugcauaccggcguggucguggagaagaagaaaaagggcgggaaagaagagauuaccccucacugugcucugauggacugcaucauguuugaugccgccgucuccggaggccuuaauacacucgugcugagagcuguucugccccgcgacaugguguuccggaccucuacaccuaaggucgugcucugaggacuagucccuguucccagagcccacuuuuuuuucuuuuuuugaaauaaaauagccugucuuucagaucucaaaggcucuuuucagagccaccaaaaaaaaaaaaaaaaaaaaaaaaaaaaaaaaaaaaaaaaaaaaaaaaaaaaaaaaaaaaaaaaaaaaaaaaaaaaaaaaaaaaaaaaaaaaaaaaaaaaa

SEQ ID NO: 19667 - RNA, 2033 nt, Artificial Sequence
  mRNA product Design a-1 (hSL-A100) comprising derived and/or modified sequence from LASV(Z0947-SLE-2011;Clade IV)__AIT17841__SP-HsALB_NP(2-569) (opt5)
aggagagucccgcagucggcguccagcggcucugcuuguucgugugugugucguugcaggccuuauucaagcuuaccaugaagugggugaccuucaucagccugcucuuucuguucuccucugccuacagcagcgccuccaaggagaucaaaucuuuccuguggacccagagccucagacgggaacuguccggcuacugcucuaacauuaagcugcaaguggucaaagacgcucaggcccugcuccacgggcuggauuuuagcgagguuuccaaugugcagcgccuuaugagaaaggaacggcgcgacgauaacgaccugaaaagacuccgggaucugaaucaggcggugaacaaucuggucgagcucaagucuacacaacaaaagagcauccugcgcgugggaacgcuuaccuccgacgaucugcucauucuggcugccgaccuugaaaaacuuaagagcaaaguuacaagaaccgagcggccccucucugccggcguguauauggggaaccuguccagccagcagcuggaucagcgcagagcucuccugaauaugaucggaaugucuggcuccaaccagggggcccggacaggacgcgacggcgucgugagaguuugggaugugaagaaugcugagcuucugaacaaucaguucggcaccaugccuagccucacacuggccugucuuaccaaacaggggcaagucgaccugaacgaugcggugcaggcccucacggaccugggacugauuuacaccgcuaaguauccgaauacaucugaccucgaucggcugacccagucccaucccauccuuaacaugaucgacacaaagaaaagcucccugaauauuucuggcuacaacuuuagccucggggccgcugugaaggccggagcgugcaugcuggauggcgggaacaugcuugaaaccaucaaagucuccccucaaacgauggacggcauucucaagagcauccugaaaguuaagaaagcccugggaauguucauuucugaugcucccggcgagcgcaauccuuaugaaaacauccuguacaagauuugucucuccggggacggauggcccuauaucgccagcagaacaucuaucaccggccgggcuugggagaauacagugguggaucuggagagcgacgggaagccucagaaagccggauccaacggcucuaauaagagccuucaguccgccggguuuaccgcuggacugaccuacagccagcucaugacacugaaagaugcgaugcugcaacuugacccgaacgccaagacguggauggauauugaaggcagacccgaggacccugucgaaaucgcucucuaccagcccucuuccggcugcuauauucacuucuuucgcgagccuaccgaccugaaacaguucaagcaggaugccaaguacagccaugggaucgacgugacagaucuguuugccgcucaacccggacucaccucugccguuauugacgcgcugccgcggaauauggugaucacaugucagggcuccgaugacaucagaaaacuuuucgaaagccaggggcgcaaggauauuaaacugaucgacauugcucucuccaagaccgauucucggaaauaugagaacgccgucugggaccaguacaaggaucugugccacaugcauacgggaaucgugguugagaagaaaaagagaggcgggaaagaagagauuacaccucacugugcccugauggacugcaucauguuugaugcugccgugagcggcggacuuaauaccuccguccuccgcgcugugcugccccgggacauggucuucagaaccucuacaccucgcgugguucugugaggacuagucccuguucccagagcccacuuuuuuuucuuuuuuugaaauaaaauagccugucuuucagaucucaaaggcucuuuucagagccaccaaaaaaaaaaaaaaaaaaaaaaaaaaaaaaaaaaaaaaaaaaaaaaaaaaaaaaaaaaaaaaaaaaaaaaaaaaaaaaaaaaaaaaaaaaaaaaaaaaaaa

SEQ ID NO: 19668 - RNA, 2009 nt, Artificial Sequence
  mRNA product Design a-1 (A100) comprising derived and/or modified sequence from LASV(Josiah;Clade IV)__NP_694869__SP-HsALB_NP(2-569) (opt1)
aggagagucccgcagucggcguccagcggcucugcuuguucgugugugugucguugcaggccuuauucaagcuuaccaugaagugggugaccuucaucagccugcucuuccuguucuccagcgccuacuccagcgccuccaaggagaucaagagcuuccuguggacccagucccuccgccgggagcugagcggcuacugcuccaacaucaagcuccagguggucaaggacgcccaggcgcugcugcacgggcuggacuucagcgagguguccaacgugcagcgccucaugcggaaggagcgccgggacgacaacgaccugaagcgccugcgggaccucaaccaggccgucaacaaccugguggagcucaagagcacccagcagaaguccauccugcgcgugggcacccugaccagcgacgaccugcucauccuggccgccgaccuggagaagcucaaguccaaggucauccggaccgagcgcccccugagcgccgggguguacaugggcaaccuguccagccagcagcucgaccagcggcgcgcgcugcugaacaugaucgggauguccggcggcaaccagggggcccgggccggccgcgacggggugguccgggugugggacgugaagaacgccgagcuccugaacaaccaguucggcaccaugccgagccugacgcucgcgugccugaccaagcaggggcaggucgaccugaacgacgccgugcaggcccucaccgaccugggccugaucuacaccgccaaguaccccaacacguccgaccucgaccgccugacccagagccaccccauccugaacaugaucgacaccaagaaguccagccucaacaucagcggcuacaacuucucccugggggccgcggugaaggccggcgccugcaugcuggacgggggcaacaugcucgagaccaucaaggucagcccccagacgauggacggcauccugaaguccauccugaaggugaagaaggcccucgggauguucaucagcgacaccccgggcgagcggaaccccuacgagaacauccuguacaagaucugccuguccggggacggcuggcccuacaucgccagccgcaccuccaucaccgggcgggcgugggagaacacgguggucgaccucgagagcgacggcaagccccagaaggccgacuccaacaacagcuccaagagccugcaguccgccggcuucaccgccgggcugaccuacagccagcucaugacccugaaggacgccaugcugcagcuggacccgaacgcgaagacguggauggacaucgagggccgccccgaggaccccguggagaucgcccucuaccagcccuccagcgggugcuacauccacuucuuccgggagccgaccgaccugaagcaguucaagcaggacgccaaguacucccacggcaucgacgugaccgaccuguucgccacccagcccgggcucacgagcgccgucaucgacgcgcugccccgcaacauggugaucacgugccagggcuccgacgacauccgcaagcugcucgagagccagggccggaaggacaucaagcugaucgacaucgcccugagcaagaccgacucccgcaaguacgagaacgccgugugggaccaguacaaggaccucugccacaugcacaccggggucguggucgagaagaagaagcggggcgggaaggaggagaucaccccgcacugcgcccugauggacugcaucauguucgacgcggccgugagcggcgggcugaacaccuccgugcuccgcgccguccugccccgggacaugguguuccgcaccagcacgccccgggugguccugugaggacuagucccuguucccagagcccacuuuuuuuucuuuuuuugaaauaaaauagccugucuuucagaucuaaaaaaaaaaaaaaaaaaaaaaaaaaaaaaaaaaaaaaaaaaaaaaaaaaaaaaaaaaaaaaaaaaaaaaaaaaaaaaaaaaaaaaaaaaaaaaaaaaaa

SEQ ID NO: 19669 - RNA, 2009 nt, Artificial Sequence
  mRNA product Design a-1 (A100) comprising derived and/or modified sequence from LASV(LP;Clade I)__AAF86702__SP-HsALB_NP(2-569) (opt1)
aggagagucccgcagucggcguccagcggcucugcuuguucgugugugugucguugcaggccuuauucaagcuuaccaugaagugggugaccuucaucagccugcucuuccuguucuccagcgccuacuccagcaacuccaaggagaucaagagcuuccuguggacccagucccuccgccgggagcugagcggcuacugcuccaacaucaagcuccagguggucaaggacgcccaggcccugcugcacgggcuggacuucagcgagguguccaacgugcagcgccucaugcggaagcagaagcgcgacgacgcggaccugaagcggcugcgcgaccucaaccaggccgucaacaaccugguggagcucaagagcacccagcagaagaacgugcugcgggucggcacgcuguccagcgacgaccugaucacccucgccgccgaccuggagaagcugaaguccaaggugauccgcaccgagcggccccucagcuccgggguguacaugggcaaccugagcucccagcagcuggaccagcgccgggcccuccugagcaugaucgggauguccggcggcccgcaggggaaccgcaccggcggggacggcgucgugcgggugugggacgucaagaacgcggagcugcucaacaaccaguucgggacgaugcccagccugacccuggccugccucaccaagcagggccagguggaccugaacgacgccgugcaggcccugaccgaccucggccugaucuacacggcgaaguaccccaacuccagcgaccuggacaugcucacccagagccaccccauccuggggauggucgacaccaagaaguccagccugaacaucuccggcuacaacuucagccucggggccgccgugaaggccggcgccugcaugcuggacggcgggaacaugcuggagaccaucaagguguccccgcagacgauggacggcauccucaagagcauccugaaggucaagcgcucccuggggauguucaucagcgacacccccggcgagcggaaccccuacgagaacauccucuacaagaucugccuguccggggagggcuggcccuacaucgcgagccgcaccuccaucaccggccgggccugggagaacacgcugguggaccucgagagcgacaacaagccgcccaagcugaacuccgccgggagcaacaagucccugcaggccgccggccucaacgcggggcugaccuacagccagcugaugacccugaaggacugcaugcuccagcuggaccccuccagcaagaccuggaucgacaucgagggccgccccgaggacccgguggagaucgcccuguuccagcccuccagcgggugcuacauccacuucuuccgggagcccacggaccucaagcaguucaagcaggacgccaaguacagccacggcaucgacgucaccgaccuguucuccacccagcccggccugaccagcgccgugaucgaggcccucccgcgcaacauggugcugacgugccagggguccgacgacaucaagaagcugcucgagagccagggccggcgcgacaucaagcugaucgacaucucccugagcaaggcggacucccgcaaguucgagaacgccgucugggaccaguacaaggaccucugccacaugcacaccgggguggucguggagaagaagaagcggggcgggaaggaggagaucacgccccacugcgcccugcuggacugcaucauguucgacgccgccaccaccggcagccucaacaucaccacccugcgcgcggugcugccccgggacauggucuuccgcaccuccacgcccaagguggugcucugaggacuagucccuguucccagagcccacuuuuuuuucuuuuuuugaaauaaaauagccugucuuucagaucuaaaaaaaaaaaaaaaaaaaaaaaaaaaaaaaaaaaaaaaaaaaaaaaaaaaaaaaaaaaaaaaaaaaaaaaaaaaaaaaaaaaaaaaaaaaaaaaaaaaa

SEQ ID NO: 19670 - RNA, 2009 nt, Artificial Sequence
  mRNA product Design a-1 (A100) comprising derived and/or modified sequence from LASV(803213;Clade II)__AAF86704__SP-HsALB_NP(2-569) (opt1)
aggagagucccgcagucggcguccagcggcucugcuuguucgugugugugucguugcaggccuuauucaagcuuaccaugaagugggugaccuucaucagccugcucuuccuguucuccagcgccuacuccagcgccuccaaggaggugaaguccuuccuguggacccagagccuccgccgggagcugagcggcuacugcuccaacaucaagcugcaggucgugaaggacgcccaggcgcuccugcacgggcuggacuucagcgaggugaacaacguccagcgccucaugcggaagcagaagcgcgacgacggcgaccugaagcggcugcgcgaccucaaccaggccgugaacaaccugguggagcugaaguccacccagcagaaguccauccuccgggucgggacgcugaccagcgacgaccugcucacccuggccgccgaccuggagaagcucaagagcaaggugauccgcaccgagcggccccuguccagcggcguguacauggggaaccuguccacgcagcagcucgagcagcgccgggcccugcugaacaugaucggcauggucggcggggcgcagggcacccagccggggcgcgacggcguggugcgggucugggacgugaagaaccccgaccuccugaacaaccaguucgggaccaugcccagccugacccucgccugccugacgaagcagggccagguggaccugaacgacgccguccucgcccugaccgaccugggccucaucuacaccgcgaaguaccccaacuccagcgaccuggaccgccugucccagagccacccgauccucaacaugguggacaccaagaaguccagccugaacaucagcggguacaacuucucccugggcgccgccgugaaggccggggccugcaugcucgacggcggcaacaugcuggagacgaucaaggucacgccccagaccauggacgggauccucaagagcauccugaaggugaagcggucccugggcauguucgugagcgacacccccggggagcgcaaccccuacgagaacauccuguacaagaucugccucuccggcgacggguggccguacaucgcgagccggaccuccaucgucggccgcgccugggagaacaccaccguggaccuggagagcgacggcaagccccagaagguggggaccgccggcuccaacaagagccugcaguccgccggguuccccacgggccucaccuacagccagcugaugacccugaaggacuccaugaugcagcuggaccccagcgccaagaccuggaucgacaucgaggggcggccggaggaccccgucgagaucgcgcucuaccagcccauguccggcugcuacauccacuucuuccgcgagcccacggaccugaagcaguucaagcaggacgccaaguacagccacggcaucgacguggccgaccuguucccggcccagcccgggcucaccuccgccgucaucgaggcgcugccccggaacauggugcugaccugccagggcagcgacgacaucaagaagcuccuggacucccaggggcgccgcgacaucaagcugaucgacaucagccucagcaagguggacucccggaaguucgagaacgccgucugggaccagugcaaggaccugugccacaugcacaccggcgugguggucgagaagaagaagcgcgggggcaaggaggagaucacgccccacugcgcccugauggacugcaucauguucgacgccgccgugagcggcgggcucaacaucccggugcugcgggcgguccugccccgcgacaugguguuccggaccuccagccccaaggugguccucugaggacuagucccuguucccagagcccacuuuuuuuucuuuuuuugaaauaaaauagccugucuuucagaucuaaaaaaaaaaaaaaaaaaaaaaaaaaaaaaaaaaaaaaaaaaaaaaaaaaaaaaaaaaaaaaaaaaaaaaaaaaaaaaaaaaaaaaaaaaaaaaaaaaaa

SEQ ID NO: 19671 - RNA, 2012 nt, Artificial Sequence
  mRNA product Design a-1 (A100) comprising derived and/or modified sequence from LASV(GA391;Clade III)__CAA36646__SP-HsALB_NP(2-570) (opt1)
aggagagucccgcagucggcguccagcggcucugcuuguucgugugugugucguugcaggccuuauucaagcuuaccaugaagugggugaccuucaucagccugcucuuccuguucuccagcgccuacuccagcgccuccaaggaggugcgcagcuuccuguggacccagucccuccggcgcgagcugagcggcuacugcuccaacaucaagcugcaggucgugaaggacgcccaggcgcuccugcacgggcuggacuucagcgagguguccaacguccagcggcucaugcgcaagcagaagcgggacgacggcgaccugaagcgccugcgggaccucaaccaggccgugaacaaccugguggagcucaagagcacccagcagaaguccguccugcgcguggggacccugagcuccgacgaccugcucauccuggccgccgaccuggagaagcucaagagcaaggugacccggaccgagcgcccccuguccagcggcgucuacauggggaaccuguccagccagcagcucgaccagcggcgcgcccugcugaacaugaucggcaugaccggcguguccgggggcgggaagggcgcgagcgacgggaucgugcgggucugggacgugaagaacgccgagcuccugaacaaccaguucggcacgaugccgucccugacccucgccugccugaccaagcagggccagguggaccugaacgacgccguccaggcgcucaccgaccuggggcugaucuacacggccaaguaccccaacagcagcgaccucgaccgccugucccagagccaccccauccugaacaugaucgacaccaagaaguccagccucaacaucuccggcuacaacuucagccugggggccgccgugaaggccggcgcgugcaugcuggacggcgggaacaugcucgagaccaucaaggugagcccccagaccauggacggcauccucaaguccauccugaaggucaagaagucccuggggauguucgugagcgacacgccgggcgagcggaaccccuacgagaacauccuguacaagaucugccuguccggggacggcuggcccuacaucgccagccgcaccuccaucgugggccgggccugggagaacaccgucguggaccucgagcaggacaacaagccccagaagaucgggaacggcgggagcaacaagucccugcagagcgccggcuucgccgcggggcugaccuacucccagcucaugacgcugaaggacuucaagugcuucaaccugaucccgaacgccaagaccuggauggacaucgagggccgccccgaggaccccguggagaucgcccuguaccagcccagcuccggcugcuacguccacuucuuccgggagccgaccgaccucaagcaguucaagcaggacgccaaguacagccacgggaucgacgugaccgaccuguucgccgcgcagcccggccugacgagcgccgucaucgaggcccucccccgcaacauggugaucacgugccagggguccgaggacauccggaagcugcuggagagccagggccgccgcgacaucaagcucaucgacaucacccuguccaaggccgacagccggaaguucgagaacgccgugugggaccaguucaaggaccugugccacaugcacaccggggucgugguggagaagaagaagcgcggcggcaaggaggagaucacgccccacugcgcgcucauggacugcaucauguucgacgccgccgucuccgggggccuggacgccaaggugcugcgggugguccucccgcgcgacaugguguuccggaccagcacccccaaggugguccugugaggacuagucccuguucccagagcccacuuuuuuuucuuuuuuugaaauaaaauagccugucuuucagaucuaaaaaaaaaaaaaaaaaaaaaaaaaaaaaaaaaaaaaaaaaaaaaaaaaaaaaaaaaaaaaaaaaaaaaaaaaaaaaaaaaaaaaaaaaaaaaaaaaaaa

SEQ ID NO: 19672 - RNA, 2009 nt, Artificial Sequence
  mRNA product Design a-1 (A100) comprising derived and/or modified sequence from LASV(AV;Clade V)__CCA30315__SP-HsALB_NP(2-569) (opt1)
aggagagucccgcagucggcguccagcggcucugcuuguucgugugugugucguugcaggccuuauucaagcuuaccaugaagugggugaccuucaucagccugcucuuccuguucuccagcgccuacuccagcgccuccaaggaggugaaguccuuccuguggacccagagccuccgccgggagcugagcggcuacugcuccaacaucaagcugcaggucgugaaggacgcccaggcgcuccugcacgggcuggacuucagcgagguguccaacguccagcgccucaugcggaagcagcgccgggacgacagcgaccugaagcgccugcgggaccucaaccaggccgugaacaaccugguggagcugaaguccacccagcagaaguccguccuccgcgugggcacgcugagcagcgacgaccugcucacccuggccgccgaccuggagaagcucaaguccaaggugacccggaccgagcgcccccugagcuccggggucuacaugggcaaccugagcucccagcagcucgaccagcggcgcgcccugcugaaccucaucgggaugacgaacggcagccagggcucccaggcggggcgggacggcguggugcgcgucugggacgugaagaacgccgagcugcugaacaaccaguucgggaccaugccgagccucacccuggccugccugaccaagcagggccagguggaccucaacgacgucgugcaggcccugacggaccuggggcucaucuacaccgcgaaguaccccaacaccagcgaccuggaccggcugacccagucccaccccauccucaacaugaucgacacgaagaaguccagccugaacaucagcggcuacaacuucucccugggcgccgccgugaaggccggggccugcaugcucgacggcgggaacaugcuggagaccaucaaggucagcccccaguccauggacggcauccucaagagcauccugaaggugaagcgcgcgcugggcauguucguguccgacaccccgggggagcggaaccccuacgagaacauccuguacaagaucugccucagcggcgacggguggcccuacaucgccucccgcaccagcaucgucggccgggccugggagaacacggugguggaccuggagaccgacgggaagccccagaagaucggcuccggcaacagcaacaagucccugcagagcgccggguucuccgccggccucaccuacagccagcugaugacccugaaggacgcgaugcugcagcucgacccgaacgccaagacguggauggacaucgaggggcgccccgaggaccccgucgagguggcccuguaccagcccaucuccggcugcuacauccacuucuuccgggagccgaccgaccugaagcaguucaagcaggacgccaaguacagccacgggaucgacaucgccgaccucuucgcggcccagcccggccugaccagcgccgucaucgaggcccugccccgcaacauggugaucacgugccagggcuccgaggacaucaagaagcuccuggagagccaggggcgcaaggacaucaagcugaucgacaucgcccucuccaagaucgacagccggaaguucgagaacgcggugugggaccaguacaaggaccugugccacaugcacaccggcgucgugguggagaagaagaagcgcgggggcaaggaggagaucaccccgcacugcgcccugauggacugcaucauguucgacgccgccgucuccgggggccucaacacccuggugcugcgggcggugcucccccgcgacauggucuuccggaccagcacgccccgcguggugcugugaggacuagucccuguucccagagcccacuuuuuuuucuuuuuuugaaauaaaauagccugucuuucagaucuaaaaaaaaaaaaaaaaaaaaaaaaaaaaaaaaaaaaaaaaaaaaaaaaaaaaaaaaaaaaaaaaaaaaaaaaaaaaaaaaaaaaaaaaaaaaaaaaaaaa

SEQ ID NO: 19673 - RNA, 2009 nt, Artificial Sequence
  mRNA product Design a-1 (A100) comprising derived and/or modified sequence from LASV(Togo/2016/7082;Clade VI)__AMR44578__SP-HsALB_NP(2-569) (opt1)
aggagagucccgcagucggcguccagcggcucugcuuguucgugugugugucguugcaggccuuauucaagcuuaccaugaagugggugaccuucaucagccugcucuuccuguucuccagcgccuacuccagcaacuccaaggaggugaaguccuuccuguggacccagagccuccgccgggagcugagcggcuacugcuccaacaucaagcugcaggucgugaaggacgcccaggcccuccugcacgggcuggacuucagcgagguguccaacguccagcgccucaugcggaagcagaagcgcgacgacggcgaccugaagcggcugcgcgaccucaaccaggcggugaacaaccugguggagcucaagagcguccagcagaaguccauccugcggguggggacccugaccagcgacgaccugcucacccuggccgccgaccuggagaagcucaaguccaaggugacccgcaccgagcggccccugagcuccggcgucuacauggggaaccugagcucccagcagcucgaccagcgccgggcccugcugagcaugaucggcauguccggcgggaaccagaacagccagccgaagggcgacgggguggugcgcgucugggacgugaagaacgccgaccuccugaacaaccaguucggcacgaugcccucccugacccucgcgugccugaccaagcagggccagguggaccugaacgacgccguccaggcccucaccgaccuggggcugaucuacacggccaaguaccccaacagcagcgaccucgaccggcugucccagagccaccccauccugaacaugaucgacaccaagaaguccagccucaacaucuccggcuacaacuucagccugggggcggccaucaagaccggcgccugcaugcuggacgggggcaacaugcucgagaccaucaaggugacgccgcagaccauggacggcauccugaaguccauccugaaggugaagcgcagccucgggauguucaucuccgacacccccggcgagcggaaccccuacgagaacauccuguacaagaucugccugagcggggacggcuggcccuacaucgccucccgcaccgccaucaucgggcgggcgugggagaacacggucguggaccucgagagcgacuccaagccgcagaagaucggcagcaacggcuccaacaagagccugcaguccgccggguucgcccccggccugaccuacagccagcucaugacccugaaggacuccaugcugcagcuggaccccaacgccaagaccuggaucgacaucgaggggcgccccgaggacccgguggaggucgcccucuuccagcccaucagcggcugcuacauccacuucuuccgggagcccacggaccugaagcaguucaagcaggacgcgaaguacagccacgggaucgacgugaccgaccuguucgccgcccagcccggccucaccuccgccgugaucgaggcccugccgcgcaacaugguccugaccugccagggcagcgacgacaucaagaagcuccuggacucccaggggcggcgcgacaucaagcugaucgacgugagccucaacaagaucgacucccgcaaguucgagaacgcggucugggaccaguacaaggaccugugccacaugcacacgggcgugguggucgagaagaagaagaagggcgggaaggaggagaucacgccccacugcgcccugcucgacugcaucauguucgacgccgccgugagcgggggccugaacgccaccgugcugcgggcgguccucccccgcgacaugguguuccggaccuccagccccaaggugguccugugaggacuagucccuguucccagagcccacuuuuuuuucuuuuuuugaaauaaaauagccugucuuucagaucuaaaaaaaaaaaaaaaaaaaaaaaaaaaaaaaaaaaaaaaaaaaaaaaaaaaaaaaaaaaaaaaaaaaaaaaaaaaaaaaaaaaaaaaaaaaaaaaaaaaa

SEQ ID NO: 19674 - RNA, 2009 nt, Artificial Sequence
  mRNA product Design a-1 (A100) comprising derived and/or modified sequence from LASV(KAK-428;Clade n.d. (VII))__ANH09741__SP-HsALB_NP(2-569) (opt1)
aggagagucccgcagucggcguccagcggcucugcuuguucgugugugugucguugcaggccuuauucaagcuuaccaugaagugggugaccuucaucagccugcucuuccuguucuccagcgccuacuccagcaacuccaaggaggugaaguccuuccuguggacccagagccuccgccgggagcugagcggcuacugcaccaacaucaagcugcaggucgugaaggacgcccaggcccuccugcacgggcuggacuucuccgaggugagcaacguccagcgccucaugcggaagcagaagcgcgacgacaacgaccugaagcggcugcgcgaccucaaccaggcggugaacaaccugguggagcugaaguccguccagcagaaguccgugcucaaggugggcacgcugaacagcgacgaccugcucacccuggccgccgaccuggagaagcucaagagcaaggucgugcggaccgagcgcccccuguccagcgggguguacaugggcaaccuguccagccagcagcucgaccagcggcgcgcccugcugaacaugaucgggauggccggcggcucccaggggaaccagccgagccgggacggcgucgugcgcgugugggacgucaagaacgcggaccuccugaacaaccaguucgggaccaugcccucccugacgcucgccugccugaccaagcagggccagguggaccugaacgacgugguccucgcccugaccgaccuggggcucaucuacaccgccaaguaccccaacagcuccgaccuggaccggcugagccagaaccaccccgugcucaacaugaucgacgugaacaagagcucccugaacaucagcggcuacaacuucucccugggcgcggccgucaaggccggggccugcaugcucgacggcgggaacaugcuggagacgaucaagaucagcccgcagaccguggacggcauccugaaguccauccucaaggugaagcgcgcccugggcauguucgucagcgacacccccggggagcggaaccccuacgagaacauccuguacaaggugugccucuccggcaacggguggcccuacaucgcgagccgcaccuccaucgucggccgggccugggagaacacggugguggaccuggagagcaacaagaaccagccgaaggucgggaacaacggcuccaacaagaugcugcagagcuccggcuucgccaccgggcucaccuacagccagcugaugacccugcgcgacuccaugcugcagcucgaccccacggccaagaccuggaucgacaucgagggccggcccgaggaccccguggagcuggcccuguuccagccgagcuccgggugcuacauccacuucuuccgcgagcccaccgaccucaagcaguucaagcaggacgcgaaguacagccacggcaucgacgugaacgaccuguucuccgcccagcccgggcugaccagcgccguccucgaggcccugccccggaacauggugcugacgugccagggcagcgacgacauccgcaagcuccuggacucccaggaccgcaaggacaucaagcugaucgacaucagccucuccaaggccgacgcgcggaaguucgagaacgacgugugggaccaguucaaggaccugugccacaugcacaccggcaucgucguggagaagaagaagaagggcgggaagcaggagaugaccccgcacugcgcccugcucgacugcaucauguucgacgccgccgugagcgggggccugaacguccccacccugcgcgccgugcuccccacggacaugguguuccggaccaucaccaccaaggucgugcugugaggacuagucccuguucccagagcccacuuuuuuuucuuuuuuugaaauaaaauagccugucuuucagaucuaaaaaaaaaaaaaaaaaaaaaaaaaaaaaaaaaaaaaaaaaaaaaaaaaaaaaaaaaaaaaaaaaaaaaaaaaaaaaaaaaaaaaaaaaaaaaaaaaaaa

SEQ ID NO: 19675 - RNA, 2009 nt, Artificial Sequence; identical to SEQ ID NO: 19669
  mRNA product Design a-1 (A100) comprising derived and/or modified sequence from LASV(Pinneo-NIG-1969;Clade I)__AIT17837__SP-HsALB_NP(2-569) (opt1)

SEQ ID NO: 19676 - RNA, 2009 nt, Artificial Sequence
  mRNA product Design a-1 (A100) comprising derived and/or modified sequence from LASV(ISTH0009-NIG-2011;Clade II)__AIT17405__SP-HsALB_NP(2-569) (opt1)
aggagagucccgcagucggcguccagcggcucugcuuguucgugugugugucguugcaggccuuauucaagcuuaccaugaagugggugaccuucaucagccugcucuuccuguucuccagcgccuacuccagcguguccaaggaggucaagagcuuccuguggacccagucccuccgccgggagcugagcggcuacugcuccaacaucaagcuccagguggugaaggacgcccaggcccugcugcacgggcuggacuucagcgaggucuccaacgugcagcgccucaugcggaagcagaagcgcgacgacagcgaccugaagcggcugcgcgaccucaaccaggcggugaacaaccuggucgagcugaaguccacccagcagaaguccauccuccgggugggcacccugaccagcgacgaccugcucacccuggccgccgaccuggagaagcucaagagcaaggugauccgcaccgagcggccccuguccagcggggucuacaugggcaaccuguccacgcagcagcucgagcagcgccgggcccugcugaacaugaucgggauggugggcggcgcccaggggacccagccgggccgcgacggggugguccgggugugggacgugaagaaccccgaccuccugaacaaccaguucggcaccaugcccagccugacccucgcgugccugacgaagcaggggcaggucgaccugaacgacgccgugcucgcccugaccgaccugggccucaucuacaccgccaaguaccccaacuccagcgaccuggaccgccugucccagagccacccgauccucaacaugguggacaucaagaaguccagccugaacaucagcggcuacaacuucucccugggggcggccgucaaggccggcgccugcaugcucgacgggggcaacaugcuggagaccaucaaggugacgccccagaccauggacggcauccucaagagcauccugaaggugaagcggucccuggggauguucgucagcgacacccccggcgagcgcaaccccuacgagaacauccuguacaagaucugccucuccggggacggcuggccguacaucgccagccggaccuccaucguggggcgcgcgugggagaacacgaccguggaccuggagagcgacggcaagccccagaaggucggcuccgccgggagcaacaagucccugcagagcgccggcuuccccaccgggcucaccuacucccagcugaugacgcugaaggacagcaugaugcagcuggaccccuccgccaagaccuggaucgacaucgagggccggccggaggaccccguggagaucgcccucuaccagcccaugagcgggugcuacauccacuucuuccgcgagcccaccgaccugaagcaguucaagcaggacgcgaaguacucccacggcaucgacgucgccgaccuguucccggcccagcccggccucaccagcgccgugaucgaggcccugccccggaacauggugcugacgugccaggggagcgacgacaucaagcgccuccuggacucccagggccgccgggacaucaagcugaucgacaucgcgcucagcaaggccgacucccgccgguucgagaacgccgucugggaccagugcaaggaccugugccacaugcacaccggggugguggucgagaagaagaagcgcggcgggaaggaggagaucacgccccacugcgcccugauggacugcaucauguacgacgccgcggugagcggcggccucaacaucccggugcugcgggccguccugccccgcgacaugguguuccggaccuccagccccaaggugguccucugaggacuagucccuguucccagagcccacuuuuuuuucuuuuuuugaaauaaaauagccugucuuucagaucuaaaaaaaaaaaaaaaaaaaaaaaaaaaaaaaaaaaaaaaaaaaaaaaaaaaaaaaaaaaaaaaaaaaaaaaaaaaaaaaaaaaaaaaaaaaaaaaaaaaa

SEQ ID NO: 19677 - RNA, 2009 nt, Artificial Sequence
  mRNA product Design a-1 (A100) comprising derived and/or modified sequence from LASV(ISTH2010-NIG-2012;Clade II)__AIT17483__SP-HsALB_NP(2-569) (opt1)
aggagagucccgcagucggcguccagcggcucugcuuguucgugugugugucguugcaggccuuauucaagcuuaccaugaagugggugaccuucaucagccugcucuuccuguucuccagcgccuacuccagcgccuccaaggaggugaaguccuuccuguggacccagagccuccgccgggagcugagcggcuacugcuccaacaucaagcugcaggucgugaaggacgcccaggcgcuccugcacgggcuggacuucagcgagguguccaacguccagcgccucaugcggaagcagaagcgcgacgacagcgaccugaagcggcugcgcgaccucaaccaggccgugaacaaccugguggagcugaaguccacccagcagaaguccauccuccgggucggcacgcugaccagcgacgaccugcucacccuggccgccgaccuggagaagcucaagagcaaggugauccgcaccgagcggccccuguccagcgggguguacaugggcaaccuguccacgcagcagcucgagcagcgccgggcccugcugaaccucaucgggauggucggcggcgcgcaggggacccagccgggccgcgacgggguggugcgggucugggacgugaagaaccccgaccugcugaacaaccaguucggcaccaugcccagccucacccuggccugccugacgaagcagggccagguggaccucaacgacgccguccuggcccugaccgaccucgggcugaucuacaccgcgaaguaccccaacuccagcgaccuggaccgccucucccagagccacccgauccugaacaugguggacaccaagaaguccagccugaacaucagcggcuucaacuucucccucggggccgccgugaaggccggcgccugcaugcuggacgggggcaacaugcuggagacgaucaaggucacgccccagaccauggacggcauccucaagagcauccugaaggugaagaagucccuggggauguucgugagcgacacccccggcgagcggaaccccuacgagaacauccucuacaagaucugccuguccggggacggcuggccguacaucgcgagccgcaccuccaucgucgggcgggccugggagaacaccaccguggaccuggagagcgacggcaagccccacaaggugggcaccgccggguccaacaagagccuccaguccgccggcuuccccacggggcugaccuacagccagcugaugacccugaaggacuccaugaugcagcucgaccccagcgccaagaccuggaucgacaucgagggccgcccggaggaccccgucgagaucgcgcuguaccagcccauguccgggugcuacauccacuucuuccgggagcccacggaccugaagcaguucaagcaggacgccaaguacagccacggcaucgacguggccgaccucuucccggcccagcccggccugaccuccgccgucaucgaggcgcugccccgcaacauggugcugaccugccaggggagcgacgacaucaagcggcuccuggacagccagggccgccgcgacaucaagcucaucgacaucgcccuguccaaggccgacagccggcgcuucgagaacgccgugugggaccagugcaaggaccugugccacaugcacaccggggucgugguggagaagaagaagcggggcgggaaggaggagaucacgccccacugcgcccucauggacugcaucauguacgacgcggccgucuccggcggccugaacaucccggugcugcgcgccgugcucccccgggacauggucuuccgcaccagcucccccaagguggugcugugaggacuagucccuguucccagagcccacuuuuuuuucuuuuuuugaaauaaaauagccugucuuucagaucuaaaaaaaaaaaaaaaaaaaaaaaaaaaaaaaaaaaaaaaaaaaaaaaaaaaaaaaaaaaaaaaaaaaaaaaaaaaaaaaaaaaaaaaaaaaaaaaaaaaa

SEQ ID NO: 19678 - RNA, 2009 nt, Artificial Sequence
  mRNA product Design a-1 (A100) comprising derived and/or modified sequence from LASV(Lassa virus/H.sapiens-wt/NGA/2015/ISTH_0543;Clade II)__AVO03640__SP-HsALB_NP(2-569) (opt1)
aggagagucccgcagucggcguccagcggcucugcuuguucgugugugugucguugcaggccuuauucaagcuuaccaugaagugggugaccuucaucagccugcucuuccuguucuccagcgccuacuccagcgccuccaaggaggugaaguccuuccuguggacccagagccuccgccgggagcugagcggcuacugcuccaacaucaagcugcaggucgugaaggacgcccaggcgcuccugcacgggcuggacuucagcgagguguccaacguccagcgccucaugcggaagcagaagcgcgacgacagcgaccugaagcggcugcgcgaccucaaccaggccgugaacaaccugguggagcugaaguccacccagcagaaguccauccuccgggucggcacgcugaccagcgacgaccugcucacccuggccgccgaccuggagaagcucaagagcaaggugauccgcaccgagcggccccuguccagcgggguguacaugggcaaccuguccacgcagcagcucgagcagcgccgggcccugcugaacaugaucgggauggucggcggcgcgcaggggacccagccgggccgcgacgggguggugcgggucugggacgugaagaaccccgaccuccugaacaaccaguucggcaccaugcccagccugacccucgccugccugacgaagcagggccagguggaccugaacgacgccguccucgcccugaccgaccuggggcucaucuacaccgcgaaguaccccaacuccagcgaccuggaccgccugucccagagccacccgauccucaacaugguggacaccaagaaguccagccugaacaucagcggcuacaacuucucccugggggccgccgugaaggccggcgccugcaugcucgacgggggcaacaugcuggagacgaucaaggucacgccccagaccauggacggcauccucaagagcauccugaaggugaagaagucccuggggauguucgugagcgacacccccggcgagcggaaccccuacgagaacauccuguacaagaucugccucuccggggacggcuggccguacaucgcgagccgcaccuccaucgucgggcgggccugggagaacaccaccguggaccuggagagcgacggcaagccccagaaggugggcuccgccgggagcaacaagucccugcagagcgccggcuuccccaccgggcucacguacucccagcugaugacccugaaggacagcaugaugcagcuggaccccuccgccaagaccuggaucgacaucgagggccgcccggaggaccccgucgagaucgcgcucuaccagcccaugagcgggugcuacauccacuucuuccgggagcccaccgaccugaagcaguucaagcaggacgccaaguacucccacggcaucgacguggccgaccuguucccggcccagcccggccucacgagcgccgucaucgaggcgcugccccgcaacauggugcugaccugccaggggagcgacgacaucaagcggcuccuggacucccagggccgcaaggacaucaagcugaucgacaucgcccucagcaaggccgacucccgccgguucgagaacgccgugugggaccagugcaaggaccugugccacaugcacaccggggucgugguggagaagaagaagcgcggcgggaaggaggagaucacgccccacugcgcccugauggacugcaucauguacgacgcggccgucagcggcggccucaacaucccggugcugcgggccgugcugccccgcgacauggucuuccggaccuccagccccaagguggugcucugaggacuagucccuguucccagagcccacuuuuuuuucuuuuuuugaaauaaaauagccugucuuucagaucuaaaaaaaaaaaaaaaaaaaaaaaaaaaaaaaaaaaaaaaaaaaaaaaaaaaaaaaaaaaaaaaaaaaaaaaaaaaaaaaaaaaaaaaaaaaaaaaaaaaa

SEQ ID NO: 19679 - RNA, 2009 nt, Artificial Sequence
  mRNA product Design a-1 (A100) comprising derived and/or modified sequence from LASV(Lassa virus/H.sapiens-wt/NGA/2016/ISTH_0009;Clade II)__AVO03572__SP-HsALB_NP(2-569) (opt1)
aggagagucccgcagucggcguccagcggcucugcuuguucgugugugugucguugcaggccuuauucaagcuuaccaugaagugggugaccuucaucagccugcucuuccuguucuccagcgccuacuccagcgccuccaaggaggugaaguccuuccuguggacccagagccuccgccgggagcugagcggcuacugcuccaacaucaagcugcaggucgugaaggacgcccaggcgcuccugcacgggcuggacuucagcgagguguccaacguccagcgccucaugcggaagcagaagcgcgacgacagcgaccugaagcggcugcgcgaccucaaccaggccgugaacaaccugguggagcugaaguccacccagcagaaguccauccuccgggucggcacgcugaccagcgacgaccugcucacccuggccgccgaccuggagaagcucaagagcaaggugauccgcaccgagcggccccuguccagcgggguguacaugggcaaccuguccacgcagcagcucgagcagcgccgggcccugcugaacaugaucgggauggucggcggcgcgcaggggacccagccgggccgcgacgggguggugcgggucugggacgugaagaaccccgaccuccugaacaaccaguucggcaccaugcccagccugacccucgccugccugacgaagcagggccagguggaccugaacgacgccguccucgcccugaccgaccuggggcucaucuacaccgcgaaguaccccaacuccagcgaccuggaccgccugucccagagccacccgauccucaacaugguggacaccaagaaguccagccugaacaucagcggcuacaacuucucccugggggccgccgugaaggccggcgccugcaugcucgacgggggcaacaugcuggagacgaucaaggucacgccccagaccauggacggcauccucaagagcauccugaaggugaagaagucccuggggauguucgugagcgacacccccggcgagcggaaccccuacgagaacauccuguacaagaucugccucuccggggacggcuggccguacaucgcgagccgcaccuccaucgucgggcgggccugggagaacaccaccguggaccuggagagcgacggcaagccccagaaggugggcuccgccgggagcaacaagucccugcagagcgccggcuuccccaccgggcucacguacucccagcugaugacccugaaggacagcaugaugcagcuggaccccuccgccaagaccuggaucgacaucgagggccgcccggaggaccccgucgagaucgcgcucuaccagcccaugagcgggugcuacauccacuucuuccgggagcccaccgaccugaagcaguucaagcaggacgccaaguacucccacggcaucgacguggccgaccuguucccggcccagcccggccucacgagcgccgucaucgaggcgcugccccgcaacauggugcugaccugccaggggagcgacgacaucaagcggcuccuggacucccagggccgccgcgacaucaagcugaucgacaucgcccucagcaaggccgacucccggcgcuucgagaacgccgugugggaccagugcaaggaccugugccacaugcacaccggggucgugguggagaagaagaagcggggcgggaaggaggagaucacgccccacugcgcccugauggacugcaucauguacgacgcggccgucagcggcggccucaacaucccggugcugcgcgccgugcugccccgggacauggucuuccgcaccuccagccccaagguggugcucugaggacuagucccuguucccagagcccacuuuuuuuucuuuuuuugaaauaaaauagccugucuuucagaucuaaaaaaaaaaaaaaaaaaaaaaaaaaaaaaaaaaaaaaaaaaaaaaaaaaaaaaaaaaaaaaaaaaaaaaaaaaaaaaaaaaaaaaaaaaaaaaaaaaaa

SEQ ID NO: 19680 - RNA, 2009 nt, Artificial Sequence
  mRNA product Design a-1 (A100) comprising derived and/or modified sequence from LASV(Lassa virus/H.sapiens-wt/NGA/2016/ISTH_0017;Clade II)__AVO03568__SP-HsALB_NP(2-569) (opt1)
aggagagucccgcagucggcguccagcggcucugcuuguucgugugugugucguugcaggccuuauucaagcuuaccaugaagugggugaccuucaucagccugcucuuccuguucuccagcgccuacuccagcgccuccaaggaggugaaguccuuccuguggacccagagccuccgccgggagcugagcggcuacugcuccagcaucaagcugcaggucgugaaggacgcccaggcgcuccugcacgggcuggacuucuccgaggugagcaacguccagcgccucaugcggaagcagaagcgcgacgacuccgaccugaagcggcugcgcgaccucaaccaggccgugaacaaccugguggagcucaagagcacccagcagaaguccauccugcgggucggcacgcugaccagcgacgaccugcucacccuggccgccgaccuggagaagcucaaguccaaggugauccgcaccgagcggccccugagcuccgggguguacaugggcaaccugagcacgcagcagcucgagcagcgccgggcccugcugaacaugaucgggauggcgggcggcgcccaggggacccagccgggccgcgacggggucgugcgggugugggacgucaagaaccccgaccuccugaacaaccaguucggcaccaugcccucccugacccucgccugccugacgaagcagggccagguggaccugaacgacgccgugcucgcgcugaccgaccuggggcucaucuacaccgccaaguaccccaacagcuccgaccuggaccgccugagccagagccacccgauccucaacauggucgacaccaagaaguccagccugaacaucuccggcuacaacuucagccugggggccgccgugaaggccggcgcgugcaugcucgacgggggcaacaugcuggagacgaucaaggugacgccccagaccauggacggcauccugaaguccauccucaaggucaagcggagccuggggauguucguguccgacgcccccggcgagcgcaaccccuacgagaacauccuguacaagaucugccucagcggggacggcuggccguacaucgccucccggaccagcaucguggggcgcgccugggagaacaccaccgucgaccuggaguccgacggcaagccccagaaggugggcgccaccgggagcaacaagucccugcagagcgcgggcuuccccaccgggcucacguacucccagcugaugacccugaaggacagcaugaugcagcuggaccccuccgccaagaccuggaucgacaucgagggccggccggaggaccccguggaggucgcccucuaccagcccgugagcgggugcuacauccacuucuuccgcgagcccaccgaccugaagcaguucaagcaggacgccaaguacucccacggcaucgacgucgccgaccuguucccggcgcagcccggccucacgagcgccgugaucgaggcccugccccggaacauggugcugaccugccaggggagcgacgacaucaagaagcuccuggacucccagggccgcaaggacaucaagcugaucgacaucgcccucagcaaggccgacucccgccgguucgagaacgcggucugggaccagugcaaggaccugugccacaugcacaccggggugguggucgagaagaagaagcgcggcgggaaggaggagaucacgccccacugcgcccugauggacugcaucauguacgacgccgccgugagcggcggccucaacaucccggugcugcgggcgguccugccccgcgacaugguguuccggaccuccagccccaaggugguccucugaggacuagucccuguucccagagcccacuuuuuuuucuuuuuuugaaauaaaauagccugucuuucagaucuaaaaaaaaaaaaaaaaaaaaaaaaaaaaaaaaaaaaaaaaaaaaaaaaaaaaaaaaaaaaaaaaaaaaaaaaaaaaaaaaaaaaaaaaaaaaaaaaaaaa

SEQ ID NO: 19681 - RNA, 2009 nt, Artificial Sequence
  mRNA product Design a-1 (A100) comprising derived and/or modified sequence from LASV(Lassa virus/H.sapiens-wt/NGA/2018/ISTH_0959;Clade II)__AVV65100__SP-HsALB_NP(2-569) (opt1)
aggagagucccgcagucggcguccagcggcucugcuuguucgugugugugucguugcaggccuuauucaagcuuaccaugaagugggugaccuucaucagccugcucuuccuguucuccagcgccuacuccagcgccuccaaggaggugaaguccuuccuguggacccagagccuccgccgggagcugagcggcuacugcuccaacaucaagcugcaggucgugaaggacgcccaggcgcuccugcacgggcuggacuucagcgagguguccaacguccagcgccucaugcggaagcagaagcgcgacgacagcgaccugaagcggcugcgcgaccucaaccaggccgugaacaaccugguggagcugaaguccacccagcagaaguccauccuccgggucggcacccugaccagcgacgaccugcucacccuggccgccgaccuggagaagcucaagagcaaggugauccgcaccgagcggccccuguccagcgggguguacaugggcaaccuguccacgcagcagcucgagcagcgccgggcccugcugaaccucaucgggauggucggcggcgcgcaggggacccagccgggccgcgacgggguggugcgggucugggacgugaagaaccccgaccugcugaacaaccaguucggcaccaugcccagccucacccuggccugccugacgaagcagggccagguggaccucaacgacgucgugcuggcccugaccgaccucgggcugaucuacaccgccaaguaccccaacuccagcgaccuggaccgccucucccagagccacccgauccugaacaugguggacaccaagaaguccagccugaacaucagcggcuucaacuucucccucggggcggccgucaaggccggcgccugcaugcuggacgggggcaacaugcuggagacgaucaaggugacgccccagaccauggacggcauccucaagagcauccugaaggugaagaagucccuggggauguucgucagcgacacccccggcgagcggaaccccuacgagaacauccucuacaagaucugccuguccggggacggcuggccguacaucgccagccgcaccuccaucguggggcgggcgugggagaacaccaccguggaccuggagagcgacggcaagccccacaaggucggcaccgccggguccaacaagagccuccaguccgccggcuuccccacggggcugaccuacagccagcugaugacccugaaggacuccaugaugcagcucgaccccagcgccaagaccuggaucgacaucgagggccgcccggaggaccccguggagaucgcccuguaccagcccauguccgggugcuacauccacuucuuccgggagcccacggaccugaagcaguucaagcaggacgcgaaguacagccacggcaucgacgucgccgaccucuucccggcccagcccggccugaccuccgccgugaucgaggcccugccccgcaacauggugcugaccugccaggggagcgacgacaucaagcggcuccuggacagccagggccgcaaggacaucaagcucaucgacaucgcgcuguccaagaccgacagccgccgguucgagaacgccgucugggaccagugcaaggaccugugccacaugcacacgggggugguggucgagaagaagaagcgcggcgggaaggaggagaucacgccccacugcgcccucauggacugcaucauguacgacgccgccguguccggcggccugaacaucccggugcugcgggcgguccucccccgcgacaugguguuccggaccagcucccccaaggugguccugugaggacuagucccuguucccagagcccacuuuuuuuucuuuuuuugaaauaaaauagccugucuuucagaucuaaaaaaaaaaaaaaaaaaaaaaaaaaaaaaaaaaaaaaaaaaaaaaaaaaaaaaaaaaaaaaaaaaaaaaaaaaaaaaaaaaaaaaaaaaaaaaaaaaaa

SEQ ID NO: 19682 - RNA, 2009 nt, Artificial Sequence
  mRNA product Design a-1 (A100) comprising derived and/or modified sequence from LASV(LASV003-NIG-2008;Clade II)__AIT17581__SP-HsALB_NP(2-569) (opt1)
aggagagucccgcagucggcguccagcggcucugcuuguucgugugugugucguugcaggccuuauucaagcuuaccaugaagugggugaccuucaucagccugcucuuccuguucuccagcgccuacuccagcgccuccaaggaggugaaguccuuccuguggacccagagccuccgccgggagcugagcggcuacugcuccagcaucaagcugcaggucgugaaggacgcccaggcgcuccugcacgggcuggacuucuccgaggugagcaacguccagcgccucaugcggaagcagaagcgcgacgacuccgaccugaagcggcugcgcgaccucaaccaggccgugaacaaccugguggagcucaagagcacccagcagaaguccguccugcgggugggcacccugaccagcgacgaccugcucacccuggccgccgaccuggagaagcucaaguccaaggugauccgcaccgagcggccccugagcuccggggucuacaugggcaaccugagcgcccagcagcucgagcagcgccggacgcugcugaacaugaucgggauggugggcggcgcgcaggggacccagccgggccgcgacggggugguccgggugugggacgugaagaaccccgaccuccugaacaaccaguucggcaccaugcccucccugacccucgccugccugacgaagcaggggcaggucgaccugaacgacguggugcucgcccugaccgaccugggccucaucuacaccgccaaguaccccaacagcuccgaccuggaccgccugagccagagccacccgauccucuccauggucgacaccaagaaguccagccugaacaucagcggcuacaacuucucccugggggcggccgugaaggccggcgccugcaugcucgacgggggcaacaugcuggagacgaucaaggugacgccccagaccauggacggcauccucaagagcauccugaaggucaagaagucccuggggauguucgugagcgacacccccggcgagcggaaccccuacgagaacauccuguacaagaucugccucuccggggacggcuggccguacaucgccagccgcaccuccaucguggggcgggcgugggagaacaccaccgucgaccuggagagcgacggcaagccccagaaggugggcaccgccggguccaacaagagccugcaguccgccggcuuccccacggggcucaccuacagccagcugaugacccugaaggacuccaugaugcagcuggaccccagcgccaagaccuggaucgacaucgagggccgcccggaggaccccgucgagaucgcccucuaccagcccauguccgggugcuacauccacuucuuccgggagcccacggaccugaagcaguucaagcaggacgcgaaguacagccacggcaucgacgugaccgaccuguucccggcccagcccggccucaccagcgccgugaucgaggcccugccccgcaacaugguccugaccugccagggguccgacgacaucaagcggcuccuggacagccagggccgccgcgacaucaagcugaucgacaucgcccucuccaaggcggacagccggcgcuucgagaacgccgugugggaccagugcaaggaccugugccacaugcacacggggguggucguggagaagaagaagcggggcgggaaggaggagaucacgccccacugcgcccugauggacugcaucauguacgacgccgccguguccggcggccucaacaucccgguccugcgcgcggugcugccccgggacaugguguuccgcaccagcucccccaaggucgugcucugaggacuagucccuguucccagagcccacuuuuuuuucuuuuuuugaaauaaaauagccugucuuucagaucuaaaaaaaaaaaaaaaaaaaaaaaaaaaaaaaaaaaaaaaaaaaaaaaaaaaaaaaaaaaaaaaaaaaaaaaaaaaaaaaaaaaaaaaaaaaaaaaaaaaa

SEQ ID NO: 19683 - RNA, 2009 nt, Artificial Sequence
  mRNA product Design a-1 (A100) comprising derived and/or modified sequence from LASV(LASV035-NIG-2009;Clade II)__AIT17589__SP-HsALB_NP(2-569) (opt1)
aggagagucccgcagucggcguccagcggcucugcuuguucgugugugugucguugcaggccuuauucaagcuuaccaugaagugggugaccuucaucagccugcucuuccuguucuccagcgccuacuccagcgccuccaaggaggugaaguccuuccuguggacccagagccuccgccgggagcugagcggcuacugcuccagcaucaagcugcaggucgugaaggacgcccaggcgcuccugcacgggcuggacuucuccgaggugagcaacguccagcgccucaugcggaagcagaagcgcgacgacuccgaccugaagcggcugcgcgaccucaaccaggccgugaacaaccugguggagcucaagagcacccagcagaaguccauccugcgggucggcacgcugaccagcgacgaccugcucacccuggccgccgaccuggagaagcucaaguccaaggugauccgcaccgagcggccccugagcuccgggguguacaugggcaaccugagcgcccagcagcucgagcagcgccgggcgcugcugaacaugaucgggauggucggcggcgcccaggggacgcagccgggccgcgacgggguggugcgggucugggacgugaagaaccccgaccuccugaacaaccaguucggcaccaugcccucccugacccucgccugccugaccaagcagggccagguggaccugaacgacgccguccucgcgcugacggaccuggggcucaucuacaccgccaaguaccccaacagcuccgaccuggaccgccugagccagagccacccgauccucaacaugguggacaccaagaaguccagccugaacaucuccggcuacaacuucagccugggggccgccgugaaggccggcgcgugcaugcucgacgggggcaacaugcuggagaccaucaaggucacgccccagaccauggacggcauccugaaguccauccucaaggugaagcggagccuggggauguucguguccgacacccccggcgagcgcaaccccuacgagaacauccuguacaagaucugccucagcggggacggcuggccguacaucgccucccggaccagcaucgucgggcgcgccugggagaacacgaccguggaccuggaguccgacggcaagccccagaaggugggcaccaccgggagcaacaagucccugcagagcgccggcuuccccacggggcucaccuacucccagcugaugacccugaaggacagcaugaugcagcuggaccccuccgccaagaccuggaucgacaucgagggccggccggaggaccccgucgagaucgcgcucuaccagcccaugagcgggugcuacauccacuucuuccgcgagcccacggaccugaagcaguucaagcaggacgccaaguacucccacggcaucgacguggccgaccuguucccggcccagcccggccucaccagcgccgucaucgaggcgcugccccggaacauggugcugaccugccaggggagcgacgacaucaagaagcuccuggacucccagggccgccgcgacaucaagcugaucgacaucgcccucagcaaggccgacucccggaaguucgagaacgccgugugggaccagugcaaggaccugugccacaugcacaccggggucgugguggagaagaagaagcgcggcgggaaggaggagaucacgccccacugcgcccugauggacugcaucauguacgacgcggccgucagcggcggccucaacaucccggugcugcgggccgugcugccccgcgacauggucuuccggaccuccagccccaagguggugcucugaggacuagucccuguucccagagcccacuuuuuuuucuuuuuuugaaauaaaauagccugucuuucagaucuaaaaaaaaaaaaaaaaaaaaaaaaaaaaaaaaaaaaaaaaaaaaaaaaaaaaaaaaaaaaaaaaaaaaaaaaaaaaaaaaaaaaaaaaaaaaaaaaaaaa

SEQ ID NO: 19684 - RNA, 2009 nt, Artificial Sequence
  mRNA product Design a-1 (A100) comprising derived and/or modified sequence from LASV(LASV1000-NIG-2009;Clade II)__AIT17783__SP-HsALB_NP(2-569) (opt1)
aggagagucccgcagucggcguccagcggcucugcuuguucgugugugugucguugcaggccuuauucaagcuuaccaugaagugggugaccuucaucagccugcucuuccuguucuccagcgccuacuccagcgccuccaaggaggugaaguccuuccuguggacccagagccuccgccgggagcugagcggcuacugcuccaacaucaagcugcaggucgugaaggacgcccaggcgcuccugcacgggcuggacuucagcgagguguccaacguccagcgccucaugcggaagcagaagcgcgacgacagcgaccugaagcggcugcgcgaccucaaccaggccgugaacaaccugguggagcugaaguccacccagcagaaguccauccuccgggucggcacgcugaccagcgacgaccugcucacccuggccgccgaccuggagaagcucaagagcaaggugauccgcaccgagcggccccuguccagcgggguguacaugggcaaccuguccacgcagcagcucgagcagcgccgggcccugcugaacaugaucgggauggucggcggcgcgcaggggacccagccgggccgcgacgggguggugcgggucugggacgugaagaaccccgaccuccugaacaaccaguucggcaccaugcccagccugacccucgccugccugacgaagcagggccagguggaccugaacgacgucgugcucgcccugaccgaccuggggcucaucuacaccgccaaguaccccaacuccagcgaccuggaccgccugucccagagccacccgauccucaacaugguggacaccaagaaguccagccugaacaucagcggcuacaacuucucccugggggcggccgucaaggccggcgccugcaugcucgacgggggcaacaugcuggagacgaucaaggugacgccccagaccauggacggcauccucaagagcauccugaaggugaagaagucccuggggauguucgucagcgacacccccggcgagcggaaccccuacgagaacauccuguacaagaucugccucuccggggacggcuggccguacaucgccagccgcaccuccaucguggggcgggcgugggagaacaccaccguggaccuggagagcgacggcaagccccagaaggucggcaccgccggguccaacaagagccugcaguccgccggcuuccccacggggcucaccuacagccagcugaugacccugaaggacuccaugaugcagcuggaccccagcgccaagaccuggaucgacaucgagggccgcccggaggaccccguggagaucgcccucuaccagcccgucuccgggugcuacauccacuucuuccgggagcccacggaccugaagcaguucaagcaggacgcgaaguacagccacggcaucgacguggccgaccuguucccggcccagcccggccucaccuccgccgugaucgaggcccugccccgcaacaugguccugaccugccaggggagcgacgacaucaagcggcuccuggacagccagggccgccgcgacaucaagcugaucgacaucgcgcucuccaaggccgacagccggcgcuucgagaacgccgugugggaccagugcaaggaccugugccacaugcacaccgggguggucguggagaagaagaagcggggcgggaaggaggagaucacgccccacugcgcccugauggacugcaucauguacgacgccgcgguguccggcggccucaacaucccgguccugcgcgccgugcugccccgggacaugguguuccgcaccagcucccccaaggucgugcucugaggacuagucccuguucccagagcccacuuuuuuuucuuuuuuugaaauaaaauagccugucuuucagaucuaaaaaaaaaaaaaaaaaaaaaaaaaaaaaaaaaaaaaaaaaaaaaaaaaaaaaaaaaaaaaaaaaaaaaaaaaaaaaaaaaaaaaaaaaaaaaaaaaaaa

SEQ ID NO: 19685 - RNA, 2009 nt, Artificial Sequence
  mRNA product Design a-1 (A100) comprising derived and/or modified sequence from LASV(LASV221-NIG-2010;Clade II)__AIT17625__SP-HsALB_NP(2-569) (opt1)
aggagagucccgcagucggcguccagcggcucugcuuguucgugugugugucguugcaggccuuauucaagcuuaccaugaagugggugaccuucaucagccugcucuuccuguucuccagcgccuacuccagcgccuccaaggaggugaaguccuuccuguggacccagagccuccgccgggagcugagcggcuacugcuccagcaucaagcugcaggucgugaaggacgcccaggcgcuccugcacgggcuggacuucuccgaggugagcaacguccagcgccucaugcggaagcagcgccgggacgacuccgaccugaagcgccugcgggaccucaaccaggccgugaacaaccugguggagcucaagagcacccagcagaaguccauccugcgcgucggcacgcugaccagcgacgaccugcucacccuggccgccgaccuggagaagcucaaguccaaggugauccggaccgagcgcccccugagcuccgggguguacaugggcaaccugagcacgcagcagcucgagcagcggcgcgcccugcugaacaugaucgggauggucggcggcgcgcaggggacccagccgggccgggacgggguggugcgcgucugggacgugaagaaccccgaccuccugaacaaccaguucggcaccaugcccucccugacccucgccugccugacgaagcagggccagguggaccugaacgacgccguccucgcccugaccgaccuggggcucaucuacaccgcgaaguaccccaacagcuccgaccuggaccggcugagccagagccacccgauccucaacaugguggacaccaagaaguccagccugaacaucuccggcuacaacuucagccugggggccgccgugaaggccggcgccugcaugcucgacgggggcaacaugcuggagacgaucaaggucacgccccagaccguggacggcauccugaaguccauccucaaggugaagcgcagccuggggauguucgucuccgacacccccggcgagcggaaccccuacgagaacauccuguacaagaucugccucagcggggacggcuggccguacaucgcgucccgcaccagcaucguggggcgggccugggagaacaccaccguggaccuggaguccgacggcaagccccagaaggucggcaccgccgggagcaacaagucccugcagagcgccggcuuccccacggggcucaccuacucccagcugaugacccugaaggacagcaugaugcagcuggaccccuccgccaagaccuggaucgacaucgagggccgcccggaggaccccguggagaucgcgcucuaccagcccaugagcgggugcuacauccacuucuuccgggagcccacggaccugaagcaguucaagcaggacgccaaguacucccacggcaucgacgucgccgaccuguucccggcccagcccggccucaccagcgccgugaucgaggcgcugccccgcaacauggugcugaccugccaggggagcgacgacaucaagcgccuccuggacucccagggccggcgcgacaucaagcugaucgacaucgcccucagcaaggccgacucccggaaguucgagaacgccgucugggaccagugcaaggaccugugccacaugcacaccggggugguggucgagaagaagaagcgcggcgggaaggaggagaucacgccccacugcgcccugauggacugcaucauguacgacgcggccgugagcggcggccucaacaucccggugcugcgggccguccugccccgcgacaugguguuccggaccuccagccccaaggugguccucugaggacuagucccuguucccagagcccacuuuuuuuucuuuuuuugaaauaaaauagccugucuuucagaucuaaaaaaaaaaaaaaaaaaaaaaaaaaaaaaaaaaaaaaaaaaaaaaaaaaaaaaaaaaaaaaaaaaaaaaaaaaaaaaaaaaaaaaaaaaaaaaaaaaaa

SEQ ID NO: 19686 - RNA, 2009 nt, Artificial Sequence
  mRNA product Design a-1 (A100) comprising derived and/or modified sequence from LASV(LASV237-NIG-2010;Clade II)__AIT17639__SP-HsALB_NP(2-569) (opt1)
aggagagucccgcagucggcguccagcggcucugcuuguucgugugugugucguugcaggccuuauucaagcuuaccaugaagugggugaccuucaucagccugcucuuccuguucuccagcgccuacuccagcgccuccaaggaggugaaguccuuccuguggacccagagccuccgccgggagcugagcggcuacugcuccaacaucaagcugcaggucgugaaggacgcccaggcgcuccugcacgggcuggacuucagcgagguguccaacguccagcgccucaugcggaagcagaagcgcgacgacagcgaccugaagcggcugcgcgaccucaaccaggccgugaacaaccugguggagcugaaguccacccagcagaaguccauccuccgggucggcacccugaccagcgacgaccugcucacccuggccgccgaccuggagaagcucaagagcaaggugauccgcaccgagcggccccuguccagcgggguguacaugggcaaccuguccacgcagcagcucgagcagcgccgggcccugcugaacaugaucgggauggucggcggcgcgcaggggacccagccgggccgcgacgggguggugcgggucugggacgugaagaaccccgaccuccugaacaaccaguucggcaccaugcccagccugacccucgccugccugacgaagcagggccagguggaccugaacgacgccguccucgcccugaccgaccuggggcucaucuacaccgcgaaguaccccaacuccagcgaccuggaccgccugucccagagccacccgauccucaacaugguggacaucaagaaguccagccugaacaucagcggcuacaacuucucccugggggccgccgugaaggccggcgccugcaugcucgacgggggcaacaugcuggagaccaucaaggucacgccccagaccauggacggcauccucaagagcauccugaaggugaagcggucccuggggauguucgugagcgacacccccggcgagcgcaaccccuacgagaacauccuguacaagaucugccucuccggggacggcuggccguacaucgcgagccggaccuccaucgucgggcgcgccugggagaacacgaccguggaccuggagagcgacggcaagccccagaaggugggcuccgccgggagcaacaagucccugcagagcgccggcuuccccaccgggcucaccuacucccagcugaugacgcugaaggacagcaugaugcagcuggaccccuccgccaagaccuggaucgacaucgagggccggccggaggaccccgucgagaucgcgcucuaccagcccaugagcgggugcuacauccacuucuuccgcgagcccaccgaccugaagcaguucaagcaggacgccaaguacucccacggcaucgacguggccgaccuguucccggcccagcccggccucaccagcgccgucaucgaggcgcugccccggaacauggugcugacgugccaggggagcgacgacaucaagcgccuccuggacucccagggccgccgggacaucaagcugaucgacaucgcccucagcaaggccgacucccgccgguucgagaacgccgugugggaccagugcaaggaccugugccacaugcacaccggggucgugguggagaagaagaagcgcggcgggaaggaggagaucacgccccacugcgcccugauggacugcaucauguacgacgcggccgucagcggcggccucaacaucccggugcugcgggccgugcugccccgcgacauggucuuccggaccuccagccccaagguggugcucugaggacuagucccuguucccagagcccacuuuuuuuucuuuuuuugaaauaaaauagccugucuuucagaucuaaaaaaaaaaaaaaaaaaaaaaaaaaaaaaaaaaaaaaaaaaaaaaaaaaaaaaaaaaaaaaaaaaaaaaaaaaaaaaaaaaaaaaaaaaaaaaaaaaaa

SEQ ID NO: 19687 - RNA, 2009 nt, Artificial Sequence
  mRNA product Design a-1 (A100) comprising derived and/or modified sequence from LASV(LASV253-NIG-2011;Clade II)__AIT17671__SP-HsALB_NP(2-569) (opt1)
aggagagucccgcagucggcguccagcggcucugcuuguucgugugugugucguugcaggccuuauucaagcuuaccaugaagugggugaccuucaucagccugcucuuccuguucuccagcgccuacuccagcgccuccaaggaggugaaguccuuccuguggacccagagccuccgccgggagcugagcggcuacugcuccagcaucaagcugcaggucgugaaggacgcccaggcgcuccugcacgggcuggacuucuccgaggugagcaacguccagcgccucaugcggaagcagaagcgcgacgacuccgaccugaagcggcugcgcgaccucaaccaggccgugaacaaccugguggagcucaagagcacccagcagaaguccguccugcgggugggcacccugaccagcgacgaccugcucacccuggccgccgaccuggagaagcucaaguccaaggugauccgcaccgagcggccccugagcuccggggucuacaugggcaaccugagcacgcagcagcucgagcagcgccgggcccugcugaacaugaucgggauggugggcggcgcgcaggggacccagccgggccgcgacggggugguccgggugugggacgugaagaaccccgaccuccugaacaaccaguucggcaccaugcccucccugacccucgccugccugacgaagcaggggcaggucgaccugaacgacguggugcucgcccugaccgaccugggccucaucuacaccgccaaguaccccaacagcuccgaccuggaccgccugagccagagccacccgauccucaacauggucgacaccaagaaguccagccugaacaucuccggcuacaacuucagccugggggcggccgugaaggccggcgccugcaugcucgacgggggcaacaugcuggagacgaucaaggugacgccccagaccauggacggcauccugaaguccauccucaaggucaagaagucccuggggauguucgugagcgacacccccggcgagcggaaccccuacgagaacauccuguacaagaucugccucagcggggacggcuggccguacaucgccucccgcaccagcaucguggggcgggcgugggagaacaccaccgucgaccuggaguccgacggcaagccccagaaggugggcaccgccgggagcaacaagucccugcagagcgccggcuuccccacggggcucaccuacucccagcugaugacccugaaggacagcaugaugcagcuggaccccuccgccaagaccuggaucgacaucgagggccgcccggaggaccccgucgagaucgcccucuaccagcccaugagcgggugcuacauccacuucuuccgggagcccacggaccugaagcaguucaagcaggacgcgaaguacucccacggcaucgacgugaccgaccuguucccggcccagcccggccucaccagcgccgugaucgaggcccugccccgcaacaugguccugaccugccaggggagcgacgacaucaagcggcuccuggacucccagggccgccgcgacaucaagcugaucgacaucgcccucagcaaggcggacucccggcgcuucgagaacgccgugugggaccagugcaaggaccugugccacaugcacacggggguggucguggagaagaagaagcggggcgggaaggaggagaucacgccccacugcgcccugauggacugcaucauguacgacgccgccgugagcggcggccucaacaucccgguccugcgcgcggugcugccccgggacaugguguuccgcaccuccagccccaaggucgugcucugaggacuagucccuguucccagagcccacuuuuuuuucuuuuuuugaaauaaaauagccugucuuucagaucuaaaaaaaaaaaaaaaaaaaaaaaaaaaaaaaaaaaaaaaaaaaaaaaaaaaaaaaaaaaaaaaaaaaaaaaaaaaaaaaaaaaaaaaaaaaaaaaaaaaa

SEQ ID NO: 19688 - RNA, 2009 nt, Artificial Sequence
  mRNA product Design a-1 (A100) comprising derived and/or modified sequence from LASV(LASV254-NIG-2011;Clade II)__AIT17675__SP-HsALB_NP(2-569) (opt1)
aggagagucccgcagucggcguccagcggcucugcuuguucgugugugugucguugcaggccuuauucaagcuuaccaugaagugggugaccuucaucagccugcucuuccuguucuccagcgccuacuccagcgccuccaaggaggugaaguccuuccuguggacccagagccuccgccgggagcugagcggcuacugcuccagcaucaagcugcaggucgugaaggacgcccaggcgcuccugcacgggcuggacuucuccgaggugagcaacguccagcgccucaugcggaagcagaagcgcgacgacuccgaccugaagcggcugcgcgaccucaaccaggccgugaacaaccugguggagcucaagagcacccagcagaaguccguccugcgggugggcacgcugaccagcgacgaccugcucacccuggccgccgaccuggagaagcucaaguccaaggugauccgcaccgagcggccccugagcuccggggucuacaugggcaaccugagcacgcagcagcucgagcagcgccgggcccugcugaacaugaucgggauggugggcggcgcgcaggggacccagccgggccgcgacggggugguccgggugugggacgugaagaaccccgaccuccugaacaaccaguucggcaccaugcccucccugacccucgccugccugacgaagcaggggcaggucgaccugaacgacgccgugcucgcccugaccgaccugggccucaucuacaccgcgaaguaccccaacagcuccgaccuggaccgccugagccagagccacccgauccucaacaugguggacaccaagaaguccagccugaacaucuccggcuacaacuucagccugggggccgccgucaaggccggcgccugcaugcucgacgggggcaacaugcuggagacgaucaaggugacgccccagaccauggacggcauccugaaguccauccucaaggugaagaagucccuggggauguucgucagcgacacccccggcgagcggaaccccuacgagaacauccuguacaagaucugccucagcggggacggcuggccguacaucgcgucccgcaccagcaucguggggcgggccugggagaacaccaucguggaccuggaguccgacggcaagccccagaaggucggcaccgccgggagcaacaagucccugcagagcgccggcuuccccaccgggcucacguacucccagcugaugacccugaaggacagcaugaugcagcuggaccccuccgccaagaccuggaucgacaucgagggccgcccggaggaccccguggagaucgcgcucuaccagcccaugagcgggugcuacauccacuucuuccgggagcccaccgaccugaagcaguucaagcaggacgccaaguacucccacggcaucgacgucgccgaccuguucccggcccagcccggccucacgagcgccgugaucgaggcgcugccccgcaacauggugcugaccugccaggggagcgacgacaucaagcggcuccuggacucccagggccgccgcgacaucaagcugaucgacaucgcccucagcaaggccgacucccggcgcuucgagaacgccgucugggaccagugcaaggaccugugccacaugcacaccggggugguggucgagaagaagaagcggggcgggaaggaggagaucacgccccacugcgcccugauggacugcaucauguacgacgcggccgugagcggcggccucaacaucccggugcugcgcgccguccugccccgggacaugguguuccgcaccuccagccccaaggugguccucugaggacuagucccuguucccagagcccacuuuuuuuucuuuuuuugaaauaaaauagccugucuuucagaucuaaaaaaaaaaaaaaaaaaaaaaaaaaaaaaaaaaaaaaaaaaaaaaaaaaaaaaaaaaaaaaaaaaaaaaaaaaaaaaaaaaaaaaaaaaaaaaaaaaaa

SEQ ID NO: 19689 - RNA, 2009 nt, Artificial Sequence
  mRNA product Design a-1 (A100) comprising derived and/or modified sequence from LASV(Nig08-04;Clade II)__ADU56611__SP-HsALB_NP(2-569) (opt1)
aggagagucccgcagucggcguccagcggcucugcuuguucgugugugugucguugcaggccuuauucaagcuuaccaugaagugggugaccuucaucagccugcucuuccuguucuccagcgccuacuccagcgccuccaaggaggugaaguccuuccuguggacccagagccuccgccgggagcugagcggcuacugcuccaacaucaagcugcaggucgugaaggacgcccaggcgcuccugcacgggcuggacuucagcgagguguccaacguccagcgccucaugcggaagcagaagcgcgacgacggcgaccugaagcggcugcgcgaccucaaccaggccgugaacaaccugguggagcucaagagcacccagcagaaguccguccugcggguggggacccugaccagcgacgaccugcucacccuggccgccgaccuggagaagcucaaguccaaggugauccgcaccgagcggccccugagcuccggcgucuacauggggaaccugagcacgcagcagcucgagcagcgcaaggcccugcuguccaugaucggcauggugggcggggcgcagggcacccagccggggcgggacggcgugguccgcgugugggacgugaagaaccccgaccuccugaacaaccaguucgggaccaugcccagccugacccucgccugccugacgaagcagggccaggucgaccugaacgacgccgugcucgcccugaccgaccugggccucaucuacaccgcgaaguaccccaacuccagcgaccuggaccggcugucccagagccacccgauccucaacaugguggacaccaagaaguccagccugaacaucagcggguacaacuucucccugggcgccgccgucaaggccggggccugcaugcucgacggcggcaacaugcuggagacgaucaaggugacgccccagaccauggacgggauccucaagagcauccugaaggugaagcgcucccugggcauguucgucagcgacacccccggggagcggaaccccuacgagaacauccuguacaagaucugccucuccggcgacggguggccguacaucgcgagccgcaccuccaucgugggccgggccugggagaacaccaccguggaccuggagagcgacggcaagccccagaaggucgggaccgccggcuccaacaagagccugcaguccgccggguuccccacgggccucaccuacagccagcugaugacccugaaggacuccaugaugcagcuggaccccagcgccaagaccuggaucgacaucgaggggcgcccggaggaccccguggagaucgcgcucuaccagcccauguccggcugcuacauccacuucuuccgggagcccacggaccugaagcaguucaagcaggacgccaaguacagccacggcaucgacgucaccgaccuguucuccgcccagccggggcucaccagcgccgugaucgaggcccugccccgcaacauggugcugaccugccagggcagcgacgacaucaagaagcuccuggacucccaggggcggcgcgacaucaagcugaucgacaucagccucaacaaggcggacucccgccgguucgagaacgccgucugggaccagugcaaggaccugugccacaugcacacgggcgugguggucgagaagaagaagcgcgggggcaaggaggagaucacgccccacugcgcccugauggacugcaucauguucgacgccgccgugagcggcgggcucaacauccccauccugcgggcggugcugccgcgcgacauggucuuccggaccuccagccccaagguggugcucugaggacuagucccuguucccagagcccacuuuuuuuucuuuuuuugaaauaaaauagccugucuuucagaucuaaaaaaaaaaaaaaaaaaaaaaaaaaaaaaaaaaaaaaaaaaaaaaaaaaaaaaaaaaaaaaaaaaaaaaaaaaaaaaaaaaaaaaaaaaaaaaaaaaaa

SEQ ID NO: 19690 - RNA, 2012 nt, Artificial Sequence
  mRNA product Design a-1 (A100) comprising derived and/or modified sequence from LASV(GA391;Clade III)__AAA46284__SP-HsALB_NP(2-570) (opt1)
aggagagucccgcagucggcguccagcggcucugcuuguucgugugugugucguugcaggccuuauucaagcuuaccaugaagugggugaccuucaucagccugcucuuccuguucuccagcgccuacuccagcgccuccaaggaggugcgcagcugccuguggacccagucccuccggcgcgagcugagcggcuacugcuccaacaucaagcugcaggucgugaaggacgcccaggcgcuccugcacgggcuggacuucagcgagguguccaacguccagcggcucaugcgcaagcagaagcgggacgacggcgaccugaagcgccugcgggaccucaaccaggccgugaacaaccugguggagcugaaguccacccagcagaaguccguccuccgcguggggacgcugagcuccgacgaccugcucauccuggccgccgaccuggagaagcucaagagcaaggugacccggaccgagcgcccccuguccagcggcgucuacauggggaaccuguccagccagcagcucgaccagcggcgcgcccugcugaacaugaucggcaugaccggcguguccgggggcgggaagggcgcgagcaacgggaucgugcgggucugggacgugaagaacgccgagcuccugaacaaccaguucggcacgaugccgucccugacccucgccugccugaccaagcagggccagguggaccugaacgacgccguccaggcgcucaccgaccuggggcugaucuacacggccaaguaccccaacagcagcgaccucgaccgccugucccagagccaccccauccugaacaugaucgacaccaagaaguccagccucaacaucuccggcuacaacuucagccugggggccgccgugaaggccggcgcgugcaugcuggacggcgggaacaugcucgagaccaucaaggugagcccccagaccauggacggcauccucaagagcauccugaaggucaagaagucccuggggauguucgugagcgacacgccgggcgagcggaaccccuacgagaacauccuguacaagaucugccuguccggggacggcuggagcuacaucgccucccgcaccagcaucgugggccgggccugggagaacaccgucguggaccucgagcaggacaacaagccccagaagaucgggaacggcggguccaacaagagccugcaguccgccggcuucgccgcggggcugaucuacagccagcucaugacccugaaggacuucaagugcuucaaccugauccccaacgccaagacguggauggacaucgagggccgcccggaggaccccguggagaucgcccuguaccagcccuccagcggcugcuacguccacuucuuccgggagcccaccgaccucaagcaguucaagcaggacgccaaguacagccacgggcgcgacgugaccgaccuguucgccgcgcagccgggccugaccuccgccgucaucgaggcccucccccggaacauggugaucacgugccaggggagcgaggacauccgcaagcugcuggagucccagggccgccgggacaucaagcucaucgacaucacccugagcaaggccgacucccgcaaguucgagaacgccgugugggaccaguucaaggaccugugccacaugcacaccggggucgugguggagaagaagaagcggggcggcaaggaggagaucacgccccacugcgcgcucauggacugcaucauguucgacgccgccgucagcgggggccuggacgccaaggugcugcgcgugguccucccccgggacaugguguuccgcaccuccaccccgaaggugguccugugaggacuagucccuguucccagagcccacuuuuuuuucuuuuuuugaaauaaaauagccugucuuucagaucuaaaaaaaaaaaaaaaaaaaaaaaaaaaaaaaaaaaaaaaaaaaaaaaaaaaaaaaaaaaaaaaaaaaaaaaaaaaaaaaaaaaaaaaaaaaaaaaaaaaa

SEQ ID NO: 19691 - RNA, 2009 nt, Artificial Sequence
  mRNA product Design a-1 (A100) comprising derived and/or modified sequence from LASV(Nig08-A19;Clade III)__ADU56619__SP-HsALB_NP(2-569) (opt1)
aggagagucccgcagucggcguccagcggcucugcuuguucgugugugugucguugcaggccuuauucaagcuuaccaugaagugggugaccuucaucagccugcucuuccuguucuccagcgccuacuccagcgccuccaaggaggugaaguccuuccuguggacccagucccuccgccgggagcugagcggcuacugcuccaacaucaagcugcaggucgugaaggacgcccaggcgcuccugcacgggcuggacuucagcgagguguccaacguccagcgccucaugcggaagcagaagcgcgacgacggcgaccugaagcggcugcgcgaccucaaccaggccgugaacaaccugguggagcucaagagcacccagcagaaguccguccugcggguggggacccugagcuccgacgaccugcucgugcuggccgccgaccuggagaagcucaagagcaaggucgugcgcaccgagcggccccuguccagcggcaucuacauggggaaccuguccagccagcagcucgaccagcgcaaggcccugcugaacaugaucggcaugaccggcgggaacggcgggcggaacaccacguccgacggcaucgugcgcgucugggacgugaagaacgcggagcuccugaacaaccaguucgggaccaugccgagccugacccucgccugccugaccaagcagggccagguggaccugaacgacgccguccaggcccucacggaccugggccugaucuacaccgcgaaguaccccaacuccagcgaccucgaccggcuggcccagagccaccccauccugaacaugaucgacaccaagaaguccagccucaacaucuccggguacaacuucagccugggcgccgccgugaaggccggggcgugcaugcuggacggcggcaacaugcucgagaccaucaaggugagcccccagacgauggacgggauccucaagagcauccugaaggucaagcgcucccugggcauguucaucagcgacaccccgggggagcggaaccccuacgagaacauccuguacaagaucugccuguccggcgacggguggcccuacaucgccagccgcaccuccaucgugggccgggccugggagaacaccguggucgaccucgagagcgacaacaagccccagaagacgggcaacgggggcuccaacaagagccugcaguccgccggguucgccgcgggccugaccuacagccagcucaugacccugaaggacuccaugcugcagcuggacccgaacgccaagaccuggauggacaucgaggggcgccccgaggaccccguggagaucgcccucuaccagcccagcuccggcugcuacauccacuucuuccgggagccgacggaccugaagcaguucaagcaggacgccaaguacagccacggcaucgacgugaccgaccuguucgccgcgcagcccgggcucaccagcgccgucaucgaggcccugccccgcaacauggugaucacgugccagggcuccgaggacauccggaagcugcucgagagccaggggcgccgcgacaucaagcugaucgacaucucccugagcaaggucgacucccggaaguucgagaacgccgugugggaccaguucaaggaccucugccacaugcacaccggcaucguggucgagaagaagaagcgcgggggcaaggaggagaucacgccccacugcgcccugauggacugcaucauguucgacgcggccgugagcggcgggguggacgccaagguccugcgggccgugcucccgcgcgacaugguguuccggaccuccacccccaaggucgugcugugaggacuagucccuguucccagagcccacuuuuuuuucuuuuuuugaaauaaaauagccugucuuucagaucuaaaaaaaaaaaaaaaaaaaaaaaaaaaaaaaaaaaaaaaaaaaaaaaaaaaaaaaaaaaaaaaaaaaaaaaaaaaaaaaaaaaaaaaaaaaaaaaaaaaa

SEQ ID NO: 19692 - RNA, 2009 nt, Artificial Sequence
  mRNA product Design a-1 (A100) comprising derived and/or modified sequence from LASV(G1180-SLE-2010;Clade IV)__AIT17169__SP-HsALB_NP(2-569) (opt1)
aggagagucccgcagucggcguccagcggcucugcuuguucgugugugugucguugcaggccuuauucaagcuuaccaugaagugggugaccuucaucagccugcucuuccuguucuccagcgccuacuccagcgccuccaaggagaucaagagcuuccuguggacccagucccuccgccgggagcugagcggcuacugcuccaacaucaagcuccagguggucaaggacgcccaggcgcugcugcacgggcuggacuucagcgagguguccaacgugcagcgccucaugcggaaggagcgccgggacgacaacgaccugaagcgccugcgggaccucaaccaggccgucaacaaccugguggagcucaagagcacccagcagaaguccauccugcgcgugggcacccugaccagcgacgaccugcucauccuggccgccgaccuggagaagcucaaguccaaggucauccggaccgagcgcccccugagcgccgggguguacaugggcaaccuguccagccagcagcucgaccagcggcgcgcgcugcuguccaugaucgggaugagcuccggcaaccagcgggcccaggccggccgcgacggggugguccgggugugggacgugaagaacgucgagcuccugaacaaccaguucggcaccaugccgagccugacgcucgccugccugaccaagcagggccagguggaccugaacgacgcggugcaggcccucaccgaccuggggcugaucuacaccgccaaguaccccaacacguccgaccucgaccgccugacccagagccaccccauccugaacaugaucgacaccaagaaguccagccucaacaucagcggguacaacuucucccugggcgccgccgucaaggcgggcgccugcaugcuggacgggggcaacaugcucgagaccaucaaggugagcccccagacgauggacgggauccugaaguccauccugaaggugaagaaggcccucggcauguucaucagcgacaccccgggcgagcggaaccccuacgagaacauccuguacaagaucugccuguccggggacggcuggcccuacaucgccagccgcaccuccaucaccgggcgggccugggagaacacggucguggaccucgagagcgacggcaagccccagaaggcgggguccaacaacagcaacaagucccugcagagcgugggcuucaccgccggccugaccuacucccagcucaugacccugaaggacgccaugcugcagcuggacccgaacgccaagacguggauggacaucgaggggcgccccgaggaccccgucgagaucgcccucuaccagcccagcuccggcugcuacauccacuucuuccgggagccgaccgaccugaagcaguucaagcaggacgcgaaguacagccacgggaucgacgugaccgaccuguucgccgcccagcccggccucaccuccgccgugaucgacgcccugccccgcaacauggucaucacgugccaggggagcgacgacauccgcaagcugcucgagagccagggccggaaggacaucaagcugaucgacaucgcgcuguccaagaccgacagccgcaaguacgagaacgccgugugggaccaguacaaggaccucugccacaugcacaccggcgucgugguggagaagaagaagcgcgggggcaaggaggagaucacgccccacugcgcccugauggacugcaucauguucgacgccgcggucuccgggggccugaacaccagcgugcuccgggccgugcugccgcgggacauggucuuccgcaccuccacgccccggguggugcugugaggacuagucccuguucccagagcccacuuuuuuuucuuuuuuugaaauaaaauagccugucuuucagaucuaaaaaaaaaaaaaaaaaaaaaaaaaaaaaaaaaaaaaaaaaaaaaaaaaaaaaaaaaaaaaaaaaaaaaaaaaaaaaaaaaaaaaaaaaaaaaaaaaaaa

SEQ ID NO: 19693 - RNA, 2009 nt, Artificial Sequence
  mRNA product Design a-1 (A100) comprising derived and/or modified sequence from LASV(G1442-SLE-2011;Clade IV)__AIT17181__SP-HsALB_NP(2-569) (opt1)
aggagagucccgcagucggcguccagcggcucugcuuguucgugugugugucguugcaggccuuauucaagcuuaccaugaagugggugaccuucaucagccugcucuuccuguucuccagcgccuacuccagcgccuccaaggaggugaaguccuuccuguggacccagagccuccgccgggagcugagcggcuacugcuccaacaucaagcugcaggucgugaaggacgcccaggcgcuccugcacgggcuggacuucagcgagguguccaacguccagcgccucaugcggaagcagcgccgggacgacaacgaccugaagcgccugcgggaccucaaccaggccgugaacaaccugguggagcucaagagcacccagcagaaguccguccugcgcgugggcacccugaccagcgacgaccugcucgugcuggccgccgaccuggagaagcucaaguccaaggucauccggaccgagcgcccccugagcgccgggguguacaugggcaaccuguccagccagcagcucgaccagcggcgcgcgcugcugaacaugaucgggauguccggcggcauccaggggacccggacgggccgcgacggggugguccgggugugggacgugaagaacgccgaccuccugaacaaccaguucggcaccaugccgagccugacccucgccugccugaccaagcaggggcaggucgaccugaacgacguggugcaggcccucacggaccugggccugaucuacaccgcgaaguaccccaacgccuccgaccucgaccgccugacccagagccaccccauccugaacaugaucgacaccaagaaguccagccucaacaucagcggcuacaacuucucccugggggccgccgucaaggccggcgcgugcaugcuggacgggggcaacaugcucgagacgaucaaggugagcccccagaccauggacggcauccugaaguccauccugaaggugaagaagacccucgggauguucaucagcgacaccccgggcgagcggaaccccuacgagaacauccuguacaagaucugccuguccggggacggcuggcccuacaucgccagccgcacguccaucaccgggcgggccugggagaacaccgucguggaccucgagagcgacggcaagccccagaaggccggcuccaacaacagcaacaagucccugcagagcgccggguucgcggccggccugaccuacucccagcucaugacgcugaaggacgccaugcugcagcuggacccgaacgccaagaccuggauggacaucgaggggcgccccgaggaccccguggagaucgcccucuaccagcccagcuccggcugcuacauccacuucuuccgggagccgaccgaccugaagcaguucaagcaggacgcgaaguacagccacgggaucgacgucaccgaccuguucgccgcccagcccggccucacguccgccgugaucgaggcccugccccgcaacauggucaucacgugccagggcagcgacgacaucaagaagcugcucgagucccaggggcgcaaggacaucaagcugaucgacaucgcgcugagcaagaccgacagccggaaguacgagaacgccgugugggaccaguacaaggaccucugccacaugcacaccggcguggucguggagaagaagaagcgcgggggcaaggaggagaucaccccgcacugcgcccugauggacugcaucauguucgacgccgcgguguccgggggccugaacacccucguccugcgggccgugcugccccgcgacaugguguuccggaccagcacgccccgcgucgugcucugaggacuagucccuguucccagagcccacuuuuuuuucuuuuuuugaaauaaaauagccugucuuucagaucuaaaaaaaaaaaaaaaaaaaaaaaaaaaaaaaaaaaaaaaaaaaaaaaaaaaaaaaaaaaaaaaaaaaaaaaaaaaaaaaaaaaaaaaaaaaaaaaaaaaa

SEQ ID NO: 19694 - RNA, 2009 nt, Artificial Sequence
  mRNA product Design a-1 (A100) comprising derived and/or modified sequence from LASV(G3010-SLE-2013;Clade IV)__AIT17345__SP-HsALB_NP(2-569) (opt1)
aggagagucccgcagucggcguccagcggcucugcuuguucgugugugugucguugcaggccuuauucaagcuuaccaugaagugggugaccuucaucagccugcucuuccuguucuccagcgccuacuccagcgccuccaaggagaucaagagcuuccuguggacccagucccuccgccgggagcugagcggcuacugcuccaacaucaagcuccagguggucaaggacgcccaggcgcugcugcacgggcuggacuucagcgagguguccaacgugcagcgccucaugcggaaggagcgccgggacgacaacgaccugaagcgccugcgggaccucaaccaggccgucaacaaccugguggagcucaagagcacccagcagaaguccauccugcgcgugggcacccugaccagcgacgaccugcucauccuggccgccgaccuggagaagcucaaguccaaggucacccggaccgagcgcccccugagcgccgggguguacaugggcaaccuguccagccagcagcucgaccagcggcgcgcgcugcuguccaugaucgggaugagcuccggcgugcagggcgcccgggccgggcgcgacggcgucgugcgggugugggacgucaagaacgccgagcuccugaacaaccaguucgggacgaugccgagccugacccucgcgugccugaccaagcagggccagguggaccugaacgacgugguccaggcccucaccgaccuggggcugaucuacacggccaaguaccccaacaccuccgaccucgaccgccugacccagagccaccccauccugaacaugaucgacaccaagaaguccagccucaacaucagcggcuacaacuucucccugggcgccgccgugaaggcgggggccugcaugcuggacggcgggaacaugcucgagacgaucaaggugagcccccagaccauggacggcauccugaaguccauccugaaggucaagaaggcccucggcauguucaucagcgagaccccgggggagcggaaccccuacgagaacauccuguacaagaucugccuguccggcgacggguggcccuacaucgccagccgcaccuccaucacgggccgggccugggagaacaccgugguggaccucgagagcgacgggaagccccagaaggcgggcuccaacaacagcaacaagucccugcagagcgccggcuucaccgccgggcugaccuacucccagcucaugacgcugaaggacgccaugcugcagcuggacccgaacgccaagaccuggauggacaucgagggccgccccgaggaccccgucgagguggcgcucuaccagcccagcuccgggugcuacauccacuucuuccgggagccgaccgaccugaagcaguucaagcaggacgccaaguacagccacggcaucgacgugaccgaccuguucgccgcccagcccgggcucacguccgccgucaucgacgcgcugccccgcaacauggugaucacgugccagggcagcgacgacaucaagaagcugcucgagagccagggccgcaaggacaucaagcugaucgacaucgcccuguccaagaccgacagccggaaguacgagaacgccgucugggaccaguacaaggaccucugccacaugcacaccggggugguggucgagaagaagaagcgcggcgggaaggaggagaucaccccgcacugcgcccugauggacugcaucauguucgacgcggccguguccggcgggcugaacaccagcgugcuccgggccguccugccccgcgacaugguguuccggaccuccacgccccgcgugguccugugaggacuagucccuguucccagagcccacuuuuuuuucuuuuuuugaaauaaaauagccugucuuucagaucuaaaaaaaaaaaaaaaaaaaaaaaaaaaaaaaaaaaaaaaaaaaaaaaaaaaaaaaaaaaaaaaaaaaaaaaaaaaaaaaaaaaaaaaaaaaaaaaaaaaa

SEQ ID NO: 19695 - RNA, 2009 nt, Artificial Sequence
  mRNA product Design a-1 (A100) comprising derived and/or modified sequence from LASV(G502-SLE-2009;Clade IV)__AIT17127__SP-HsALB_NP(2-569) (opt1)
aggagagucccgcagucggcguccagcggcucugcuuguucgugugugugucguugcaggccuuauucaagcuuaccaugaagugggugaccuucaucagccugcucuuccuguucuccagcgccuacuccagcgccuccaaggagaucaagagcuuccuguggacccagucccuccgccgggagcugagcggcuacugcuccaacaucaagcuccagguggucaaggacgcccaggcgcugcugcacgggcuggacuucagcgagguguccaacgugcagcgccucaugcggaaggagcgccgggacgacaacgaccugaagcgccugcgggaccucaaccaggccgucaacaaccugguggagcucaagagcacccagcagaaguccauccugcgcgugggcacccugaccagcgacgaccugcucauccuggccgccgaccuggagaagcucaaguccaaggucauccggaccgagcgcccccugagcgccgggguguacaugggcaaccuguccagccagcagcucgaccagcggcgcgcgcugcuguccaugaucgggaugagcggcggcaaccagggggugcgggccggcaaggacggggucgugcgcgugugggacgucaagaacgccgagcuccugaacaaccaguucggcaccaugccgucccugacgcucgccugccugaccaagcagggccagguggaccugaacgacgcggugcaggcccucaccgaccuggggcugaucuacaccgccaaguaccccaacacgagcgaccucgaccggcugacccagucccaccccauccugaacaugaucgacaccaagaaguccagccucaacaucuccggcuacaacuucagccugggggccgccgucaaggcgggcgccugcaugcuggacgggggcaacaugcucgagaccaucaaggugagcccccagacgauggacggcauccucaagagcauccugaaggugaagaaggcccuggggauguucaucuccgacaccccgggcgagcgcaaccccuacgagaacauccuguacaagaucugccugagcggggacggcuggcccuacaucgccucccggaccagcaucaccgggcgcgccugggagaacacggucguggaccucgaguccgacggcaagccccagaaggcgggcagcaacaacuccaacaagagccugcaguccgccggguucaccgccggccugaccuacagccagcucaugacccugaaggacgccaugcugcagcuggacccgaacacgaagaccuggauggacaucgaggggcggcccgaggaccccguggagaucgcccucuaccagcccuccagcggcugcuacauccacuucuuccgcgagccgaccgaccugaagcaguucaagcaggacgcgaaguacucccacgggaucgacgucaccgaccuguucgccgcccagcccggccucacgagcgccgugaucgacgcccugccccggaacauggugaucacgugccagggcuccgacgacauccgcaagcugcucgagagccaggggcgcaaggacaucaagcugaucgacaucgcgcugaacaagaccgacagccggaaguacgagaacgccgucugggaccaguacaaggaccucugccacaugcacaccggcguggucguggagaagaagaagcgcgggggcaaggaggagaucaccccgcacugcgcccugauggacugcaucauguucgacgccgcgguguccgggggccugaacaccagcguccuccgggccgugcugccccgcgacaugguguuccggaccuccacgccccgcgucgugcugugaggacuagucccuguucccagagcccacuuuuuuuucuuuuuuugaaauaaaauagccugucuuucagaucuaaaaaaaaaaaaaaaaaaaaaaaaaaaaaaaaaaaaaaaaaaaaaaaaaaaaaaaaaaaaaaaaaaaaaaaaaaaaaaaaaaaaaaaaaaaaaaaaaaaa

SEQ ID NO: 19696 - RNA, 2009 nt, Artificial Sequence
  mRNA product Design a-1 (A100) comprising derived and/or modified sequence from LASV(G733-SLE-2010;Clade IV)__AIT17155__SP-HsALB_NP(2-569) (opt1)
aggagagucccgcagucggcguccagcggcucugcuuguucgugugugugucguugcaggccuuauucaagcuuaccaugaagugggugaccuucaucagccugcucuuccuguucuccagcgccuacuccagcgccuccaaggagaucaagagcuuccuguggacccagucccuccgccgggagcugagcggcuacugcuccaacaucaagcuccagguggucaaggacgcccaggcgcugcugcacgggcuggacuucagcgagguguccaacgugcagcgccucaugcggaaggagcgccgggacgacaacgaccugaagcgccugcgggaccucaaccaggccgucaacaaccugguggagcucaagagcacccagcagaaguccgugcugcgcgucggcacccugaccagcgacgagcugcucgugcuggccgccgaccuggagaagcucaaguccaaggugauccggaccgagcgcccccugagcgccggggucuacaugggcaaccuguccagccagcagcucgaccagcggcgcgcgcugcuguccaugaucgggaugagcggcggcaaccagggggcccggaccggccgcgacgggguggugcgggucugggacgugaagaacgccgagcuccugaacaaccaguucggcaccaugccgucccugacccucgccugccugaccaagcagggccagguggaccugaacgacgcgguccaggcccucaccgaccuggggcugaucuacacggccaaguaccccaacaccagcgaccucgaccgccugacccagucccaccccauccugaacaugaucgacaccaagaaguccagccucaacaucuccggcuacaacuucagccugggggccgccgugaaggcgggcgccugcaugcuggacgggggcaacaugcucgagacgaucaaggugagcccccagaccauggacggcauccucaagagcauccugaaggucaagaaggcccuggggauguucaucuccgacaccccgggcgagcggaaccccuacgagaacauccuguacaagaucugccugagcggggacggcuggcccuacaucgccucccgcaccagcaucacggggcgggccugggagaacaccgugguggaccucgaguccgacggcaagccccagaaggcgggcagcaacaacuccaacaagagccugcaguccgccggguucaccgccggccugaccuacagccagcucaugacgcugaaggacgccaugcugcagcuggacccgaacgccaagaccuggauggacaucgaggggcgccccgaggaccccgucgagaucgcgcucuaccagcccuccagcggcugcuacauccacuucuuccgggagccgaccgaccugaagcaguucaagcaggacgccaaguacucccacgggaucgacgugaccgaccuguucgccgcccagcccggccucacgagcgccgugaucgacgcgcugccccgcaacauggucaucacgugccagggcuccgacgacauccgcaagcugcucgagagccaggggcggaaggacaucaagcugaucgacaucgcccugagcaagaucgacucccgcaaguacgagaacgccgugugggaccaguacaaggaccucugccacaugcacaccggcgucgugguggagaagaagaagcgcgggggcaaggaggagaucacgccccacugcgcccugauggacugcaucauguucgacgcggccgucagcgggggccugaacucccucgugcugcgggccgugcugccgcgggacauggucuuccgcaccagcacgccccggguggugcucugaggacuagucccuguucccagagcccacuuuuuuuucuuuuuuugaaauaaaauagccugucuuucagaucuaaaaaaaaaaaaaaaaaaaaaaaaaaaaaaaaaaaaaaaaaaaaaaaaaaaaaaaaaaaaaaaaaaaaaaaaaaaaaaaaaaaaaaaaaaaaaaaaaaaa

SEQ ID NO: 19697 - RNA, 2009 nt, Artificial Sequence
  mRNA product Design a-1 (A100) comprising derived and/or modified sequence from MOPV/LASV reassortant(IGS-1;Clade IV)__AFY05578__SP-HsALB_NP(2-569) (opt1)
aggagagucccgcagucggcguccagcggcucugcuuguucgugugugugucguugcaggccuuauucaagcuuaccaugaagugggugaccuucaucagccugcucuuccuguucuccagcgccuacuccagcgccuccaaggagaucaagagcuuccuguggacccagucccuccgccgggagcugagcggcuacugcuccaacaucaagcuccagguggucaaggacgcccaggcgcugcugcacgggcuggacuucagcgagguguccaacgugcagcgccucaugcggaaggagcgccgggacgacaacgaccugaagcgccugcgggaccucaaccaggccgucaacaaccugguggagcucaagagcacccagcagaaguccauccugcgcgugggcacccugaccagcgacgaccugcucauccuggccgccgaccuggagaagcuccgguccaaggucauccgcaccgagcggccccugagcgccgggguguacaugggcaaccuguccagccagcagcucgaccagcgccgggcgcugcugaacaugaucgggauguccggcggcaaccagggggcccgcgccggccgggacggggugguccgcgugugggacgugaagaacgccgagcuccugagcaaccaguucggcaccaugccgucccugacgcucgcgugccugaccaagcaggggcaggucgaccugaacgacgccgugcaggcccucaccgaccugggccugaucuacaccgccaaguaccccaacacgagcgaccucgaccggcugacccagucccaccccauccugaacaugaucgacaccaagaaguccagccucaacaucuccggcuacaacuucagccugggggccgcggugaaggccggcgccugcaugcuggacgggggcaacaugcucgagaccaucaaggucagcccccagacgauggacggcauccucaagagcauccugaaggugaagaaggcccuggggauguucaucuccgacaccccgggcgagcgcaaccccuacgagaacauccuguacaagaucugccugagcggggacggcuggcccuacaucgccucccggaccagcaucaccgggcgcgcgugggagaacacgguggucgaccucgaguccgacggcaagccccagaaggccgacagcaacaacuccagcaagucccugcagagcgccggcuucaccgccgggcugaccuacucccagcucaugacccugaaggacgccaugcugcagcuggacccgaacgcgaagacguggauggacaucgagggccggcccgaggaccccguggagaucgcccucuaccagcccagcuccgggugcuacauccacuucuuccgcgagccgaccgaccugaagcaguucaagcaggacgccaaguacagccacggcaucgacgugaccgaccuguucgccacccagcccgggcucacguccgccgucaucgacgcgcugccccgcaacauggugaucacgugccagggcagcgacgacauccggaagcugcucgagagccagggccgcaaggacaucaagcugaucgacaucgaccuguccaagaccgacagccggaaguacgagaacgccgugugggaccaguacaaggaccucugccacaugcacaccggggucguggucgagaagaagaagcgcggcgggaaggaggagaucaccccgcacugcgcccugauggacugcaucauguucgacgccgcgguguccggcgggcugaacaccagcgugcuccgggccguccugccccgcgacaugguguuccggaccuccacgccccgcgugguccugugaggacuagucccuguucccagagcccacuuuuuuuucuuuuuuugaaauaaaauagccugucuuucagaucuaaaaaaaaaaaaaaaaaaaaaaaaaaaaaaaaaaaaaaaaaaaaaaaaaaaaaaaaaaaaaaaaaaaaaaaaaaaaaaaaaaaaaaaaaaaaaaaaaaaa

SEQ ID NO: 19698 - RNA, 2009 nt, Artificial Sequence
  mRNA product Design a-1 (A100) comprising derived and/or modified sequence from LASV(LM765-SLE-2012;Clade IV)__AIT17815__SP-HsALB_NP(2-569) (opt1)
aggagagucccgcagucggcguccagcggcucugcuuguucgugugugugucguugcaggccuuauucaagcuuaccaugaagugggugaccuucaucagccugcucuuccuguucuccagcgccuacuccagcgccuccaaggagaucaagagcuuccuguggacccagucccuccgccgggagcugagcggcuacugcuccaacaucaagcuccagguggucaaggacgcccaggcgcugcugcacgggcuggacuucagcgagguguccaacgugcagcgccucaugcggaaggagcgccgggacgacaacgaccugaagcgccugcgggaccucaaccaggccgucaacaaccugguggagcucaagagcacccagcagaaguccauccugcgcgugggcacccugaccagcgacgaccugcucauccuggccgccgaccuggagaagcucaaguccaaggucacccggaccgagcgcccccugagcgccgggguguacaugggcaaccuguccagccagcagcucgaccagcggcgcgcgcugcuggacaugaucgggauguccggcagcaaccagggcgcccgggccgggcgcgacggcgugguccgggugugggacgugaagaacgccgagcuccugaacaaccaguucgggacgaugccgucccugacccucgcgugccugaccaagcagggccaggucgaccugaacgacgccgugcaggcccucaccgaccuggggcugaucuacacggccaaguaccccaacaccagcgaccucgaccgccugacccagucccaccccauccugaacaugaucgacaccaagaaguccagccucaacaucuccggcuacaacuucagccugggcgccgcggugaaggccggggccugcaugcuggacggcgggaacaugcucgagacgaucaaggucagcccccagaccauggacggcauccucaagagcauccugaaggugaagaaggcccugggcauguucaucuccgacgccccgggggagcggaaccccuacgagaacauccuguacaagaucugccugagcggcgacggguggcccuacaucgcgucccgcaccagcaucaccggccgggccugggagaacacgguggucgaccucgaguccgacgggaagccccagaaggccggcagcaacggcuccaacaagagccugcaguccgccggguucaccgccggccugaccuacagccagcucaugacccugaaggacgcgaugcugcagcuggacccgaacgccaagacguggauggacaucgaggggcgccccgaggaccccguggagaucgcccucuaccagcccuccagcggcugcuacauccacuucuuccgggagccgaccgaccugaagcaguucaagcaggacgccaaguacucccacgggaucgacgugaccgaccuguucgccgcgcagcccggccucaccagcgccgucaucgacgcccugccccgcaacauggugaucacgugccagggcuccgacgacauccgcaagcuguucgagagccaggggcggaaggacaucaagcucaucgacaucgcccugagcaagaccgacucccgcaaguacgagaacgcggugugggaccaguacaaggaccugugccacaugcacaccggcaucgucguggagaagaagaagcgcgggggcaaggaggagaucacgccccacugcgcccucauggacugcaucauguucgacgccgccgucagcgggggccugaacaccuccgugcugcgggccgugcucccgcgggacauggucuuccgcaccagcacgccccggguggugcugugaggacuagucccuguucccagagcccacuuuuuuuucuuuuuuugaaauaaaauagccugucuuucagaucuaaaaaaaaaaaaaaaaaaaaaaaaaaaaaaaaaaaaaaaaaaaaaaaaaaaaaaaaaaaaaaaaaaaaaaaaaaaaaaaaaaaaaaaaaaaaaaaaaaaa

SEQ ID NO: 19699 - RNA, 2009 nt, Artificial Sequence
  mRNA product Design a-1 (A100) comprising derived and/or modified sequence from LASV(LM776-SLE-2012;Clade IV)__AIT17825__SP-HsALB_NP(2-569) (opt1)
aggagagucccgcagucggcguccagcggcucugcuuguucgugugugugucguugcaggccuuauucaagcuuaccaugaagugggugaccuucaucagccugcucuuccuguucuccagcgccuacuccagcgccuccaaggagaucaagagcuuccuguggacccagucccuccgccgggagcugagcuccuacugcagcaacaucaagcuccagguggucaaggacgcccaggcgcugcugcacggccuggacuucuccgaggugagcaacgugcagcgccucaugcggaaggagcgccgggacgacaacgaccugaagcgccugcgggaccucaaccaggccgucaacaaccugguggagcugaaguccacccagcagaaguccauccuccgcguggggacccugaccuccgacgaccugcucauccuggccgccgaccuggagaagcucaagagcaaggucacccggaccgagcgcccccuguccgccggcguguacauggggaaccugagcucccagcagcucgaccagcggcgcgcgcugcugagcaugaucggcauguccgggagcaaccagggcgcccgggccggccgcgacggggugguccgggugugggacgugaagaacgccgagcuccugaacaaccaguucggcacgaugccgucccugacccucgcgugccugaccaagcaggggcaggucgaccugaacgacgccgugcaggcccucaccgaccugggccugaucuacacggccaaguaccccaacaccagcgaccucgaccgccugacccagagccaccccauccugaacaugaucgacaccaagaaguccagccucaacaucuccggguacaacuucagccugggcgccgcggugaaggccggcgccugcaugcuggacgggggcaacaugcucgagacgaucaaggucagcccccagaccauggacgggauccucaagagcauccugaaggugaagaaggcccugggcauguucaucuccgacaccccgggcgagcggaaccccuacgagaacauccuguacaagaucugccugagcggggacggcuggcccuacaucgccucccgcaccagcaucacggggcgggcgugggagaacaccguggucgaccucgaguccgacggcaagccccagaaggccgggagcaacaacuccaacaagagccugcaguccgccggcuucaccgccggccugaccuacagccagcucaugacgcugaaggacgccaugcugcagcuggacccgaacgcgaagaccuggauggacaucgaggggcgccccgaggaccccguggagguggcccucuaccagcccuccagcggcugcuacauccacuucuuccgggagccgaccgaccugaagcaguucaagcaggacgccaaguacucccacgggaucgacgucaccgaccuguucgccgcccagcccggccucacgagcgcggugaucgacgcccugccccgcaacauggugaucacgugccaggggagcgacgacauccgcaagcugcucgagucccagggccggaaggacaucaagcugaucgacaucgcccugagcaagaccgacucccgcaaguacgagaacgccgucugggaccaguacaaggaccucugccacaugcacaccggcguggucguggagaagaagaagcgcgggggcaaggaggagaucaccccgcacugcgcgcugauggacugcaucauguucgacgccgccgugagcgggggccugaacaccuccguccuccgggccgugcugccccgggacaugguguuccgcaccagcacgccccgggucgugcugugaggacuagucccuguucccagagcccacuuuuuuuucuuuuuuugaaauaaaauagccugucuuucagaucuaaaaaaaaaaaaaaaaaaaaaaaaaaaaaaaaaaaaaaaaaaaaaaaaaaaaaaaaaaaaaaaaaaaaaaaaaaaaaaaaaaaaaaaaaaaaaaaaaaaa

SEQ ID NO: 19700 - RNA, 2009 nt, Artificial Sequence
  mRNA product Design a-1 (A100) comprising derived and/or modified sequence from LASV(Mad39;Clade IV)__ANH09723__SP-HsALB_NP(2-569) (opt1)
aggagagucccgcagucggcguccagcggcucugcuuguucgugugugugucguugcaggccuuauucaagcuuaccaugaagugggugaccuucaucagccugcucuuccuguucuccagcgccuacuccagcgccuccaaggagaucaagagcuuccuguggacccagucccuccgccgggagcugagcggcuacugcuccaacaucaagcuccagguggucaaggacgcccaggcgcugcugcacgggcuggacuucagcgagguguccaacgugcagcgccucaugcggaagcagcgccgggacgacaacgaccugaagcgccugcgggaccucaaccaggccgucaacaaccugguggagcugaaguccacccagcagaaguccgugcuccgcgucggcacgcugaccagcgacgaccugcucacccuggccgccgaccuggagaagcucaaguccaaggugacccggacggagcgcccccugaccgccgggguguacaugggcaaccugagcucccagcagcucgaccagcggcgcgcgcugcugaacaugaucgggaugagcggcggcaaccagggggcccggaccggccgcgacggggucgugcgggugugggacgucaagaacgccgagcuccugaacaaccaguucggcaccaugccgucccugacgcucgccugccugaccaagcagggccagguggaccugaacgacgugguccaggcgcucaccgaccuggggcugaucuacaccgccaaguaccccaacacgagcgaccucgaccgccugacccagucccaccccauccugaacaugaucgacaccaacaagagcucccucaacaucagcggcuacaacuucagccugggggccgccgugaaggccggcgcgugcaugcuggacgggggcaacaugcucgagaccaucaaggugagcccccagacgauggacggcauccucaagagcauccugaaggucaagaagucccuggggauguucaucagcgacaccccgggcgagcggaaccccuacgagaacauccuguacaagaucugccuguccggggacggcuggcccuacaucgccagccgcaccuccaucaccgggcgggccugggagaacacggugguggaccucgagagcggcggcaagccccagaaggccggguccaacaacagcaacaagucccugcagagcgccggcuucgcggccgggcugaccuacucccagcucaugacccugaaggacgccaugcugcagcuggacccgaacgccaagaccuggauggacaucgagggccgccccgaggaccccgucgagaucgcccucuaccagcccaucagcgggugcuacauccacuucuuccgggagccgacggaccugaagcaguucaagcaggacgcgaaguacucccacggcaucgacgugaccgaccuguucgccgcccagcccggccucaccagcgccgugaucgaggcccugccccgcaacauggucaucacgugccagggguccgacgacauccgcaagcuguucgagagccagggccggaaggacaucaagcucaucgacaucgcgcuguccaagaccgacagccgcaaguacgagaacgccgugugggaccaguacaaggaccugugccacaugcacaccggggucgugguggagaagaagaagaagggcgggaaggaggagaucacgccccacugcgcccucauggacugcaucauguucgacgccgcggucagcggcggccugaacacccuggugcuccgggccgugcugccgcgcgacauggucuuccggaccuccacccccaagguggugcugugaggacuagucccuguucccagagcccacuuuuuuuucuuuuuuugaaauaaaauagccugucuuucagaucuaaaaaaaaaaaaaaaaaaaaaaaaaaaaaaaaaaaaaaaaaaaaaaaaaaaaaaaaaaaaaaaaaaaaaaaaaaaaaaaaaaaaaaaaaaaaaaaaaaaa

SEQ ID NO: 19701 - RNA, 2009 nt, Artificial Sequence
  mRNA product Design a-1 (A100) comprising derived and/or modified sequence from LASV(Z0947-SLE-2011;Clade IV)__AIT17841__SP-HsALB_NP(2-569) (opt1)
aggagagucccgcagucggcguccagcggcucugcuuguucgugugugugucguugcaggccuuauucaagcuuaccaugaagugggugaccuucaucagccugcucuuccuguucuccagcgccuacuccagcgccuccaaggagaucaagagcuuccuguggacccagucccuccgccgggagcugagcggcuacugcuccaacaucaagcuccagguggucaaggacgcccaggcgcugcugcacgggcuggacuucagcgagguguccaacgugcagcgccucaugcggaaggagcgccgggacgacaacgaccugaagcgccugcgggaccucaaccaggccgucaacaaccugguggagcucaagagcacccagcagaaguccauccugcgcgugggcacccugaccagcgacgaccugcucauccuggccgccgaccuggagaagcucaaguccaaggucacccggaccgagcgcccccugagcgccgggguguacaugggcaaccuguccagccagcagcucgaccagcggcgcgcgcugcugaacaugaucgggauguccggcagcaaccagggcgcccggacggggcgcgacggcgugguccgggugugggacgugaagaacgccgagcuccugaacaaccaguucgggaccaugccgucccugacccucgccugccugaccaagcagggccaggucgaccugaacgacgcggugcaggcccucacggaccuggggcugaucuacaccgccaaguaccccaacaccagcgaccucgaccgccugacccagucccaccccauccugaacaugaucgacacgaagaaguccagccucaacaucuccggcuacaacuucagccugggcgccgccgugaaggcgggggccugcaugcuggacggcgggaacaugcucgagaccaucaaggucagcccccagaccauggacggcauccucaagagcauccugaaggugaagaaggcccugggcauguucaucuccgacgccccgggggagcggaaccccuacgagaacauccuguacaagaucugccugagcggcgacggguggcccuacaucgccucccgcaccagcaucacgggccgggcgugggagaacaccguggucgaccucgaguccgacgggaagccccagaaggccggcagcaacggcuccaacaagagccugcaguccgccggguucaccgccggccugaccuacagccagcucaugacgcugaaggacgccaugcugcagcuggacccgaacgcgaagaccuggauggacaucgaggggcgccccgaggaccccguggagaucgcccucuaccagcccuccagcggcugcuacauccacuucuuccgggagccgaccgaccugaagcaguucaagcaggacgccaaguacucccacgggaucgacgugaccgaccuguucgccgcccagcccggccucacgagcgcggucaucgacgcccugccccgcaacauggugaucacgugccagggcuccgacgacauccgcaagcuguucgagagccaggggcggaaggacaucaagcucaucgacaucgcccugagcaagaccgacucccgcaaguacgagaacgccgugugggaccaguacaaggaccugugccacaugcacaccggcaucgucguggagaagaagaagcgcgggggcaaggaggagaucaccccgcacugcgcgcucauggacugcaucauguucgacgccgccgucagcgggggccugaacaccuccgugcugcgggccgugcucccccgggacauggucuuccgcaccagcacgccccggguggugcugugaggacuagucccuguucccagagcccacuuuuuuuucuuuuuuugaaauaaaauagccugucuuucagaucuaaaaaaaaaaaaaaaaaaaaaaaaaaaaaaaaaaaaaaaaaaaaaaaaaaaaaaaaaaaaaaaaaaaaaaaaaaaaaaaaaaaaaaaaaaaaaaaaaaaa

SEQ ID NO: 19702 - RNA, 2009 nt, Artificial Sequence
  mRNA product Design a-1 (A100) comprising derived and/or modified sequence from LASV(Josiah;Clade IV)__NP_694869__SP-HsALB_NP(2-569) (opt4)
aggagagucccgcagucggcguccagcggcucugcuuguucgugugugugucguugcaggccuuauucaagcuuaccaugaagugggugaccuucaucagccugcuguuccuguucagcagcgccuacagcagcgccagcaaggagaucaagagcuuccuguggacccagagccugagaagagagcugagcggcuacugcagcaacaucaagcugcagguggugaaggacgcccaggcccugcugcacggccuggacuucagcgaggugagcaacgugcagagacugaugagaaaggagagaagagacgacaacgaccugaagagacugagagaccugaaccaggccgugaacaaccugguggagcugaagagcacccagcagaagagcauccugagagugggcacccugaccagcgacgaccugcugauccuggccgccgaccuggagaagcugaagagcaaggugaucagaaccgagagaccccugagcgccggcguguacaugggcaaccugagcagccagcagcuggaccagagaagagcccugcugaacaugaucggcaugagcggcggcaaccagggcgccagagccggcagagacggcguggugagagugugggacgugaagaacgccgagcugcugaacaaccaguucggcaccaugcccagccugacccuggccugccugaccaagcagggccagguggaccugaacgacgccgugcaggcccugaccgaccugggccugaucuacaccgccaaguaccccaacaccagcgaccuggacagacugacccagagccaccccauccugaacaugaucgacaccaagaagagcagccugaacaucagcggcuacaacuucagccugggcgccgccgugaaggccggcgccugcaugcuggacggcggcaacaugcuggagaccaucaaggugagcccccagaccauggacggcauccugaagagcauccugaaggugaagaaggcccugggcauguucaucagcgacacccccggcgagagaaaccccuacgagaacauccuguacaagaucugccugagcggcgacggcuggcccuacaucgccagcagaaccagcaucaccggcagagccugggagaacaccgugguggaccuggagagcgacggcaagccccagaaggccgacagcaacaacagcagcaagagccugcagagcgccggcuucaccgccggccugaccuacagccagcugaugacccugaaggacgccaugcugcagcuggaccccaacgccaagaccuggauggacaucgagggcagacccgaggaccccguggagaucgcccuguaccagcccagcagcggcugcuacauccacuucuucagagagcccaccgaccugaagcaguucaagcaggacgccaaguacagccacggcaucgacgugaccgaccuguucgccacccagcccggccugaccagcgccgugaucgacgcccugcccagaaacauggugaucaccugccagggcagcgacgacaucagaaagcugcuggagagccagggcagaaaggacaucaagcugaucgacaucgcccugagcaagaccgacagcagaaaguacgagaacgccgugugggaccaguacaaggaccugugccacaugcacaccggcguggugguggagaagaagaagagaggcggcaaggaggagaucaccccccacugcgcccugauggacugcaucauguucgacgccgccgugagcggcggccugaacaccagcgugcugagagccgugcugcccagagacaugguguucagaaccagcacccccagaguggugcugugaggacuagucccuguucccagagcccacuuuuuuuucuuuuuuugaaauaaaauagccugucuuucagaucuaaaaaaaaaaaaaaaaaaaaaaaaaaaaaaaaaaaaaaaaaaaaaaaaaaaaaaaaaaaaaaaaaaaaaaaaaaaaaaaaaaaaaaaaaaaaaaaaaaaa

SEQ ID NO: 19703 - RNA, 2009 nt, Artificial Sequence
  mRNA product Design a-1 (A100) comprising derived and/or modified sequence from LASV(LP;Clade I)__AAF86702__SP-HsALB_NP(2-569) (opt4)
aggagagucccgcagucggcguccagcggcucugcuuguucgugugugugucguugcaggccuuauucaagcuuaccaugaagugggugaccuucaucagccugcuguuccuguucagcagcgccuacagcagcaacagcaaggagaucaagagcuuccuguggacccagagccugagaagagagcugagcggcuacugcagcaacaucaagcugcagguggugaaggacgcccaggcccugcugcacggccuggacuucagcgaggugagcaacgugcagagacugaugagaaagcagaagagagacgacgccgaccugaagagacugagagaccugaaccaggccgugaacaaccugguggagcugaagagcacccagcagaagaacgugcugagagugggcacccugagcagcgacgaccugaucacccuggccgccgaccuggagaagcugaagagcaaggugaucagaaccgagagaccccugagcagcggcguguacaugggcaaccugagcagccagcagcuggaccagagaagagcccugcugagcaugaucggcaugagcggcggcccccagggcaacagaaccggcggcgacggcguggugagagugugggacgugaagaacgccgagcugcugaacaaccaguucggcaccaugcccagccugacccuggccugccugaccaagcagggccagguggaccugaacgacgccgugcaggcccugaccgaccugggccugaucuacaccgccaaguaccccaacagcagcgaccuggacaugcugacccagagccaccccauccugggcaugguggacaccaagaagagcagccugaacaucagcggcuacaacuucagccugggcgccgccgugaaggccggcgccugcaugcuggacggcggcaacaugcuggagaccaucaaggugagcccccagaccauggacggcauccugaagagcauccugaaggugaagagaagccugggcauguucaucagcgacacccccggcgagagaaaccccuacgagaacauccuguacaagaucugccugagcggcgagggcuggcccuacaucgccagcagaaccagcaucaccggcagagccugggagaacacccugguggaccuggagagcgacaacaagccccccaagcugaacagcgccggcagcaacaagagccugcaggccgccggccugaacgccggccugaccuacagccagcugaugacccugaaggacugcaugcugcagcuggaccccagcagcaagaccuggaucgacaucgagggcagacccgaggaccccguggagaucgcccuguuccagcccagcagcggcugcuacauccacuucuucagagagcccaccgaccugaagcaguucaagcaggacgccaaguacagccacggcaucgacgugaccgaccuguucagcacccagcccggccugaccagcgccgugaucgaggcccugcccagaaacauggugcugaccugccagggcagcgacgacaucaagaagcugcuggagagccagggcagaagagacaucaagcugaucgacaucagccugagcaaggccgacagcagaaaguucgagaacgccgugugggaccaguacaaggaccugugccacaugcacaccggcguggugguggagaagaagaagagaggcggcaaggaggagaucaccccccacugcgcccugcuggacugcaucauguucgacgccgccaccaccggcagccugaacaucaccacccugagagccgugcugcccagagacaugguguucagaaccagcacccccaagguggugcugugaggacuagucccuguucccagagcccacuuuuuuuucuuuuuuugaaauaaaauagccugucuuucagaucuaaaaaaaaaaaaaaaaaaaaaaaaaaaaaaaaaaaaaaaaaaaaaaaaaaaaaaaaaaaaaaaaaaaaaaaaaaaaaaaaaaaaaaaaaaaaaaaaaaaa

SEQ ID NO: 19704 - RNA, 2009 nt, Artificial Sequence
  mRNA product Design a-1 (A100) comprising derived and/or modified sequence from LASV(803213;Clade II)__AAF86704__SP-HsALB_NP(2-569) (opt4)
aggagagucccgcagucggcguccagcggcucugcuuguucgugugugugucguugcaggccuuauucaagcuuaccaugaagugggugaccuucaucagccugcuguuccuguucagcagcgccuacagcagcgccagcaaggaggugaagagcuuccuguggacccagagccugagaagagagcugagcggcuacugcagcaacaucaagcugcagguggugaaggacgcccaggcccugcugcacggccuggacuucagcgaggugaacaacgugcagagacugaugagaaagcagaagagagacgacggcgaccugaagagacugagagaccugaaccaggccgugaacaaccugguggagcugaagagcacccagcagaagagcauccugagagugggcacccugaccagcgacgaccugcugacccuggccgccgaccuggagaagcugaagagcaaggugaucagaaccgagagaccccugagcagcggcguguacaugggcaaccugagcacccagcagcuggagcagagaagagcccugcugaacaugaucggcauggugggcggcgcccagggcacccagcccggcagagacggcguggugagagugugggacgugaagaaccccgaccugcugaacaaccaguucggcaccaugcccagccugacccuggccugccugaccaagcagggccagguggaccugaacgacgccgugcuggcccugaccgaccugggccugaucuacaccgccaaguaccccaacagcagcgaccuggacagacugagccagagccaccccauccugaacaugguggacaccaagaagagcagccugaacaucagcggcuacaacuucagccugggcgccgccgugaaggccggcgccugcaugcuggacggcggcaacaugcuggagaccaucaaggugaccccccagaccauggacggcauccugaagagcauccugaaggugaagagaagccugggcauguucgugagcgacacccccggcgagagaaaccccuacgagaacauccuguacaagaucugccugagcggcgacggcuggcccuacaucgccagcagaaccagcaucgugggcagagccugggagaacaccaccguggaccuggagagcgacggcaagccccagaaggugggcaccgccggcagcaacaagagccugcagagcgccggcuuccccaccggccugaccuacagccagcugaugacccugaaggacagcaugaugcagcuggaccccagcgccaagaccuggaucgacaucgagggcagacccgaggaccccguggagaucgcccuguaccagcccaugagcggcugcuacauccacuucuucagagagcccaccgaccugaagcaguucaagcaggacgccaaguacagccacggcaucgacguggccgaccuguuccccgcccagcccggccugaccagcgccgugaucgaggcccugcccagaaacauggugcugaccugccagggcagcgacgacaucaagaagcugcuggacagccagggcagaagagacaucaagcugaucgacaucagccugagcaagguggacagcagaaaguucgagaacgccgugugggaccagugcaaggaccugugccacaugcacaccggcguggugguggagaagaagaagagaggcggcaaggaggagaucaccccccacugcgcccugauggacugcaucauguucgacgccgccgugagcggcggccugaacauccccgugcugagagccgugcugcccagagacaugguguucagaaccagcagccccaagguggugcugugaggacuagucccuguucccagagcccacuuuuuuuucuuuuuuugaaauaaaauagccugucuuucagaucuaaaaaaaaaaaaaaaaaaaaaaaaaaaaaaaaaaaaaaaaaaaaaaaaaaaaaaaaaaaaaaaaaaaaaaaaaaaaaaaaaaaaaaaaaaaaaaaaaaaa

SEQ ID NO: 19705 - RNA, 2012 nt, Artificial Sequence
  mRNA product Design a-1 (A100) comprising derived and/or modified sequence from LASV(GA391;Clade III)__CAA36646__SP-HsALB_NP(2-570) (opt4)
aggagagucccgcagucggcguccagcggcucugcuuguucgugugugugucguugcaggccuuauucaagcuuaccaugaagugggugaccuucaucagccugcuguuccuguucagcagcgccuacagcagcgccagcaaggaggugagaagcuuccuguggacccagagccugagaagagagcugagcggcuacugcagcaacaucaagcugcagguggugaaggacgcccaggcccugcugcacggccuggacuucagcgaggugagcaacgugcagagacugaugagaaagcagaagagagacgacggcgaccugaagagacugagagaccugaaccaggccgugaacaaccugguggagcugaagagcacccagcagaagagcgugcugagagugggcacccugagcagcgacgaccugcugauccuggccgccgaccuggagaagcugaagagcaaggugaccagaaccgagagaccccugagcagcggcguguacaugggcaaccugagcagccagcagcuggaccagagaagagcccugcugaacaugaucggcaugaccggcgugagcggcggcggcaagggcgccagcgacggcaucgugagagugugggacgugaagaacgccgagcugcugaacaaccaguucggcaccaugcccagccugacccuggccugccugaccaagcagggccagguggaccugaacgacgccgugcaggcccugaccgaccugggccugaucuacaccgccaaguaccccaacagcagcgaccuggacagacugagccagagccaccccauccugaacaugaucgacaccaagaagagcagccugaacaucagcggcuacaacuucagccugggcgccgccgugaaggccggcgccugcaugcuggacggcggcaacaugcuggagaccaucaaggugagcccccagaccauggacggcauccugaagagcauccugaaggugaagaagagccugggcauguucgugagcgacacccccggcgagagaaaccccuacgagaacauccuguacaagaucugccugagcggcgacggcuggcccuacaucgccagcagaaccagcaucgugggcagagccugggagaacaccgugguggaccuggagcaggacaacaagccccagaagaucggcaacggcggcagcaacaagagccugcagagcgccggcuucgccgccggccugaccuacagccagcugaugacccugaaggacuucaagugcuucaaccugauccccaacgccaagaccuggauggacaucgagggcagacccgaggaccccguggagaucgcccuguaccagcccagcagcggcugcuacgugcacuucuucagagagcccaccgaccugaagcaguucaagcaggacgccaaguacagccacggcaucgacgugaccgaccuguucgccgcccagcccggccugaccagcgccgugaucgaggcccugcccagaaacauggugaucaccugccagggcagcgaggacaucagaaagcugcuggagagccagggcagaagagacaucaagcugaucgacaucacccugagcaaggccgacagcagaaaguucgagaacgccgugugggaccaguucaaggaccugugccacaugcacaccggcguggugguggagaagaagaagagaggcggcaaggaggagaucaccccccacugcgcccugauggacugcaucauguucgacgccgccgugagcggcggccuggacgccaaggugcugagaguggugcugcccagagacaugguguucagaaccagcacccccaagguggugcugugaggacuagucccuguucccagagcccacuuuuuuuucuuuuuuugaaauaaaauagccugucuuucagaucuaaaaaaaaaaaaaaaaaaaaaaaaaaaaaaaaaaaaaaaaaaaaaaaaaaaaaaaaaaaaaaaaaaaaaaaaaaaaaaaaaaaaaaaaaaaaaaaaaaaa

SEQ ID NO: 19706 - RNA, 2009 nt, Artificial Sequence
  mRNA product Design a-1 (A100) comprising derived and/or modified sequence from LASV(AV;Clade V)__CCA30315__SP-HsALB_NP(2-569) (opt4)
aggagagucccgcagucggcguccagcggcucugcuuguucgugugugugucguugcaggccuuauucaagcuuaccaugaagugggugaccuucaucagccugcuguuccuguucagcagcgccuacagcagcgccagcaaggaggugaagagcuuccuguggacccagagccugagaagagagcugagcggcuacugcagcaacaucaagcugcagguggugaaggacgcccaggcccugcugcacggccuggacuucagcgaggugagcaacgugcagagacugaugagaaagcagagaagagacgacagcgaccugaagagacugagagaccugaaccaggccgugaacaaccugguggagcugaagagcacccagcagaagagcgugcugagagugggcacccugagcagcgacgaccugcugacccuggccgccgaccuggagaagcugaagagcaaggugaccagaaccgagagaccccugagcagcggcguguacaugggcaaccugagcagccagcagcuggaccagagaagagcccugcugaaccugaucggcaugaccaacggcagccagggcagccaggccggcagagacggcguggugagagugugggacgugaagaacgccgagcugcugaacaaccaguucggcaccaugcccagccugacccuggccugccugaccaagcagggccagguggaccugaacgacguggugcaggcccugaccgaccugggccugaucuacaccgccaaguaccccaacaccagcgaccuggacagacugacccagagccaccccauccugaacaugaucgacaccaagaagagcagccugaacaucagcggcuacaacuucagccugggcgccgccgugaaggccggcgccugcaugcuggacggcggcaacaugcuggagaccaucaaggugagcccccagagcauggacggcauccugaagagcauccugaaggugaagagagcccugggcauguucgugagcgacacccccggcgagagaaaccccuacgagaacauccuguacaagaucugccugagcggcgacggcuggcccuacaucgccagcagaaccagcaucgugggcagagccugggagaacaccgugguggaccuggagaccgacggcaagccccagaagaucggcagcggcaacagcaacaagagccugcagagcgccggcuucagcgccggccugaccuacagccagcugaugacccugaaggacgccaugcugcagcuggaccccaacgccaagaccuggauggacaucgagggcagacccgaggaccccguggagguggcccuguaccagcccaucagcggcugcuacauccacuucuucagagagcccaccgaccugaagcaguucaagcaggacgccaaguacagccacggcaucgacaucgccgaccuguucgccgcccagcccggccugaccagcgccgugaucgaggcccugcccagaaacauggugaucaccugccagggcagcgaggacaucaagaagcugcuggagagccagggcagaaaggacaucaagcugaucgacaucgcccugagcaagaucgacagcagaaaguucgagaacgccgugugggaccaguacaaggaccugugccacaugcacaccggcguggugguggagaagaagaagagaggcggcaaggaggagaucaccccccacugcgcccugauggacugcaucauguucgacgccgccgugagcggcggccugaacacccuggugcugagagccgugcugcccagagacaugguguucagaaccagcacccccagaguggugcugugaggacuagucccuguucccagagcccacuuuuuuuucuuuuuuugaaauaaaauagccugucuuucagaucuaaaaaaaaaaaaaaaaaaaaaaaaaaaaaaaaaaaaaaaaaaaaaaaaaaaaaaaaaaaaaaaaaaaaaaaaaaaaaaaaaaaaaaaaaaaaaaaaaaaa

SEQ ID NO: 19707 - RNA, 2009 nt, Artificial Sequence
  mRNA product Design a-1 (A100) comprising derived and/or modified sequence from LASV(Togo/2016/7082;Clade VI)__AMR44578__SP-HsALB_NP(2-569) (opt4)
aggagagucccgcagucggcguccagcggcucugcuuguucgugugugugucguugcaggccuuauucaagcuuaccaugaagugggugaccuucaucagccugcuguuccuguucagcagcgccuacagcagcaacagcaaggaggugaagagcuuccuguggacccagagccugagaagagagcugagcggcuacugcagcaacaucaagcugcagguggugaaggacgcccaggcccugcugcacggccuggacuucagcgaggugagcaacgugcagagacugaugagaaagcagaagagagacgacggcgaccugaagagacugagagaccugaaccaggccgugaacaaccugguggagcugaagagcgugcagcagaagagcauccugagagugggcacccugaccagcgacgaccugcugacccuggccgccgaccuggagaagcugaagagcaaggugaccagaaccgagagaccccugagcagcggcguguacaugggcaaccugagcagccagcagcuggaccagagaagagcccugcugagcaugaucggcaugagcggcggcaaccagaacagccagcccaagggcgacggcguggugagagugugggacgugaagaacgccgaccugcugaacaaccaguucggcaccaugcccagccugacccuggccugccugaccaagcagggccagguggaccugaacgacgccgugcaggcccugaccgaccugggccugaucuacaccgccaaguaccccaacagcagcgaccuggacagacugagccagagccaccccauccugaacaugaucgacaccaagaagagcagccugaacaucagcggcuacaacuucagccugggcgccgccaucaagaccggcgccugcaugcuggacggcggcaacaugcuggagaccaucaaggugaccccccagaccauggacggcauccugaagagcauccugaaggugaagagaagccugggcauguucaucagcgacacccccggcgagagaaaccccuacgagaacauccuguacaagaucugccugagcggcgacggcuggcccuacaucgccagcagaaccgccaucaucggcagagccugggagaacaccgugguggaccuggagagcgacagcaagccccagaagaucggcagcaacggcagcaacaagagccugcagagcgccggcuucgcccccggccugaccuacagccagcugaugacccugaaggacagcaugcugcagcuggaccccaacgccaagaccuggaucgacaucgagggcagacccgaggaccccguggagguggcccuguuccagcccaucagcggcugcuacauccacuucuucagagagcccaccgaccugaagcaguucaagcaggacgccaaguacagccacggcaucgacgugaccgaccuguucgccgcccagcccggccugaccagcgccgugaucgaggcccugcccagaaacauggugcugaccugccagggcagcgacgacaucaagaagcugcuggacagccagggcagaagagacaucaagcugaucgacgugagccugaacaagaucgacagcagaaaguucgagaacgccgugugggaccaguacaaggaccugugccacaugcacaccggcguggugguggagaagaagaagaagggcggcaaggaggagaucaccccccacugcgcccugcuggacugcaucauguucgacgccgccgugagcggcggccugaacgccaccgugcugagagccgugcugcccagagacaugguguucagaaccagcagccccaagguggugcugugaggacuagucccuguucccagagcccacuuuuuuuucuuuuuuugaaauaaaauagccugucuuucagaucuaaaaaaaaaaaaaaaaaaaaaaaaaaaaaaaaaaaaaaaaaaaaaaaaaaaaaaaaaaaaaaaaaaaaaaaaaaaaaaaaaaaaaaaaaaaaaaaaaaaa

SEQ ID NO: 19708 - RNA, 2009 nt, Artificial Sequence
  mRNA product Design a-1 (A100) comprising derived and/or modified sequence from LASV(KAK-428;Clade n.d. (VII))__ANH09741__SP-HsALB_NP(2-569) (opt4)
aggagagucccgcagucggcguccagcggcucugcuuguucgugugugugucguugcaggccuuauucaagcuuaccaugaagugggugaccuucaucagccugcuguuccuguucagcagcgccuacagcagcaacagcaaggaggugaagagcuuccuguggacccagagccugagaagagagcugagcggcuacugcaccaacaucaagcugcagguggugaaggacgcccaggcccugcugcacggccuggacuucagcgaggugagcaacgugcagagacugaugagaaagcagaagagagacgacaacgaccugaagagacugagagaccugaaccaggccgugaacaaccugguggagcugaagagcgugcagcagaagagcgugcugaaggugggcacccugaacagcgacgaccugcugacccuggccgccgaccuggagaagcugaagagcaagguggugagaaccgagagaccccugagcagcggcguguacaugggcaaccugagcagccagcagcuggaccagagaagagcccugcugaacaugaucggcauggccggcggcagccagggcaaccagcccagcagagacggcguggugagagugugggacgugaagaacgccgaccugcugaacaaccaguucggcaccaugcccagccugacccuggccugccugaccaagcagggccagguggaccugaacgacguggugcuggcccugaccgaccugggccugaucuacaccgccaaguaccccaacagcagcgaccuggacagacugagccagaaccaccccgugcugaacaugaucgacgugaacaagagcagccugaacaucagcggcuacaacuucagccugggcgccgccgugaaggccggcgccugcaugcuggacggcggcaacaugcuggagaccaucaagaucagcccccagaccguggacggcauccugaagagcauccugaaggugaagagagcccugggcauguucgugagcgacacccccggcgagagaaaccccuacgagaacauccuguacaaggugugccugagcggcaacggcuggcccuacaucgccagcagaaccagcaucgugggcagagccugggagaacaccgugguggaccuggagagcaacaagaaccagcccaaggugggcaacaacggcagcaacaagaugcugcagagcagcggcuucgccaccggccugaccuacagccagcugaugacccugagagacagcaugcugcagcuggaccccaccgccaagaccuggaucgacaucgagggcagacccgaggaccccguggagcuggcccuguuccagcccagcagcggcugcuacauccacuucuucagagagcccaccgaccugaagcaguucaagcaggacgccaaguacagccacggcaucgacgugaacgaccuguucagcgcccagcccggccugaccagcgccgugcuggaggcccugcccagaaacauggugcugaccugccagggcagcgacgacaucagaaagcugcuggacagccaggacagaaaggacaucaagcugaucgacaucagccugagcaaggccgacgccagaaaguucgagaacgacgugugggaccaguucaaggaccugugccacaugcacaccggcaucgugguggagaagaagaagaagggcggcaagcaggagaugaccccccacugcgcccugcuggacugcaucauguucgacgccgccgugagcggcggccugaacgugcccacccugagagccgugcugcccaccgacaugguguucagaaccaucaccaccaagguggugcugugaggacuagucccuguucccagagcccacuuuuuuuucuuuuuuugaaauaaaauagccugucuuucagaucuaaaaaaaaaaaaaaaaaaaaaaaaaaaaaaaaaaaaaaaaaaaaaaaaaaaaaaaaaaaaaaaaaaaaaaaaaaaaaaaaaaaaaaaaaaaaaaaaaaaa

SEQ ID NO: 19709 - RNA, 2009 nt, Artificial Sequence; identical to SEQ ID NO: 19703
  mRNA product Design a-1 (A100) comprising derived and/or modified sequence from LASV(Pinneo-NIG-1969;Clade I)__AIT17837__SP-HsALB_NP(2-569) (opt4)

SEQ ID NO: 19710 - RNA, 2009 nt, Artificial Sequence
  mRNA product Design a-1 (A100) comprising derived and/or modified sequence from LASV(ISTH0009-NIG-2011;Clade II)__AIT17405__SP-HsALB_NP(2-569) (opt4)
aggagagucccgcagucggcguccagcggcucugcuuguucgugugugugucguugcaggccuuauucaagcuuaccaugaagugggugaccuucaucagccugcuguuccuguucagcagcgccuacagcagcgugagcaaggaggugaagagcuuccuguggacccagagccugagaagagagcugagcggcuacugcagcaacaucaagcugcagguggugaaggacgcccaggcccugcugcacggccuggacuucagcgaggugagcaacgugcagagacugaugagaaagcagaagagagacgacagcgaccugaagagacugagagaccugaaccaggccgugaacaaccugguggagcugaagagcacccagcagaagagcauccugagagugggcacccugaccagcgacgaccugcugacccuggccgccgaccuggagaagcugaagagcaaggugaucagaaccgagagaccccugagcagcggcguguacaugggcaaccugagcacccagcagcuggagcagagaagagcccugcugaacaugaucggcauggugggcggcgcccagggcacccagcccggcagagacggcguggugagagugugggacgugaagaaccccgaccugcugaacaaccaguucggcaccaugcccagccugacccuggccugccugaccaagcagggccagguggaccugaacgacgccgugcuggcccugaccgaccugggccugaucuacaccgccaaguaccccaacagcagcgaccuggacagacugagccagagccaccccauccugaacaugguggacaucaagaagagcagccugaacaucagcggcuacaacuucagccugggcgccgccgugaaggccggcgccugcaugcuggacggcggcaacaugcuggagaccaucaaggugaccccccagaccauggacggcauccugaagagcauccugaaggugaagagaagccugggcauguucgugagcgacacccccggcgagagaaaccccuacgagaacauccuguacaagaucugccugagcggcgacggcuggcccuacaucgccagcagaaccagcaucgugggcagagccugggagaacaccaccguggaccuggagagcgacggcaagccccagaaggugggcagcgccggcagcaacaagagccugcagagcgccggcuuccccaccggccugaccuacagccagcugaugacccugaaggacagcaugaugcagcuggaccccagcgccaagaccuggaucgacaucgagggcagacccgaggaccccguggagaucgcccuguaccagcccaugagcggcugcuacauccacuucuucagagagcccaccgaccugaagcaguucaagcaggacgccaaguacagccacggcaucgacguggccgaccuguuccccgcccagcccggccugaccagcgccgugaucgaggcccugcccagaaacauggugcugaccugccagggcagcgacgacaucaagagacugcuggacagccagggcagaagagacaucaagcugaucgacaucgcccugagcaaggccgacagcagaagauucgagaacgccgugugggaccagugcaaggaccugugccacaugcacaccggcguggugguggagaagaagaagagaggcggcaaggaggagaucaccccccacugcgcccugauggacugcaucauguacgacgccgccgugagcggcggccugaacauccccgugcugagagccgugcugcccagagacaugguguucagaaccagcagccccaagguggugcugugaggacuagucccuguucccagagcccacuuuuuuuucuuuuuuugaaauaaaauagccugucuuucagaucuaaaaaaaaaaaaaaaaaaaaaaaaaaaaaaaaaaaaaaaaaaaaaaaaaaaaaaaaaaaaaaaaaaaaaaaaaaaaaaaaaaaaaaaaaaaaaaaaaaaa

SEQ ID NO: 19711 - RNA, 2009 nt, Artificial Sequence
  mRNA product Design a-1 (A100) comprising derived and/or modified sequence from LASV(ISTH2010-NIG-2012;Clade II)__AIT17483__SP-HsALB_NP(2-569) (opt4)
aggagagucccgcagucggcguccagcggcucugcuuguucgugugugugucguugcaggccuuauucaagcuuaccaugaagugggugaccuucaucagccugcuguuccuguucagcagcgccuacagcagcgccagcaaggaggugaagagcuuccuguggacccagagccugagaagagagcugagcggcuacugcagcaacaucaagcugcagguggugaaggacgcccaggcccugcugcacggccuggacuucagcgaggugagcaacgugcagagacugaugagaaagcagaagagagacgacagcgaccugaagagacugagagaccugaaccaggccgugaacaaccugguggagcugaagagcacccagcagaagagcauccugagagugggcacccugaccagcgacgaccugcugacccuggccgccgaccuggagaagcugaagagcaaggugaucagaaccgagagaccccugagcagcggcguguacaugggcaaccugagcacccagcagcuggagcagagaagagcccugcugaaccugaucggcauggugggcggcgcccagggcacccagcccggcagagacggcguggugagagugugggacgugaagaaccccgaccugcugaacaaccaguucggcaccaugcccagccugacccuggccugccugaccaagcagggccagguggaccugaacgacgccgugcuggcccugaccgaccugggccugaucuacaccgccaaguaccccaacagcagcgaccuggacagacugagccagagccaccccauccugaacaugguggacaccaagaagagcagccugaacaucagcggcuucaacuucagccugggcgccgccgugaaggccggcgccugcaugcuggacggcggcaacaugcuggagaccaucaaggugaccccccagaccauggacggcauccugaagagcauccugaaggugaagaagagccugggcauguucgugagcgacacccccggcgagagaaaccccuacgagaacauccuguacaagaucugccugagcggcgacggcuggcccuacaucgccagcagaaccagcaucgugggcagagccugggagaacaccaccguggaccuggagagcgacggcaagccccacaaggugggcaccgccggcagcaacaagagccugcagagcgccggcuuccccaccggccugaccuacagccagcugaugacccugaaggacagcaugaugcagcuggaccccagcgccaagaccuggaucgacaucgagggcagacccgaggaccccguggagaucgcccuguaccagcccaugagcggcugcuacauccacuucuucagagagcccaccgaccugaagcaguucaagcaggacgccaaguacagccacggcaucgacguggccgaccuguuccccgcccagcccggccugaccagcgccgugaucgaggcccugcccagaaacauggugcugaccugccagggcagcgacgacaucaagagacugcuggacagccagggcagaagagacaucaagcugaucgacaucgcccugagcaaggccgacagcagaagauucgagaacgccgugugggaccagugcaaggaccugugccacaugcacaccggcguggugguggagaagaagaagagaggcggcaaggaggagaucaccccccacugcgcccugauggacugcaucauguacgacgccgccgugagcggcggccugaacauccccgugcugagagccgugcugcccagagacaugguguucagaaccagcagccccaagguggugcugugaggacuagucccuguucccagagcccacuuuuuuuucuuuuuuugaaauaaaauagccugucuuucagaucuaaaaaaaaaaaaaaaaaaaaaaaaaaaaaaaaaaaaaaaaaaaaaaaaaaaaaaaaaaaaaaaaaaaaaaaaaaaaaaaaaaaaaaaaaaaaaaaaaaaa

SEQ ID NO: 19712 - RNA, 2009 nt, Artificial Sequence
  mRNA product Design a-1 (A100) comprising derived and/or modified sequence from LASV(Lassa virus/H.sapiens-wt/NGA/2015/ISTH_0543;Clade II)__AVO03640__SP-HsALB_NP(2-569) (opt4)
aggagagucccgcagucggcguccagcggcucugcuuguucgugugugugucguugcaggccuuauucaagcuuaccaugaagugggugaccuucaucagccugcuguuccuguucagcagcgccuacagcagcgccagcaaggaggugaagagcuuccuguggacccagagccugagaagagagcugagcggcuacugcagcaacaucaagcugcagguggugaaggacgcccaggcccugcugcacggccuggacuucagcgaggugagcaacgugcagagacugaugagaaagcagaagagagacgacagcgaccugaagagacugagagaccugaaccaggccgugaacaaccugguggagcugaagagcacccagcagaagagcauccugagagugggcacccugaccagcgacgaccugcugacccuggccgccgaccuggagaagcugaagagcaaggugaucagaaccgagagaccccugagcagcggcguguacaugggcaaccugagcacccagcagcuggagcagagaagagcccugcugaacaugaucggcauggugggcggcgcccagggcacccagcccggcagagacggcguggugagagugugggacgugaagaaccccgaccugcugaacaaccaguucggcaccaugcccagccugacccuggccugccugaccaagcagggccagguggaccugaacgacgccgugcuggcccugaccgaccugggccugaucuacaccgccaaguaccccaacagcagcgaccuggacagacugagccagagccaccccauccugaacaugguggacaccaagaagagcagccugaacaucagcggcuacaacuucagccugggcgccgccgugaaggccggcgccugcaugcuggacggcggcaacaugcuggagaccaucaaggugaccccccagaccauggacggcauccugaagagcauccugaaggugaagaagagccugggcauguucgugagcgacacccccggcgagagaaaccccuacgagaacauccuguacaagaucugccugagcggcgacggcuggcccuacaucgccagcagaaccagcaucgugggcagagccugggagaacaccaccguggaccuggagagcgacggcaagccccagaaggugggcagcgccggcagcaacaagagccugcagagcgccggcuuccccaccggccugaccuacagccagcugaugacccugaaggacagcaugaugcagcuggaccccagcgccaagaccuggaucgacaucgagggcagacccgaggaccccguggagaucgcccuguaccagcccaugagcggcugcuacauccacuucuucagagagcccaccgaccugaagcaguucaagcaggacgccaaguacagccacggcaucgacguggccgaccuguuccccgcccagcccggccugaccagcgccgugaucgaggcccugcccagaaacauggugcugaccugccagggcagcgacgacaucaagagacugcuggacagccagggcagaaaggacaucaagcugaucgacaucgcccugagcaaggccgacagcagaagauucgagaacgccgugugggaccagugcaaggaccugugccacaugcacaccggcguggugguggagaagaagaagagaggcggcaaggaggagaucaccccccacugcgcccugauggacugcaucauguacgacgccgccgugagcggcggccugaacauccccgugcugagagccgugcugcccagagacaugguguucagaaccagcagccccaagguggugcugugaggacuagucccuguucccagagcccacuuuuuuuucuuuuuuugaaauaaaauagccugucuuucagaucuaaaaaaaaaaaaaaaaaaaaaaaaaaaaaaaaaaaaaaaaaaaaaaaaaaaaaaaaaaaaaaaaaaaaaaaaaaaaaaaaaaaaaaaaaaaaaaaaaaaa

SEQ ID NO: 19713 - RNA, 2009 nt, Artificial Sequence
  mRNA product Design a-1 (A100) comprising derived and/or modified sequence from LASV(Lassa virus/H.sapiens-wt/NGA/2016/ISTH_0009;Clade II)__AVO03572__SP-HsALB_NP(2-569) (opt4)
aggagagucccgcagucggcguccagcggcucugcuuguucgugugugugucguugcaggccuuauucaagcuuaccaugaagugggugaccuucaucagccugcuguuccuguucagcagcgccuacagcagcgccagcaaggaggugaagagcuuccuguggacccagagccugagaagagagcugagcggcuacugcagcaacaucaagcugcagguggugaaggacgcccaggcccugcugcacggccuggacuucagcgaggugagcaacgugcagagacugaugagaaagcagaagagagacgacagcgaccugaagagacugagagaccugaaccaggccgugaacaaccugguggagcugaagagcacccagcagaagagcauccugagagugggcacccugaccagcgacgaccugcugacccuggccgccgaccuggagaagcugaagagcaaggugaucagaaccgagagaccccugagcagcggcguguacaugggcaaccugagcacccagcagcuggagcagagaagagcccugcugaacaugaucggcauggugggcggcgcccagggcacccagcccggcagagacggcguggugagagugugggacgugaagaaccccgaccugcugaacaaccaguucggcaccaugcccagccugacccuggccugccugaccaagcagggccagguggaccugaacgacgccgugcuggcccugaccgaccugggccugaucuacaccgccaaguaccccaacagcagcgaccuggacagacugagccagagccaccccauccugaacaugguggacaccaagaagagcagccugaacaucagcggcuacaacuucagccugggcgccgccgugaaggccggcgccugcaugcuggacggcggcaacaugcuggagaccaucaaggugaccccccagaccauggacggcauccugaagagcauccugaaggugaagaagagccugggcauguucgugagcgacacccccggcgagagaaaccccuacgagaacauccuguacaagaucugccugagcggcgacggcuggcccuacaucgccagcagaaccagcaucgugggcagagccugggagaacaccaccguggaccuggagagcgacggcaagccccagaaggugggcagcgccggcagcaacaagagccugcagagcgccggcuuccccaccggccugaccuacagccagcugaugacccugaaggacagcaugaugcagcuggaccccagcgccaagaccuggaucgacaucgagggcagacccgaggaccccguggagaucgcccuguaccagcccaugagcggcugcuacauccacuucuucagagagcccaccgaccugaagcaguucaagcaggacgccaaguacagccacggcaucgacguggccgaccuguuccccgcccagcccggccugaccagcgccgugaucgaggcccugcccagaaacauggugcugaccugccagggcagcgacgacaucaagagacugcuggacagccagggcagaagagacaucaagcugaucgacaucgcccugagcaaggccgacagcagaagauucgagaacgccgugugggaccagugcaaggaccugugccacaugcacaccggcguggugguggagaagaagaagagaggcggcaaggaggagaucaccccccacugcgcccugauggacugcaucauguacgacgccgccgugagcggcggccugaacauccccgugcugagagccgugcugcccagagacaugguguucagaaccagcagccccaagguggugcugugaggacuagucccuguucccagagcccacuuuuuuuucuuuuuuugaaauaaaauagccugucuuucagaucuaaaaaaaaaaaaaaaaaaaaaaaaaaaaaaaaaaaaaaaaaaaaaaaaaaaaaaaaaaaaaaaaaaaaaaaaaaaaaaaaaaaaaaaaaaaaaaaaaaaa

SEQ ID NO: 19714 - RNA, 2009 nt, Artificial Sequence
  mRNA product Design a-1 (A100) comprising derived and/or modified sequence from LASV(Lassa virus/H.sapiens-wt/NGA/2016/ISTH_0017;Clade II)__AVO03568__SP-HsALB_NP(2-569) (opt4)
aggagagucccgcagucggcguccagcggcucugcuuguucgugugugugucguugcaggccuuauucaagcuuaccaugaagugggugaccuucaucagccugcuguuccuguucagcagcgccuacagcagcgccagcaaggaggugaagagcuuccuguggacccagagccugagaagagagcugagcggcuacugcagcagcaucaagcugcagguggugaaggacgcccaggcccugcugcacggccuggacuucagcgaggugagcaacgugcagagacugaugagaaagcagaagagagacgacagcgaccugaagagacugagagaccugaaccaggccgugaacaaccugguggagcugaagagcacccagcagaagagcauccugagagugggcacccugaccagcgacgaccugcugacccuggccgccgaccuggagaagcugaagagcaaggugaucagaaccgagagaccccugagcagcggcguguacaugggcaaccugagcacccagcagcuggagcagagaagagcccugcugaacaugaucggcauggccggcggcgcccagggcacccagcccggcagagacggcguggugagagugugggacgugaagaaccccgaccugcugaacaaccaguucggcaccaugcccagccugacccuggccugccugaccaagcagggccagguggaccugaacgacgccgugcuggcccugaccgaccugggccugaucuacaccgccaaguaccccaacagcagcgaccuggacagacugagccagagccaccccauccugaacaugguggacaccaagaagagcagccugaacaucagcggcuacaacuucagccugggcgccgccgugaaggccggcgccugcaugcuggacggcggcaacaugcuggagaccaucaaggugaccccccagaccauggacggcauccugaagagcauccugaaggugaagagaagccugggcauguucgugagcgacgcccccggcgagagaaaccccuacgagaacauccuguacaagaucugccugagcggcgacggcuggcccuacaucgccagcagaaccagcaucgugggcagagccugggagaacaccaccguggaccuggagagcgacggcaagccccagaaggugggcgccaccggcagcaacaagagccugcagagcgccggcuuccccaccggccugaccuacagccagcugaugacccugaaggacagcaugaugcagcuggaccccagcgccaagaccuggaucgacaucgagggcagacccgaggaccccguggagguggcccuguaccagcccgugagcggcugcuacauccacuucuucagagagcccaccgaccugaagcaguucaagcaggacgccaaguacagccacggcaucgacguggccgaccuguuccccgcccagcccggccugaccagcgccgugaucgaggcccugcccagaaacauggugcugaccugccagggcagcgacgacaucaagaagcugcuggacagccagggcagaaaggacaucaagcugaucgacaucgcccugagcaaggccgacagcagaagauucgagaacgccgugugggaccagugcaaggaccugugccacaugcacaccggcguggugguggagaagaagaagagaggcggcaaggaggagaucaccccccacugcgcccugauggacugcaucauguacgacgccgccgugagcggcggccugaacauccccgugcugagagccgugcugcccagagacaugguguucagaaccagcagccccaagguggugcugugaggacuagucccuguucccagagcccacuuuuuuuucuuuuuuugaaauaaaauagccugucuuucagaucuaaaaaaaaaaaaaaaaaaaaaaaaaaaaaaaaaaaaaaaaaaaaaaaaaaaaaaaaaaaaaaaaaaaaaaaaaaaaaaaaaaaaaaaaaaaaaaaaaaaa

SEQ ID NO: 19715 - RNA, 2009 nt, Artificial Sequence
  mRNA product Design a-1 (A100) comprising derived and/or modified sequence from LASV(Lassa virus/H.sapiens-wt/NGA/2018/ISTH_0959;Clade II)__AVV65100__SP-HsALB_NP(2-569) (opt4)
aggagagucccgcagucggcguccagcggcucugcuuguucgugugugugucguugcaggccuuauucaagcuuaccaugaagugggugaccuucaucagccugcuguuccuguucagcagcgccuacagcagcgccagcaaggaggugaagagcuuccuguggacccagagccugagaagagagcugagcggcuacugcagcaacaucaagcugcagguggugaaggacgcccaggcccugcugcacggccuggacuucagcgaggugagcaacgugcagagacugaugagaaagcagaagagagacgacagcgaccugaagagacugagagaccugaaccaggccgugaacaaccugguggagcugaagagcacccagcagaagagcauccugagagugggcacccugaccagcgacgaccugcugacccuggccgccgaccuggagaagcugaagagcaaggugaucagaaccgagagaccccugagcagcggcguguacaugggcaaccugagcacccagcagcuggagcagagaagagcccugcugaaccugaucggcauggugggcggcgcccagggcacccagcccggcagagacggcguggugagagugugggacgugaagaaccccgaccugcugaacaaccaguucggcaccaugcccagccugacccuggccugccugaccaagcagggccagguggaccugaacgacguggugcuggcccugaccgaccugggccugaucuacaccgccaaguaccccaacagcagcgaccuggacagacugagccagagccaccccauccugaacaugguggacaccaagaagagcagccugaacaucagcggcuucaacuucagccugggcgccgccgugaaggccggcgccugcaugcuggacggcggcaacaugcuggagaccaucaaggugaccccccagaccauggacggcauccugaagagcauccugaaggugaagaagagccugggcauguucgugagcgacacccccggcgagagaaaccccuacgagaacauccuguacaagaucugccugagcggcgacggcuggcccuacaucgccagcagaaccagcaucgugggcagagccugggagaacaccaccguggaccuggagagcgacggcaagccccacaaggugggcaccgccggcagcaacaagagccugcagagcgccggcuuccccaccggccugaccuacagccagcugaugacccugaaggacagcaugaugcagcuggaccccagcgccaagaccuggaucgacaucgagggcagacccgaggaccccguggagaucgcccuguaccagcccaugagcggcugcuacauccacuucuucagagagcccaccgaccugaagcaguucaagcaggacgccaaguacagccacggcaucgacguggccgaccuguuccccgcccagcccggccugaccagcgccgugaucgaggcccugcccagaaacauggugcugaccugccagggcagcgacgacaucaagagacugcuggacagccagggcagaaaggacaucaagcugaucgacaucgcccugagcaagaccgacagcagaagauucgagaacgccgugugggaccagugcaaggaccugugccacaugcacaccggcguggugguggagaagaagaagagaggcggcaaggaggagaucaccccccacugcgcccugauggacugcaucauguacgacgccgccgugagcggcggccugaacauccccgugcugagagccgugcugcccagagacaugguguucagaaccagcagccccaagguggugcugugaggacuagucccuguucccagagcccacuuuuuuuucuuuuuuugaaauaaaauagccugucuuucagaucuaaaaaaaaaaaaaaaaaaaaaaaaaaaaaaaaaaaaaaaaaaaaaaaaaaaaaaaaaaaaaaaaaaaaaaaaaaaaaaaaaaaaaaaaaaaaaaaaaaaa

SEQ ID NO: 19716 - RNA, 2009 nt, Artificial Sequence
  mRNA product Design a-1 (A100) comprising derived and/or modified sequence from LASV(LASV003-NIG-2008;Clade II)__AIT17581__SP-HsALB_NP(2-569) (opt4)
aggagagucccgcagucggcguccagcggcucugcuuguucgugugugugucguugcaggccuuauucaagcuuaccaugaagugggugaccuucaucagccugcuguuccuguucagcagcgccuacagcagcgccagcaaggaggugaagagcuuccuguggacccagagccugagaagagagcugagcggcuacugcagcagcaucaagcugcagguggugaaggacgcccaggcccugcugcacggccuggacuucagcgaggugagcaacgugcagagacugaugagaaagcagaagagagacgacagcgaccugaagagacugagagaccugaaccaggccgugaacaaccugguggagcugaagagcacccagcagaagagcgugcugagagugggcacccugaccagcgacgaccugcugacccuggccgccgaccuggagaagcugaagagcaaggugaucagaaccgagagaccccugagcagcggcguguacaugggcaaccugagcgcccagcagcuggagcagagaagaacccugcugaacaugaucggcauggugggcggcgcccagggcacccagcccggcagagacggcguggugagagugugggacgugaagaaccccgaccugcugaacaaccaguucggcaccaugcccagccugacccuggccugccugaccaagcagggccagguggaccugaacgacguggugcuggcccugaccgaccugggccugaucuacaccgccaaguaccccaacagcagcgaccuggacagacugagccagagccaccccauccugagcaugguggacaccaagaagagcagccugaacaucagcggcuacaacuucagccugggcgccgccgugaaggccggcgccugcaugcuggacggcggcaacaugcuggagaccaucaaggugaccccccagaccauggacggcauccugaagagcauccugaaggugaagaagagccugggcauguucgugagcgacacccccggcgagagaaaccccuacgagaacauccuguacaagaucugccugagcggcgacggcuggcccuacaucgccagcagaaccagcaucgugggcagagccugggagaacaccaccguggaccuggagagcgacggcaagccccagaaggugggcaccgccggcagcaacaagagccugcagagcgccggcuuccccaccggccugaccuacagccagcugaugacccugaaggacagcaugaugcagcuggaccccagcgccaagaccuggaucgacaucgagggcagacccgaggaccccguggagaucgcccuguaccagcccaugagcggcugcuacauccacuucuucagagagcccaccgaccugaagcaguucaagcaggacgccaaguacagccacggcaucgacgugaccgaccuguuccccgcccagcccggccugaccagcgccgugaucgaggcccugcccagaaacauggugcugaccugccagggcagcgacgacaucaagagacugcuggacagccagggcagaagagacaucaagcugaucgacaucgcccugagcaaggccgacagcagaagauucgagaacgccgugugggaccagugcaaggaccugugccacaugcacaccggcguggugguggagaagaagaagagaggcggcaaggaggagaucaccccccacugcgcccugauggacugcaucauguacgacgccgccgugagcggcggccugaacauccccgugcugagagccgugcugcccagagacaugguguucagaaccagcagccccaagguggugcugugaggacuagucccuguucccagagcccacuuuuuuuucuuuuuuugaaauaaaauagccugucuuucagaucuaaaaaaaaaaaaaaaaaaaaaaaaaaaaaaaaaaaaaaaaaaaaaaaaaaaaaaaaaaaaaaaaaaaaaaaaaaaaaaaaaaaaaaaaaaaaaaaaaaaa

SEQ ID NO: 19717 - RNA, 2009 nt, Artificial Sequence
  mRNA product Design a-1 (A100) comprising derived and/or modified sequence from LASV(LASV035-NIG-2009;Clade II)__AIT17589__SP-HsALB_NP(2-569) (opt4)
aggagagucccgcagucggcguccagcggcucugcuuguucgugugugugucguugcaggccuuauucaagcuuaccaugaagugggugaccuucaucagccugcuguuccuguucagcagcgccuacagcagcgccagcaaggaggugaagagcuuccuguggacccagagccugagaagagagcugagcggcuacugcagcagcaucaagcugcagguggugaaggacgcccaggcccugcugcacggccuggacuucagcgaggugagcaacgugcagagacugaugagaaagcagaagagagacgacagcgaccugaagagacugagagaccugaaccaggccgugaacaaccugguggagcugaagagcacccagcagaagagcauccugagagugggcacccugaccagcgacgaccugcugacccuggccgccgaccuggagaagcugaagagcaaggugaucagaaccgagagaccccugagcagcggcguguacaugggcaaccugagcgcccagcagcuggagcagagaagagcccugcugaacaugaucggcauggugggcggcgcccagggcacccagcccggcagagacggcguggugagagugugggacgugaagaaccccgaccugcugaacaaccaguucggcaccaugcccagccugacccuggccugccugaccaagcagggccagguggaccugaacgacgccgugcuggcccugaccgaccugggccugaucuacaccgccaaguaccccaacagcagcgaccuggacagacugagccagagccaccccauccugaacaugguggacaccaagaagagcagccugaacaucagcggcuacaacuucagccugggcgccgccgugaaggccggcgccugcaugcuggacggcggcaacaugcuggagaccaucaaggugaccccccagaccauggacggcauccugaagagcauccugaaggugaagagaagccugggcauguucgugagcgacacccccggcgagagaaaccccuacgagaacauccuguacaagaucugccugagcggcgacggcuggcccuacaucgccagcagaaccagcaucgugggcagagccugggagaacaccaccguggaccuggagagcgacggcaagccccagaaggugggcaccaccggcagcaacaagagccugcagagcgccggcuuccccaccggccugaccuacagccagcugaugacccugaaggacagcaugaugcagcuggaccccagcgccaagaccuggaucgacaucgagggcagacccgaggaccccguggagaucgcccuguaccagcccaugagcggcugcuacauccacuucuucagagagcccaccgaccugaagcaguucaagcaggacgccaaguacagccacggcaucgacguggccgaccuguuccccgcccagcccggccugaccagcgccgugaucgaggcccugcccagaaacauggugcugaccugccagggcagcgacgacaucaagaagcugcuggacagccagggcagaagagacaucaagcugaucgacaucgcccugagcaaggccgacagcagaaaguucgagaacgccgugugggaccagugcaaggaccugugccacaugcacaccggcguggugguggagaagaagaagagaggcggcaaggaggagaucaccccccacugcgcccugauggacugcaucauguacgacgccgccgugagcggcggccugaacauccccgugcugagagccgugcugcccagagacaugguguucagaaccagcagccccaagguggugcugugaggacuagucccuguucccagagcccacuuuuuuuucuuuuuuugaaauaaaauagccugucuuucagaucuaaaaaaaaaaaaaaaaaaaaaaaaaaaaaaaaaaaaaaaaaaaaaaaaaaaaaaaaaaaaaaaaaaaaaaaaaaaaaaaaaaaaaaaaaaaaaaaaaaaa

SEQ ID NO: 19718 - RNA, 2009 nt, Artificial Sequence
  mRNA product Design a-1 (A100) comprising derived and/or modified sequence from LASV(LASV1000-NIG-2009;Clade II)__AIT17783__SP-HsALB_NP(2-569) (opt4)
aggagagucccgcagucggcguccagcggcucugcuuguucgugugugugucguugcaggccuuauucaagcuuaccaugaagugggugaccuucaucagccugcuguuccuguucagcagcgccuacagcagcgccagcaaggaggugaagagcuuccuguggacccagagccugagaagagagcugagcggcuacugcagcaacaucaagcugcagguggugaaggacgcccaggcccugcugcacggccuggacuucagcgaggugagcaacgugcagagacugaugagaaagcagaagagagacgacagcgaccugaagagacugagagaccugaaccaggccgugaacaaccugguggagcugaagagcacccagcagaagagcauccugagagugggcacccugaccagcgacgaccugcugacccuggccgccgaccuggagaagcugaagagcaaggugaucagaaccgagagaccccugagcagcggcguguacaugggcaaccugagcacccagcagcuggagcagagaagagcccugcugaacaugaucggcauggugggcggcgcccagggcacccagcccggcagagacggcguggugagagugugggacgugaagaaccccgaccugcugaacaaccaguucggcaccaugcccagccugacccuggccugccugaccaagcagggccagguggaccugaacgacguggugcuggcccugaccgaccugggccugaucuacaccgccaaguaccccaacagcagcgaccuggacagacugagccagagccaccccauccugaacaugguggacaccaagaagagcagccugaacaucagcggcuacaacuucagccugggcgccgccgugaaggccggcgccugcaugcuggacggcggcaacaugcuggagaccaucaaggugaccccccagaccauggacggcauccugaagagcauccugaaggugaagaagagccugggcauguucgugagcgacacccccggcgagagaaaccccuacgagaacauccuguacaagaucugccugagcggcgacggcuggcccuacaucgccagcagaaccagcaucgugggcagagccugggagaacaccaccguggaccuggagagcgacggcaagccccagaaggugggcaccgccggcagcaacaagagccugcagagcgccggcuuccccaccggccugaccuacagccagcugaugacccugaaggacagcaugaugcagcuggaccccagcgccaagaccuggaucgacaucgagggcagacccgaggaccccguggagaucgcccuguaccagcccgugagcggcugcuacauccacuucuucagagagcccaccgaccugaagcaguucaagcaggacgccaaguacagccacggcaucgacguggccgaccuguuccccgcccagcccggccugaccagcgccgugaucgaggcccugcccagaaacauggugcugaccugccagggcagcgacgacaucaagagacugcuggacagccagggcagaagagacaucaagcugaucgacaucgcccugagcaaggccgacagcagaagauucgagaacgccgugugggaccagugcaaggaccugugccacaugcacaccggcguggugguggagaagaagaagagaggcggcaaggaggagaucaccccccacugcgcccugauggacugcaucauguacgacgccgccgugagcggcggccugaacauccccgugcugagagccgugcugcccagagacaugguguucagaaccagcagccccaagguggugcugugaggacuagucccuguucccagagcccacuuuuuuuucuuuuuuugaaauaaaauagccugucuuucagaucuaaaaaaaaaaaaaaaaaaaaaaaaaaaaaaaaaaaaaaaaaaaaaaaaaaaaaaaaaaaaaaaaaaaaaaaaaaaaaaaaaaaaaaaaaaaaaaaaaaaa

SEQ ID NO: 19719 - RNA, 2009 nt, Artificial Sequence
  mRNA product Design a-1 (A100) comprising derived and/or modified sequence from LASV(LASV221-NIG-2010;Clade II)__AIT17625__SP-HsALB_NP(2-569) (opt4)
aggagagucccgcagucggcguccagcggcucugcuuguucgugugugugucguugcaggccuuauucaagcuuaccaugaagugggugaccuucaucagccugcuguuccuguucagcagcgccuacagcagcgccagcaaggaggugaagagcuuccuguggacccagagccugagaagagagcugagcggcuacugcagcagcaucaagcugcagguggugaaggacgcccaggcccugcugcacggccuggacuucagcgaggugagcaacgugcagagacugaugagaaagcagagaagagacgacagcgaccugaagagacugagagaccugaaccaggccgugaacaaccugguggagcugaagagcacccagcagaagagcauccugagagugggcacccugaccagcgacgaccugcugacccuggccgccgaccuggagaagcugaagagcaaggugaucagaaccgagagaccccugagcagcggcguguacaugggcaaccugagcacccagcagcuggagcagagaagagcccugcugaacaugaucggcauggugggcggcgcccagggcacccagcccggcagagacggcguggugagagugugggacgugaagaaccccgaccugcugaacaaccaguucggcaccaugcccagccugacccuggccugccugaccaagcagggccagguggaccugaacgacgccgugcuggcccugaccgaccugggccugaucuacaccgccaaguaccccaacagcagcgaccuggacagacugagccagagccaccccauccugaacaugguggacaccaagaagagcagccugaacaucagcggcuacaacuucagccugggcgccgccgugaaggccggcgccugcaugcuggacggcggcaacaugcuggagaccaucaaggugaccccccagaccguggacggcauccugaagagcauccugaaggugaagagaagccugggcauguucgugagcgacacccccggcgagagaaaccccuacgagaacauccuguacaagaucugccugagcggcgacggcuggcccuacaucgccagcagaaccagcaucgugggcagagccugggagaacaccaccguggaccuggagagcgacggcaagccccagaaggugggcaccgccggcagcaacaagagccugcagagcgccggcuuccccaccggccugaccuacagccagcugaugacccugaaggacagcaugaugcagcuggaccccagcgccaagaccuggaucgacaucgagggcagacccgaggaccccguggagaucgcccuguaccagcccaugagcggcugcuacauccacuucuucagagagcccaccgaccugaagcaguucaagcaggacgccaaguacagccacggcaucgacguggccgaccuguuccccgcccagcccggccugaccagcgccgugaucgaggcccugcccagaaacauggugcugaccugccagggcagcgacgacaucaagagacugcuggacagccagggcagaagagacaucaagcugaucgacaucgcccugagcaaggccgacagcagaaaguucgagaacgccgugugggaccagugcaaggaccugugccacaugcacaccggcguggugguggagaagaagaagagaggcggcaaggaggagaucaccccccacugcgcccugauggacugcaucauguacgacgccgccgugagcggcggccugaacauccccgugcugagagccgugcugcccagagacaugguguucagaaccagcagccccaagguggugcugugaggacuagucccuguucccagagcccacuuuuuuuucuuuuuuugaaauaaaauagccugucuuucagaucuaaaaaaaaaaaaaaaaaaaaaaaaaaaaaaaaaaaaaaaaaaaaaaaaaaaaaaaaaaaaaaaaaaaaaaaaaaaaaaaaaaaaaaaaaaaaaaaaaaaa

SEQ ID NO: 19720 - RNA, 2009 nt, Artificial Sequence
  mRNA product Design a-1 (A100) comprising derived and/or modified sequence from LASV(LASV237-NIG-2010;Clade II)__AIT17639__SP-HsALB_NP(2-569) (opt4)
aggagagucccgcagucggcguccagcggcucugcuuguucgugugugugucguugcaggccuuauucaagcuuaccaugaagugggugaccuucaucagccugcuguuccuguucagcagcgccuacagcagcgccagcaaggaggugaagagcuuccuguggacccagagccugagaagagagcugagcggcuacugcagcaacaucaagcugcagguggugaaggacgcccaggcccugcugcacggccuggacuucagcgaggugagcaacgugcagagacugaugagaaagcagaagagagacgacagcgaccugaagagacugagagaccugaaccaggccgugaacaaccugguggagcugaagagcacccagcagaagagcauccugagagugggcacccugaccagcgacgaccugcugacccuggccgccgaccuggagaagcugaagagcaaggugaucagaaccgagagaccccugagcagcggcguguacaugggcaaccugagcacccagcagcuggagcagagaagagcccugcugaacaugaucggcauggugggcggcgcccagggcacccagcccggcagagacggcguggugagagugugggacgugaagaaccccgaccugcugaacaaccaguucggcaccaugcccagccugacccuggccugccugaccaagcagggccagguggaccugaacgacgccgugcuggcccugaccgaccugggccugaucuacaccgccaaguaccccaacagcagcgaccuggacagacugagccagagccaccccauccugaacaugguggacaucaagaagagcagccugaacaucagcggcuacaacuucagccugggcgccgccgugaaggccggcgccugcaugcuggacggcggcaacaugcuggagaccaucaaggugaccccccagaccauggacggcauccugaagagcauccugaaggugaagagaagccugggcauguucgugagcgacacccccggcgagagaaaccccuacgagaacauccuguacaagaucugccugagcggcgacggcuggcccuacaucgccagcagaaccagcaucgugggcagagccugggagaacaccaccguggaccuggagagcgacggcaagccccagaaggugggcagcgccggcagcaacaagagccugcagagcgccggcuuccccaccggccugaccuacagccagcugaugacccugaaggacagcaugaugcagcuggaccccagcgccaagaccuggaucgacaucgagggcagacccgaggaccccguggagaucgcccuguaccagcccaugagcggcugcuacauccacuucuucagagagcccaccgaccugaagcaguucaagcaggacgccaaguacagccacggcaucgacguggccgaccuguuccccgcccagcccggccugaccagcgccgugaucgaggcccugcccagaaacauggugcugaccugccagggcagcgacgacaucaagagacugcuggacagccagggcagaagagacaucaagcugaucgacaucgcccugagcaaggccgacagcagaagauucgagaacgccgugugggaccagugcaaggaccugugccacaugcacaccggcguggugguggagaagaagaagagaggcggcaaggaggagaucaccccccacugcgcccugauggacugcaucauguacgacgccgccgugagcggcggccugaacauccccgugcugagagccgugcugcccagagacaugguguucagaaccagcagccccaagguggugcugugaggacuagucccuguucccagagcccacuuuuuuuucuuuuuuugaaauaaaauagccugucuuucagaucuaaaaaaaaaaaaaaaaaaaaaaaaaaaaaaaaaaaaaaaaaaaaaaaaaaaaaaaaaaaaaaaaaaaaaaaaaaaaaaaaaaaaaaaaaaaaaaaaaaaa

SEQ ID NO: 19721 - RNA, 2009 nt, Artificial Sequence
  mRNA product Design a-1 (A100) comprising derived and/or modified sequence from LASV(LASV253-NIG-2011;Clade II)__AIT17671__SP-HsALB_NP(2-569) (opt4)
aggagagucccgcagucggcguccagcggcucugcuuguucgugugugugucguugcaggccuuauucaagcuuaccaugaagugggugaccuucaucagccugcuguuccuguucagcagcgccuacagcagcgccagcaaggaggugaagagcuuccuguggacccagagccugagaagagagcugagcggcuacugcagcagcaucaagcugcagguggugaaggacgcccaggcccugcugcacggccuggacuucagcgaggugagcaacgugcagagacugaugagaaagcagaagagagacgacagcgaccugaagagacugagagaccugaaccaggccgugaacaaccugguggagcugaagagcacccagcagaagagcgugcugagagugggcacccugaccagcgacgaccugcugacccuggccgccgaccuggagaagcugaagagcaaggugaucagaaccgagagaccccugagcagcggcguguacaugggcaaccugagcacccagcagcuggagcagagaagagcccugcugaacaugaucggcauggugggcggcgcccagggcacccagcccggcagagacggcguggugagagugugggacgugaagaaccccgaccugcugaacaaccaguucggcaccaugcccagccugacccuggccugccugaccaagcagggccagguggaccugaacgacguggugcuggcccugaccgaccugggccugaucuacaccgccaaguaccccaacagcagcgaccuggacagacugagccagagccaccccauccugaacaugguggacaccaagaagagcagccugaacaucagcggcuacaacuucagccugggcgccgccgugaaggccggcgccugcaugcuggacggcggcaacaugcuggagaccaucaaggugaccccccagaccauggacggcauccugaagagcauccugaaggugaagaagagccugggcauguucgugagcgacacccccggcgagagaaaccccuacgagaacauccuguacaagaucugccugagcggcgacggcuggcccuacaucgccagcagaaccagcaucgugggcagagccugggagaacaccaccguggaccuggagagcgacggcaagccccagaaggugggcaccgccggcagcaacaagagccugcagagcgccggcuuccccaccggccugaccuacagccagcugaugacccugaaggacagcaugaugcagcuggaccccagcgccaagaccuggaucgacaucgagggcagacccgaggaccccguggagaucgcccuguaccagcccaugagcggcugcuacauccacuucuucagagagcccaccgaccugaagcaguucaagcaggacgccaaguacagccacggcaucgacgugaccgaccuguuccccgcccagcccggccugaccagcgccgugaucgaggcccugcccagaaacauggugcugaccugccagggcagcgacgacaucaagagacugcuggacagccagggcagaagagacaucaagcugaucgacaucgcccugagcaaggccgacagcagaagauucgagaacgccgugugggaccagugcaaggaccugugccacaugcacaccggcguggugguggagaagaagaagagaggcggcaaggaggagaucaccccccacugcgcccugauggacugcaucauguacgacgccgccgugagcggcggccugaacauccccgugcugagagccgugcugcccagagacaugguguucagaaccagcagccccaagguggugcugugaggacuagucccuguucccagagcccacuuuuuuuucuuuuuuugaaauaaaauagccugucuuucagaucuaaaaaaaaaaaaaaaaaaaaaaaaaaaaaaaaaaaaaaaaaaaaaaaaaaaaaaaaaaaaaaaaaaaaaaaaaaaaaaaaaaaaaaaaaaaaaaaaaaaa

SEQ ID NO: 19722 - RNA, 2009 nt, Artificial Sequence
  mRNA product Design a-1 (A100) comprising derived and/or modified sequence from LASV(LASV254-NIG-2011;Clade II)__AIT17675__SP-HsALB_NP(2-569) (opt4)
aggagagucccgcagucggcguccagcggcucugcuuguucgugugugugucguugcaggccuuauucaagcuuaccaugaagugggugaccuucaucagccugcuguuccuguucagcagcgccuacagcagcgccagcaaggaggugaagagcuuccuguggacccagagccugagaagagagcugagcggcuacugcagcagcaucaagcugcagguggugaaggacgcccaggcccugcugcacggccuggacuucagcgaggugagcaacgugcagagacugaugagaaagcagaagagagacgacagcgaccugaagagacugagagaccugaaccaggccgugaacaaccugguggagcugaagagcacccagcagaagagcgugcugagagugggcacccugaccagcgacgaccugcugacccuggccgccgaccuggagaagcugaagagcaaggugaucagaaccgagagaccccugagcagcggcguguacaugggcaaccugagcacccagcagcuggagcagagaagagcccugcugaacaugaucggcauggugggcggcgcccagggcacccagcccggcagagacggcguggugagagugugggacgugaagaaccccgaccugcugaacaaccaguucggcaccaugcccagccugacccuggccugccugaccaagcagggccagguggaccugaacgacgccgugcuggcccugaccgaccugggccugaucuacaccgccaaguaccccaacagcagcgaccuggacagacugagccagagccaccccauccugaacaugguggacaccaagaagagcagccugaacaucagcggcuacaacuucagccugggcgccgccgugaaggccggcgccugcaugcuggacggcggcaacaugcuggagaccaucaaggugaccccccagaccauggacggcauccugaagagcauccugaaggugaagaagagccugggcauguucgugagcgacacccccggcgagagaaaccccuacgagaacauccuguacaagaucugccugagcggcgacggcuggcccuacaucgccagcagaaccagcaucgugggcagagccugggagaacaccaucguggaccuggagagcgacggcaagccccagaaggugggcaccgccggcagcaacaagagccugcagagcgccggcuuccccaccggccugaccuacagccagcugaugacccugaaggacagcaugaugcagcuggaccccagcgccaagaccuggaucgacaucgagggcagacccgaggaccccguggagaucgcccuguaccagcccaugagcggcugcuacauccacuucuucagagagcccaccgaccugaagcaguucaagcaggacgccaaguacagccacggcaucgacguggccgaccuguuccccgcccagcccggccugaccagcgccgugaucgaggcccugcccagaaacauggugcugaccugccagggcagcgacgacaucaagagacugcuggacagccagggcagaagagacaucaagcugaucgacaucgcccugagcaaggccgacagcagaagauucgagaacgccgugugggaccagugcaaggaccugugccacaugcacaccggcguggugguggagaagaagaagagaggcggcaaggaggagaucaccccccacugcgcccugauggacugcaucauguacgacgccgccgugagcggcggccugaacauccccgugcugagagccgugcugcccagagacaugguguucagaaccagcagccccaagguggugcugugaggacuagucccuguucccagagcccacuuuuuuuucuuuuuuugaaauaaaauagccugucuuucagaucuaaaaaaaaaaaaaaaaaaaaaaaaaaaaaaaaaaaaaaaaaaaaaaaaaaaaaaaaaaaaaaaaaaaaaaaaaaaaaaaaaaaaaaaaaaaaaaaaaaaa

SEQ ID NO: 19723 - RNA, 2009 nt, Artificial Sequence
  mRNA product Design a-1 (A100) comprising derived and/or modified sequence from LASV(Nig08-04;Clade II)__ADU56611__SP-HsALB_NP(2-569) (opt4)
aggagagucccgcagucggcguccagcggcucugcuuguucgugugugugucguugcaggccuuauucaagcuuaccaugaagugggugaccuucaucagccugcuguuccuguucagcagcgccuacagcagcgccagcaaggaggugaagagcuuccuguggacccagagccugagaagagagcugagcggcuacugcagcaacaucaagcugcagguggugaaggacgcccaggcccugcugcacggccuggacuucagcgaggugagcaacgugcagagacugaugagaaagcagaagagagacgacggcgaccugaagagacugagagaccugaaccaggccgugaacaaccugguggagcugaagagcacccagcagaagagcgugcugagagugggcacccugaccagcgacgaccugcugacccuggccgccgaccuggagaagcugaagagcaaggugaucagaaccgagagaccccugagcagcggcguguacaugggcaaccugagcacccagcagcuggagcagagaaaggcccugcugagcaugaucggcauggugggcggcgcccagggcacccagcccggcagagacggcguggugagagugugggacgugaagaaccccgaccugcugaacaaccaguucggcaccaugcccagccugacccuggccugccugaccaagcagggccagguggaccugaacgacgccgugcuggcccugaccgaccugggccugaucuacaccgccaaguaccccaacagcagcgaccuggacagacugagccagagccaccccauccugaacaugguggacaccaagaagagcagccugaacaucagcggcuacaacuucagccugggcgccgccgugaaggccggcgccugcaugcuggacggcggcaacaugcuggagaccaucaaggugaccccccagaccauggacggcauccugaagagcauccugaaggugaagagaagccugggcauguucgugagcgacacccccggcgagagaaaccccuacgagaacauccuguacaagaucugccugagcggcgacggcuggcccuacaucgccagcagaaccagcaucgugggcagagccugggagaacaccaccguggaccuggagagcgacggcaagccccagaaggugggcaccgccggcagcaacaagagccugcagagcgccggcuuccccaccggccugaccuacagccagcugaugacccugaaggacagcaugaugcagcuggaccccagcgccaagaccuggaucgacaucgagggcagacccgaggaccccguggagaucgcccuguaccagcccaugagcggcugcuacauccacuucuucagagagcccaccgaccugaagcaguucaagcaggacgccaaguacagccacggcaucgacgugaccgaccuguucagcgcccagcccggccugaccagcgccgugaucgaggcccugcccagaaacauggugcugaccugccagggcagcgacgacaucaagaagcugcuggacagccagggcagaagagacaucaagcugaucgacaucagccugaacaaggccgacagcagaagauucgagaacgccgugugggaccagugcaaggaccugugccacaugcacaccggcguggugguggagaagaagaagagaggcggcaaggaggagaucaccccccacugcgcccugauggacugcaucauguucgacgccgccgugagcggcggccugaacauccccauccugagagccgugcugcccagagacaugguguucagaaccagcagccccaagguggugcugugaggacuagucccuguucccagagcccacuuuuuuuucuuuuuuugaaauaaaauagccugucuuucagaucuaaaaaaaaaaaaaaaaaaaaaaaaaaaaaaaaaaaaaaaaaaaaaaaaaaaaaaaaaaaaaaaaaaaaaaaaaaaaaaaaaaaaaaaaaaaaaaaaaaaa

SEQ ID NO: 19724 - RNA, 2012 nt, Artificial Sequence
  mRNA product Design a-1 (A100) comprising derived and/or modified sequence from LASV(GA391;Clade III)__AAA46284__SP-HsALB_NP(2-570) (opt4)
aggagagucccgcagucggcguccagcggcucugcuuguucgugugugugucguugcaggccuuauucaagcuuaccaugaagugggugaccuucaucagccugcuguuccuguucagcagcgccuacagcagcgccagcaaggaggugagaagcugccuguggacccagagccugagaagagagcugagcggcuacugcagcaacaucaagcugcagguggugaaggacgcccaggcccugcugcacggccuggacuucagcgaggugagcaacgugcagagacugaugagaaagcagaagagagacgacggcgaccugaagagacugagagaccugaaccaggccgugaacaaccugguggagcugaagagcacccagcagaagagcgugcugagagugggcacccugagcagcgacgaccugcugauccuggccgccgaccuggagaagcugaagagcaaggugaccagaaccgagagaccccugagcagcggcguguacaugggcaaccugagcagccagcagcuggaccagagaagagcccugcugaacaugaucggcaugaccggcgugagcggcggcggcaagggcgccagcaacggcaucgugagagugugggacgugaagaacgccgagcugcugaacaaccaguucggcaccaugcccagccugacccuggccugccugaccaagcagggccagguggaccugaacgacgccgugcaggcccugaccgaccugggccugaucuacaccgccaaguaccccaacagcagcgaccuggacagacugagccagagccaccccauccugaacaugaucgacaccaagaagagcagccugaacaucagcggcuacaacuucagccugggcgccgccgugaaggccggcgccugcaugcuggacggcggcaacaugcuggagaccaucaaggugagcccccagaccauggacggcauccugaagagcauccugaaggugaagaagagccugggcauguucgugagcgacacccccggcgagagaaaccccuacgagaacauccuguacaagaucugccugagcggcgacggcuggagcuacaucgccagcagaaccagcaucgugggcagagccugggagaacaccgugguggaccuggagcaggacaacaagccccagaagaucggcaacggcggcagcaacaagagccugcagagcgccggcuucgccgccggccugaucuacagccagcugaugacccugaaggacuucaagugcuucaaccugauccccaacgccaagaccuggauggacaucgagggcagacccgaggaccccguggagaucgcccuguaccagcccagcagcggcugcuacgugcacuucuucagagagcccaccgaccugaagcaguucaagcaggacgccaaguacagccacggcagagacgugaccgaccuguucgccgcccagcccggccugaccagcgccgugaucgaggcccugcccagaaacauggugaucaccugccagggcagcgaggacaucagaaagcugcuggagagccagggcagaagagacaucaagcugaucgacaucacccugagcaaggccgacagcagaaaguucgagaacgccgugugggaccaguucaaggaccugugccacaugcacaccggcguggugguggagaagaagaagagaggcggcaaggaggagaucaccccccacugcgcccugauggacugcaucauguucgacgccgccgugagcggcggccuggacgccaaggugcugagaguggugcugcccagagacaugguguucagaaccagcacccccaagguggugcugugaggacuagucccuguucccagagcccacuuuuuuuucuuuuuuugaaauaaaauagccugucuuucagaucuaaaaaaaaaaaaaaaaaaaaaaaaaaaaaaaaaaaaaaaaaaaaaaaaaaaaaaaaaaaaaaaaaaaaaaaaaaaaaaaaaaaaaaaaaaaaaaaaaaaa

SEQ ID NO: 19725 - RNA, 2009 nt, Artificial Sequence
  mRNA product Design a-1 (A100) comprising derived and/or modified sequence from LASV(Nig08-A19;Clade III)__ADU56619__SP-HsALB_NP(2-569) (opt4)
aggagagucccgcagucggcguccagcggcucugcuuguucgugugugugucguugcaggccuuauucaagcuuaccaugaagugggugaccuucaucagccugcuguuccuguucagcagcgccuacagcagcgccagcaaggaggugaagagcuuccuguggacccagagccugagaagagagcugagcggcuacugcagcaacaucaagcugcagguggugaaggacgcccaggcccugcugcacggccuggacuucagcgaggugagcaacgugcagagacugaugagaaagcagaagagagacgacggcgaccugaagagacugagagaccugaaccaggccgugaacaaccugguggagcugaagagcacccagcagaagagcgugcugagagugggcacccugagcagcgacgaccugcuggugcuggccgccgaccuggagaagcugaagagcaagguggugagaaccgagagaccccugagcagcggcaucuacaugggcaaccugagcagccagcagcuggaccagagaaaggcccugcugaacaugaucggcaugaccggcggcaacggcggcagaaacaccaccagcgacggcaucgugagagugugggacgugaagaacgccgagcugcugaacaaccaguucggcaccaugcccagccugacccuggccugccugaccaagcagggccagguggaccugaacgacgccgugcaggcccugaccgaccugggccugaucuacaccgccaaguaccccaacagcagcgaccuggacagacuggcccagagccaccccauccugaacaugaucgacaccaagaagagcagccugaacaucagcggcuacaacuucagccugggcgccgccgugaaggccggcgccugcaugcuggacggcggcaacaugcuggagaccaucaaggugagcccccagaccauggacggcauccugaagagcauccugaaggugaagagaagccugggcauguucaucagcgacacccccggcgagagaaaccccuacgagaacauccuguacaagaucugccugagcggcgacggcuggcccuacaucgccagcagaaccagcaucgugggcagagccugggagaacaccgugguggaccuggagagcgacaacaagccccagaagaccggcaacggcggcagcaacaagagccugcagagcgccggcuucgccgccggccugaccuacagccagcugaugacccugaaggacagcaugcugcagcuggaccccaacgccaagaccuggauggacaucgagggcagacccgaggaccccguggagaucgcccuguaccagcccagcagcggcugcuacauccacuucuucagagagcccaccgaccugaagcaguucaagcaggacgccaaguacagccacggcaucgacgugaccgaccuguucgccgcccagcccggccugaccagcgccgugaucgaggcccugcccagaaacauggugaucaccugccagggcagcgaggacaucagaaagcugcuggagagccagggcagaagagacaucaagcugaucgacaucagccugagcaagguggacagcagaaaguucgagaacgccgugugggaccaguucaaggaccugugccacaugcacaccggcaucgugguggagaagaagaagagaggcggcaaggaggagaucaccccccacugcgcccugauggacugcaucauguucgacgccgccgugagcggcggcguggacgccaaggugcugagagccgugcugcccagagacaugguguucagaaccagcacccccaagguggugcugugaggacuagucccuguucccagagcccacuuuuuuuucuuuuuuugaaauaaaauagccugucuuucagaucuaaaaaaaaaaaaaaaaaaaaaaaaaaaaaaaaaaaaaaaaaaaaaaaaaaaaaaaaaaaaaaaaaaaaaaaaaaaaaaaaaaaaaaaaaaaaaaaaaaaa

SEQ ID NO: 19726 - RNA, 2009 nt, Artificial Sequence
  mRNA product Design a-1 (A100) comprising derived and/or modified sequence from LASV(G1180-SLE-2010;Clade IV)__AIT17169__SP-HsALB_NP(2-569) (opt4)
aggagagucccgcagucggcguccagcggcucugcuuguucgugugugugucguugcaggccuuauucaagcuuaccaugaagugggugaccuucaucagccugcuguuccuguucagcagcgccuacagcagcgccagcaaggagaucaagagcuuccuguggacccagagccugagaagagagcugagcggcuacugcagcaacaucaagcugcagguggugaaggacgcccaggcccugcugcacggccuggacuucagcgaggugagcaacgugcagagacugaugagaaaggagagaagagacgacaacgaccugaagagacugagagaccugaaccaggccgugaacaaccugguggagcugaagagcacccagcagaagagcauccugagagugggcacccugaccagcgacgaccugcugauccuggccgccgaccuggagaagcugaagagcaaggugaucagaaccgagagaccccugagcgccggcguguacaugggcaaccugagcagccagcagcuggaccagagaagagcccugcugagcaugaucggcaugagcagcggcaaccagagagcccaggccggcagagacggcguggugagagugugggacgugaagaacguggagcugcugaacaaccaguucggcaccaugcccagccugacccuggccugccugaccaagcagggccagguggaccugaacgacgccgugcaggcccugaccgaccugggccugaucuacaccgccaaguaccccaacaccagcgaccuggacagacugacccagagccaccccauccugaacaugaucgacaccaagaagagcagccugaacaucagcggcuacaacuucagccugggcgccgccgugaaggccggcgccugcaugcuggacggcggcaacaugcuggagaccaucaaggugagcccccagaccauggacggcauccugaagagcauccugaaggugaagaaggcccugggcauguucaucagcgacacccccggcgagagaaaccccuacgagaacauccuguacaagaucugccugagcggcgacggcuggcccuacaucgccagcagaaccagcaucaccggcagagccugggagaacaccgugguggaccuggagagcgacggcaagccccagaaggccggcagcaacaacagcaacaagagccugcagagcgugggcuucaccgccggccugaccuacagccagcugaugacccugaaggacgccaugcugcagcuggaccccaacgccaagaccuggauggacaucgagggcagacccgaggaccccguggagaucgcccuguaccagcccagcagcggcugcuacauccacuucuucagagagcccaccgaccugaagcaguucaagcaggacgccaaguacagccacggcaucgacgugaccgaccuguucgccgcccagcccggccugaccagcgccgugaucgacgcccugcccagaaacauggugaucaccugccagggcagcgacgacaucagaaagcugcuggagagccagggcagaaaggacaucaagcugaucgacaucgcccugagcaagaccgacagcagaaaguacgagaacgccgugugggaccaguacaaggaccugugccacaugcacaccggcguggugguggagaagaagaagagaggcggcaaggaggagaucaccccccacugcgcccugauggacugcaucauguucgacgccgccgugagcggcggccugaacaccagcgugcugagagccgugcugcccagagacaugguguucagaaccagcacccccagaguggugcugugaggacuagucccuguucccagagcccacuuuuuuuucuuuuuuugaaauaaaauagccugucuuucagaucuaaaaaaaaaaaaaaaaaaaaaaaaaaaaaaaaaaaaaaaaaaaaaaaaaaaaaaaaaaaaaaaaaaaaaaaaaaaaaaaaaaaaaaaaaaaaaaaaaaaa

SEQ ID NO: 19727 - RNA, 2009 nt, Artificial Sequence
  mRNA product Design a-1 (A100) comprising derived and/or modified sequence from LASV(G1442-SLE-2011;Clade IV)__AIT17181__SP-HsALB_NP(2-569) (opt4)
aggagagucccgcagucggcguccagcggcucugcuuguucgugugugugucguugcaggccuuauucaagcuuaccaugaagugggugaccuucaucagccugcuguuccuguucagcagcgccuacagcagcgccagcaaggaggugaagagcuuccuguggacccagagccugagaagagagcugagcggcuacugcagcaacaucaagcugcagguggugaaggacgcccaggcccugcugcacggccuggacuucagcgaggugagcaacgugcagagacugaugagaaagcagagaagagacgacaacgaccugaagagacugagagaccugaaccaggccgugaacaaccugguggagcugaagagcacccagcagaagagcgugcugagagugggcacccugaccagcgacgaccugcuggugcuggccgccgaccuggagaagcugaagagcaaggugaucagaaccgagagaccccugagcgccggcguguacaugggcaaccugagcagccagcagcuggaccagagaagagcccugcugaacaugaucggcaugagcggcggcauccagggcaccagaaccggcagagacggcguggugagagugugggacgugaagaacgccgaccugcugaacaaccaguucggcaccaugcccagccugacccuggccugccugaccaagcagggccagguggaccugaacgacguggugcaggcccugaccgaccugggccugaucuacaccgccaaguaccccaacgccagcgaccuggacagacugacccagagccaccccauccugaacaugaucgacaccaagaagagcagccugaacaucagcggcuacaacuucagccugggcgccgccgugaaggccggcgccugcaugcuggacggcggcaacaugcuggagaccaucaaggugagcccccagaccauggacggcauccugaagagcauccugaaggugaagaagacccugggcauguucaucagcgacacccccggcgagagaaaccccuacgagaacauccuguacaagaucugccugagcggcgacggcuggcccuacaucgccagcagaaccagcaucaccggcagagccugggagaacaccgugguggaccuggagagcgacggcaagccccagaaggccggcagcaacaacagcaacaagagccugcagagcgccggcuucgccgccggccugaccuacagccagcugaugacccugaaggacgccaugcugcagcuggaccccaacgccaagaccuggauggacaucgagggcagacccgaggaccccguggagaucgcccuguaccagcccagcagcggcugcuacauccacuucuucagagagcccaccgaccugaagcaguucaagcaggacgccaaguacagccacggcaucgacgugaccgaccuguucgccgcccagcccggccugaccagcgccgugaucgaggcccugcccagaaacauggugaucaccugccagggcagcgacgacaucaagaagcugcuggagagccagggcagaaaggacaucaagcugaucgacaucgcccugagcaagaccgacagcagaaaguacgagaacgccgugugggaccaguacaaggaccugugccacaugcacaccggcguggugguggagaagaagaagagaggcggcaaggaggagaucaccccccacugcgcccugauggacugcaucauguucgacgccgccgugagcggcggccugaacacccuggugcugagagccgugcugcccagagacaugguguucagaaccagcacccccagaguggugcugugaggacuagucccuguucccagagcccacuuuuuuuucuuuuuuugaaauaaaauagccugucuuucagaucuaaaaaaaaaaaaaaaaaaaaaaaaaaaaaaaaaaaaaaaaaaaaaaaaaaaaaaaaaaaaaaaaaaaaaaaaaaaaaaaaaaaaaaaaaaaaaaaaaaaa

SEQ ID NO: 19728 - RNA, 2009 nt, Artificial Sequence
  mRNA product Design a-1 (A100) comprising derived and/or modified sequence from LASV(G3010-SLE-2013;Clade IV)__AIT17345__SP-HsALB_NP(2-569) (opt4)
aggagagucccgcagucggcguccagcggcucugcuuguucgugugugugucguugcaggccuuauucaagcuuaccaugaagugggugaccuucaucagccugcuguuccuguucagcagcgccuacagcagcgccagcaaggagaucaagagcuuccuguggacccagagccugagaagagagcugagcggcuacugcagcaacaucaagcugcagguggugaaggacgcccaggcccugcugcacggccuggacuucagcgaggugagcaacgugcagagacugaugagaaaggagagaagagacgacaacgaccugaagagacugagagaccugaaccaggccgugaacaaccugguggagcugaagagcacccagcagaagagcauccugagagugggcacccugaccagcgacgaccugcugauccuggccgccgaccuggagaagcugaagagcaaggugaccagaaccgagagaccccugagcgccggcguguacaugggcaaccugagcagccagcagcuggaccagagaagagcccugcugagcaugaucggcaugagcagcggcgugcagggcgccagagccggcagagacggcguggugagagugugggacgugaagaacgccgagcugcugaacaaccaguucggcaccaugcccagccugacccuggccugccugaccaagcagggccagguggaccugaacgacguggugcaggcccugaccgaccugggccugaucuacaccgccaaguaccccaacaccagcgaccuggacagacugacccagagccaccccauccugaacaugaucgacaccaagaagagcagccugaacaucagcggcuacaacuucagccugggcgccgccgugaaggccggcgccugcaugcuggacggcggcaacaugcuggagaccaucaaggugagcccccagaccauggacggcauccugaagagcauccugaaggugaagaaggcccugggcauguucaucagcgagacccccggcgagagaaaccccuacgagaacauccuguacaagaucugccugagcggcgacggcuggcccuacaucgccagcagaaccagcaucaccggcagagccugggagaacaccgugguggaccuggagagcgacggcaagccccagaaggccggcagcaacaacagcaacaagagccugcagagcgccggcuucaccgccggccugaccuacagccagcugaugacccugaaggacgccaugcugcagcuggaccccaacgccaagaccuggauggacaucgagggcagacccgaggaccccguggagguggcccuguaccagcccagcagcggcugcuacauccacuucuucagagagcccaccgaccugaagcaguucaagcaggacgccaaguacagccacggcaucgacgugaccgaccuguucgccgcccagcccggccugaccagcgccgugaucgacgcccugcccagaaacauggugaucaccugccagggcagcgacgacaucaagaagcugcuggagagccagggcagaaaggacaucaagcugaucgacaucgcccugagcaagaccgacagcagaaaguacgagaacgccgugugggaccaguacaaggaccugugccacaugcacaccggcguggugguggagaagaagaagagaggcggcaaggaggagaucaccccccacugcgcccugauggacugcaucauguucgacgccgccgugagcggcggccugaacaccagcgugcugagagccgugcugcccagagacaugguguucagaaccagcacccccagaguggugcugugaggacuagucccuguucccagagcccacuuuuuuuucuuuuuuugaaauaaaauagccugucuuucagaucuaaaaaaaaaaaaaaaaaaaaaaaaaaaaaaaaaaaaaaaaaaaaaaaaaaaaaaaaaaaaaaaaaaaaaaaaaaaaaaaaaaaaaaaaaaaaaaaaaaaa

SEQ ID NO: 19729 - RNA, 2009 nt, Artificial Sequence
  mRNA product Design a-1 (A100) comprising derived and/or modified sequence from LASV(G502-SLE-2009;Clade IV)__AIT17127__SP-HsALB_NP(2-569) (opt4)
aggagagucccgcagucggcguccagcggcucugcuuguucgugugugugucguugcaggccuuauucaagcuuaccaugaagugggugaccuucaucagccugcuguuccuguucagcagcgccuacagcagcgccagcaaggagaucaagagcuuccuguggacccagagccugagaagagagcugagcggcuacugcagcaacaucaagcugcagguggugaaggacgcccaggcccugcugcacggccuggacuucagcgaggugagcaacgugcagagacugaugagaaaggagagaagagacgacaacgaccugaagagacugagagaccugaaccaggccgugaacaaccugguggagcugaagagcacccagcagaagagcauccugagagugggcacccugaccagcgacgaccugcugauccuggccgccgaccuggagaagcugaagagcaaggugaucagaaccgagagaccccugagcgccggcguguacaugggcaaccugagcagccagcagcuggaccagagaagagcccugcugagcaugaucggcaugagcggcggcaaccagggcgugagagccggcaaggacggcguggugagagugugggacgugaagaacgccgagcugcugaacaaccaguucggcaccaugcccagccugacccuggccugccugaccaagcagggccagguggaccugaacgacgccgugcaggcccugaccgaccugggccugaucuacaccgccaaguaccccaacaccagcgaccuggacagacugacccagagccaccccauccugaacaugaucgacaccaagaagagcagccugaacaucagcggcuacaacuucagccugggcgccgccgugaaggccggcgccugcaugcuggacggcggcaacaugcuggagaccaucaaggugagcccccagaccauggacggcauccugaagagcauccugaaggugaagaaggcccugggcauguucaucagcgacacccccggcgagagaaaccccuacgagaacauccuguacaagaucugccugagcggcgacggcuggcccuacaucgccagcagaaccagcaucaccggcagagccugggagaacaccgugguggaccuggagagcgacggcaagccccagaaggccggcagcaacaacagcaacaagagccugcagagcgccggcuucaccgccggccugaccuacagccagcugaugacccugaaggacgccaugcugcagcuggaccccaacaccaagaccuggauggacaucgagggcagacccgaggaccccguggagaucgcccuguaccagcccagcagcggcugcuacauccacuucuucagagagcccaccgaccugaagcaguucaagcaggacgccaaguacagccacggcaucgacgugaccgaccuguucgccgcccagcccggccugaccagcgccgugaucgacgcccugcccagaaacauggugaucaccugccagggcagcgacgacaucagaaagcugcuggagagccagggcagaaaggacaucaagcugaucgacaucgcccugaacaagaccgacagcagaaaguacgagaacgccgugugggaccaguacaaggaccugugccacaugcacaccggcguggugguggagaagaagaagagaggcggcaaggaggagaucaccccccacugcgcccugauggacugcaucauguucgacgccgccgugagcggcggccugaacaccagcgugcugagagccgugcugcccagagacaugguguucagaaccagcacccccagaguggugcugugaggacuagucccuguucccagagcccacuuuuuuuucuuuuuuugaaauaaaauagccugucuuucagaucuaaaaaaaaaaaaaaaaaaaaaaaaaaaaaaaaaaaaaaaaaaaaaaaaaaaaaaaaaaaaaaaaaaaaaaaaaaaaaaaaaaaaaaaaaaaaaaaaaaaa

SEQ ID NO: 19730 - RNA, 2009 nt, Artificial Sequence
  mRNA product Design a-1 (A100) comprising derived and/or modified sequence from LASV(G733-SLE-2010;Clade IV)__AIT17155__SP-HsALB_NP(2-569) (opt4)
aggagagucccgcagucggcguccagcggcucugcuuguucgugugugugucguugcaggccuuauucaagcuuaccaugaagugggugaccuucaucagccugcuguuccuguucagcagcgccuacagcagcgccagcaaggagaucaagagcuuccuguggacccagagccugagaagagagcugagcggcuacugcagcaacaucaagcugcagguggugaaggacgcccaggcccugcugcacggccuggacuucagcgaggugagcaacgugcagagacugaugagaaaggagagaagagacgacaacgaccugaagagacugagagaccugaaccaggccgugaacaaccugguggagcugaagagcacccagcagaagagcgugcugagagugggcacccugaccagcgacgagcugcuggugcuggccgccgaccuggagaagcugaagagcaaggugaucagaaccgagagaccccugagcgccggcguguacaugggcaaccugagcagccagcagcuggaccagagaagagcccugcugagcaugaucggcaugagcggcggcaaccagggcgccagaaccggcagagacggcguggugagagugugggacgugaagaacgccgagcugcugaacaaccaguucggcaccaugcccagccugacccuggccugccugaccaagcagggccagguggaccugaacgacgccgugcaggcccugaccgaccugggccugaucuacaccgccaaguaccccaacaccagcgaccuggacagacugacccagagccaccccauccugaacaugaucgacaccaagaagagcagccugaacaucagcggcuacaacuucagccugggcgccgccgugaaggccggcgccugcaugcuggacggcggcaacaugcuggagaccaucaaggugagcccccagaccauggacggcauccugaagagcauccugaaggugaagaaggcccugggcauguucaucagcgacacccccggcgagagaaaccccuacgagaacauccuguacaagaucugccugagcggcgacggcuggcccuacaucgccagcagaaccagcaucaccggcagagccugggagaacaccgugguggaccuggagagcgacggcaagccccagaaggccggcagcaacaacagcaacaagagccugcagagcgccggcuucaccgccggccugaccuacagccagcugaugacccugaaggacgccaugcugcagcuggaccccaacgccaagaccuggauggacaucgagggcagacccgaggaccccguggagaucgcccuguaccagcccagcagcggcugcuacauccacuucuucagagagcccaccgaccugaagcaguucaagcaggacgccaaguacagccacggcaucgacgugaccgaccuguucgccgcccagcccggccugaccagcgccgugaucgacgcccugcccagaaacauggugaucaccugccagggcagcgacgacaucagaaagcugcuggagagccagggcagaaaggacaucaagcugaucgacaucgcccugagcaagaucgacagcagaaaguacgagaacgccgugugggaccaguacaaggaccugugccacaugcacaccggcguggugguggagaagaagaagagaggcggcaaggaggagaucaccccccacugcgcccugauggacugcaucauguucgacgccgccgugagcggcggccugaacagccuggugcugagagccgugcugcccagagacaugguguucagaaccagcacccccagaguggugcugugaggacuagucccuguucccagagcccacuuuuuuuucuuuuuuugaaauaaaauagccugucuuucagaucuaaaaaaaaaaaaaaaaaaaaaaaaaaaaaaaaaaaaaaaaaaaaaaaaaaaaaaaaaaaaaaaaaaaaaaaaaaaaaaaaaaaaaaaaaaaaaaaaaaaa

SEQ ID NO: 19731 - RNA, 2009 nt, Artificial Sequence
  mRNA product Design a-1 (A100) comprising derived and/or modified sequence from MOPV/LASV reassortant(IGS-1;Clade IV)__AFY05578__SP-HsALB_NP(2-569) (opt4)
aggagagucccgcagucggcguccagcggcucugcuuguucgugugugugucguugcaggccuuauucaagcuuaccaugaagugggugaccuucaucagccugcuguuccuguucagcagcgccuacagcagcgccagcaaggagaucaagagcuuccuguggacccagagccugagaagagagcugagcggcuacugcagcaacaucaagcugcagguggugaaggacgcccaggcccugcugcacggccuggacuucagcgaggugagcaacgugcagagacugaugagaaaggagagaagagacgacaacgaccugaagagacugagagaccugaaccaggccgugaacaaccugguggagcugaagagcacccagcagaagagcauccugagagugggcacccugaccagcgacgaccugcugauccuggccgccgaccuggagaagcugagaagcaaggugaucagaaccgagagaccccugagcgccggcguguacaugggcaaccugagcagccagcagcuggaccagagaagagcccugcugaacaugaucggcaugagcggcggcaaccagggcgccagagccggcagagacggcguggugagagugugggacgugaagaacgccgagcugcugagcaaccaguucggcaccaugcccagccugacccuggccugccugaccaagcagggccagguggaccugaacgacgccgugcaggcccugaccgaccugggccugaucuacaccgccaaguaccccaacaccagcgaccuggacagacugacccagagccaccccauccugaacaugaucgacaccaagaagagcagccugaacaucagcggcuacaacuucagccugggcgccgccgugaaggccggcgccugcaugcuggacggcggcaacaugcuggagaccaucaaggugagcccccagaccauggacggcauccugaagagcauccugaaggugaagaaggcccugggcauguucaucagcgacacccccggcgagagaaaccccuacgagaacauccuguacaagaucugccugagcggcgacggcuggcccuacaucgccagcagaaccagcaucaccggcagagccugggagaacaccgugguggaccuggagagcgacggcaagccccagaaggccgacagcaacaacagcagcaagagccugcagagcgccggcuucaccgccggccugaccuacagccagcugaugacccugaaggacgccaugcugcagcuggaccccaacgccaagaccuggauggacaucgagggcagacccgaggaccccguggagaucgcccuguaccagcccagcagcggcugcuacauccacuucuucagagagcccaccgaccugaagcaguucaagcaggacgccaaguacagccacggcaucgacgugaccgaccuguucgccacccagcccggccugaccagcgccgugaucgacgcccugcccagaaacauggugaucaccugccagggcagcgacgacaucagaaagcugcuggagagccagggcagaaaggacaucaagcugaucgacaucgaccugagcaagaccgacagcagaaaguacgagaacgccgugugggaccaguacaaggaccugugccacaugcacaccggcguggugguggagaagaagaagagaggcggcaaggaggagaucaccccccacugcgcccugauggacugcaucauguucgacgccgccgugagcggcggccugaacaccagcgugcugagagccgugcugcccagagacaugguguucagaaccagcacccccagaguggugcugugaggacuagucccuguucccagagcccacuuuuuuuucuuuuuuugaaauaaaauagccugucuuucagaucuaaaaaaaaaaaaaaaaaaaaaaaaaaaaaaaaaaaaaaaaaaaaaaaaaaaaaaaaaaaaaaaaaaaaaaaaaaaaaaaaaaaaaaaaaaaaaaaaaaaa

SEQ ID NO: 19732 - RNA, 2009 nt, Artificial Sequence
  mRNA product Design a-1 (A100) comprising derived and/or modified sequence from LASV(LM765-SLE-2012;Clade IV)__AIT17815__SP-HsALB_NP(2-569) (opt4)
aggagagucccgcagucggcguccagcggcucugcuuguucgugugugugucguugcaggccuuauucaagcuuaccaugaagugggugaccuucaucagccugcuguuccuguucagcagcgccuacagcagcgccagcaaggagaucaagagcuuccuguggacccagagccugagaagagagcugagcggcuacugcagcaacaucaagcugcagguggugaaggacgcccaggcccugcugcacggccuggacuucagcgaggugagcaacgugcagagacugaugagaaaggagagaagagacgacaacgaccugaagagacugagagaccugaaccaggccgugaacaaccugguggagcugaagagcacccagcagaagagcauccugagagugggcacccugaccagcgacgaccugcugauccuggccgccgaccuggagaagcugaagagcaaggugaccagaaccgagagaccccugagcgccggcguguacaugggcaaccugagcagccagcagcuggaccagagaagagcccugcuggacaugaucggcaugagcggcagcaaccagggcgccagagccggcagagacggcguggugagagugugggacgugaagaacgccgagcugcugaacaaccaguucggcaccaugcccagccugacccuggccugccugaccaagcagggccagguggaccugaacgacgccgugcaggcccugaccgaccugggccugaucuacaccgccaaguaccccaacaccagcgaccuggacagacugacccagagccaccccauccugaacaugaucgacaccaagaagagcagccugaacaucagcggcuacaacuucagccugggcgccgccgugaaggccggcgccugcaugcuggacggcggcaacaugcuggagaccaucaaggugagcccccagaccauggacggcauccugaagagcauccugaaggugaagaaggcccugggcauguucaucagcgacgcccccggcgagagaaaccccuacgagaacauccuguacaagaucugccugagcggcgacggcuggcccuacaucgccagcagaaccagcaucaccggcagagccugggagaacaccgugguggaccuggagagcgacggcaagccccagaaggccggcagcaacggcagcaacaagagccugcagagcgccggcuucaccgccggccugaccuacagccagcugaugacccugaaggacgccaugcugcagcuggaccccaacgccaagaccuggauggacaucgagggcagacccgaggaccccguggagaucgcccuguaccagcccagcagcggcugcuacauccacuucuucagagagcccaccgaccugaagcaguucaagcaggacgccaaguacagccacggcaucgacgugaccgaccuguucgccgcccagcccggccugaccagcgccgugaucgacgcccugcccagaaacauggugaucaccugccagggcagcgacgacaucagaaagcuguucgagagccagggcagaaaggacaucaagcugaucgacaucgcccugagcaagaccgacagcagaaaguacgagaacgccgugugggaccaguacaaggaccugugccacaugcacaccggcaucgugguggagaagaagaagagaggcggcaaggaggagaucaccccccacugcgcccugauggacugcaucauguucgacgccgccgugagcggcggccugaacaccagcgugcugagagccgugcugcccagagacaugguguucagaaccagcacccccagaguggugcugugaggacuagucccuguucccagagcccacuuuuuuuucuuuuuuugaaauaaaauagccugucuuucagaucuaaaaaaaaaaaaaaaaaaaaaaaaaaaaaaaaaaaaaaaaaaaaaaaaaaaaaaaaaaaaaaaaaaaaaaaaaaaaaaaaaaaaaaaaaaaaaaaaaaaa

SEQ ID NO: 19733 - RNA, 2009 nt, Artificial Sequence
  mRNA product Design a-1 (A100) comprising derived and/or modified sequence from LASV(LM776-SLE-2012;Clade IV)__AIT17825__SP-HsALB_NP(2-569) (opt4)
aggagagucccgcagucggcguccagcggcucugcuuguucgugugugugucguugcaggccuuauucaagcuuaccaugaagugggugaccuucaucagccugcuguuccuguucagcagcgccuacagcagcgccagcaaggagaucaagagcuuccuguggacccagagccugagaagagagcugagcagcuacugcagcaacaucaagcugcagguggugaaggacgcccaggcccugcugcacggccuggacuucagcgaggugagcaacgugcagagacugaugagaaaggagagaagagacgacaacgaccugaagagacugagagaccugaaccaggccgugaacaaccugguggagcugaagagcacccagcagaagagcauccugagagugggcacccugaccagcgacgaccugcugauccuggccgccgaccuggagaagcugaagagcaaggugaccagaaccgagagaccccugagcgccggcguguacaugggcaaccugagcagccagcagcuggaccagagaagagcccugcugagcaugaucggcaugagcggcagcaaccagggcgccagagccggcagagacggcguggugagagugugggacgugaagaacgccgagcugcugaacaaccaguucggcaccaugcccagccugacccuggccugccugaccaagcagggccagguggaccugaacgacgccgugcaggcccugaccgaccugggccugaucuacaccgccaaguaccccaacaccagcgaccuggacagacugacccagagccaccccauccugaacaugaucgacaccaagaagagcagccugaacaucagcggcuacaacuucagccugggcgccgccgugaaggccggcgccugcaugcuggacggcggcaacaugcuggagaccaucaaggugagcccccagaccauggacggcauccugaagagcauccugaaggugaagaaggcccugggcauguucaucagcgacacccccggcgagagaaaccccuacgagaacauccuguacaagaucugccugagcggcgacggcuggcccuacaucgccagcagaaccagcaucaccggcagagccugggagaacaccgugguggaccuggagagcgacggcaagccccagaaggccggcagcaacaacagcaacaagagccugcagagcgccggcuucaccgccggccugaccuacagccagcugaugacccugaaggacgccaugcugcagcuggaccccaacgccaagaccuggauggacaucgagggcagacccgaggaccccguggagguggcccuguaccagcccagcagcggcugcuacauccacuucuucagagagcccaccgaccugaagcaguucaagcaggacgccaaguacagccacggcaucgacgugaccgaccuguucgccgcccagcccggccugaccagcgccgugaucgacgcccugcccagaaacauggugaucaccugccagggcagcgacgacaucagaaagcugcuggagagccagggcagaaaggacaucaagcugaucgacaucgcccugagcaagaccgacagcagaaaguacgagaacgccgugugggaccaguacaaggaccugugccacaugcacaccggcguggugguggagaagaagaagagaggcggcaaggaggagaucaccccccacugcgcccugauggacugcaucauguucgacgccgccgugagcggcggccugaacaccagcgugcugagagccgugcugcccagagacaugguguucagaaccagcacccccagaguggugcugugaggacuagucccuguucccagagcccacuuuuuuuucuuuuuuugaaauaaaauagccugucuuucagaucuaaaaaaaaaaaaaaaaaaaaaaaaaaaaaaaaaaaaaaaaaaaaaaaaaaaaaaaaaaaaaaaaaaaaaaaaaaaaaaaaaaaaaaaaaaaaaaaaaaaa

SEQ ID NO: 19734 - RNA, 2009 nt, Artificial Sequence
  mRNA product Design a-1 (A100) comprising derived and/or modified sequence from LASV(Mad39;Clade IV)__ANH09723__SP-HsALB_NP(2-569) (opt4)
aggagagucccgcagucggcguccagcggcucugcuuguucgugugugugucguugcaggccuuauucaagcuuaccaugaagugggugaccuucaucagccugcuguuccuguucagcagcgccuacagcagcgccagcaaggagaucaagagcuuccuguggacccagagccugagaagagagcugagcggcuacugcagcaacaucaagcugcagguggugaaggacgcccaggcccugcugcacggccuggacuucagcgaggugagcaacgugcagagacugaugagaaagcagagaagagacgacaacgaccugaagagacugagagaccugaaccaggccgugaacaaccugguggagcugaagagcacccagcagaagagcgugcugagagugggcacccugaccagcgacgaccugcugacccuggccgccgaccuggagaagcugaagagcaaggugaccagaaccgagagaccccugaccgccggcguguacaugggcaaccugagcagccagcagcuggaccagagaagagcccugcugaacaugaucggcaugagcggcggcaaccagggcgccagaaccggcagagacggcguggugagagugugggacgugaagaacgccgagcugcugaacaaccaguucggcaccaugcccagccugacccuggccugccugaccaagcagggccagguggaccugaacgacguggugcaggcccugaccgaccugggccugaucuacaccgccaaguaccccaacaccagcgaccuggacagacugacccagagccaccccauccugaacaugaucgacaccaacaagagcagccugaacaucagcggcuacaacuucagccugggcgccgccgugaaggccggcgccugcaugcuggacggcggcaacaugcuggagaccaucaaggugagcccccagaccauggacggcauccugaagagcauccugaaggugaagaagagccugggcauguucaucagcgacacccccggcgagagaaaccccuacgagaacauccuguacaagaucugccugagcggcgacggcuggcccuacaucgccagcagaaccagcaucaccggcagagccugggagaacaccgugguggaccuggagagcggcggcaagccccagaaggccggcagcaacaacagcaacaagagccugcagagcgccggcuucgccgccggccugaccuacagccagcugaugacccugaaggacgccaugcugcagcuggaccccaacgccaagaccuggauggacaucgagggcagacccgaggaccccguggagaucgcccuguaccagcccaucagcggcugcuacauccacuucuucagagagcccaccgaccugaagcaguucaagcaggacgccaaguacagccacggcaucgacgugaccgaccuguucgccgcccagcccggccugaccagcgccgugaucgaggcccugcccagaaacauggugaucaccugccagggcagcgacgacaucagaaagcuguucgagagccagggcagaaaggacaucaagcugaucgacaucgcccugagcaagaccgacagcagaaaguacgagaacgccgugugggaccaguacaaggaccugugccacaugcacaccggcguggugguggagaagaagaagaagggcggcaaggaggagaucaccccccacugcgcccugauggacugcaucauguucgacgccgccgugagcggcggccugaacacccuggugcugagagccgugcugcccagagacaugguguucagaaccagcacccccaagguggugcugugaggacuagucccuguucccagagcccacuuuuuuuucuuuuuuugaaauaaaauagccugucuuucagaucuaaaaaaaaaaaaaaaaaaaaaaaaaaaaaaaaaaaaaaaaaaaaaaaaaaaaaaaaaaaaaaaaaaaaaaaaaaaaaaaaaaaaaaaaaaaaaaaaaaaa

SEQ ID NO: 19735 - RNA, 2009 nt, Artificial Sequence
  mRNA product Design a-1 (A100) comprising derived and/or modified sequence from LASV(Z0947-SLE-2011;Clade IV)__AIT17841__SP-HsALB_NP(2-569) (opt4)
aggagagucccgcagucggcguccagcggcucugcuuguucgugugugugucguugcaggccuuauucaagcuuaccaugaagugggugaccuucaucagccugcuguuccuguucagcagcgccuacagcagcgccagcaaggagaucaagagcuuccuguggacccagagccugagaagagagcugagcggcuacugcagcaacaucaagcugcagguggugaaggacgcccaggcccugcugcacggccuggacuucagcgaggugagcaacgugcagagacugaugagaaaggagagaagagacgacaacgaccugaagagacugagagaccugaaccaggccgugaacaaccugguggagcugaagagcacccagcagaagagcauccugagagugggcacccugaccagcgacgaccugcugauccuggccgccgaccuggagaagcugaagagcaaggugaccagaaccgagagaccccugagcgccggcguguacaugggcaaccugagcagccagcagcuggaccagagaagagcccugcugaacaugaucggcaugagcggcagcaaccagggcgccagaaccggcagagacggcguggugagagugugggacgugaagaacgccgagcugcugaacaaccaguucggcaccaugcccagccugacccuggccugccugaccaagcagggccagguggaccugaacgacgccgugcaggcccugaccgaccugggccugaucuacaccgccaaguaccccaacaccagcgaccuggacagacugacccagagccaccccauccugaacaugaucgacaccaagaagagcagccugaacaucagcggcuacaacuucagccugggcgccgccgugaaggccggcgccugcaugcuggacggcggcaacaugcuggagaccaucaaggugagcccccagaccauggacggcauccugaagagcauccugaaggugaagaaggcccugggcauguucaucagcgacgcccccggcgagagaaaccccuacgagaacauccuguacaagaucugccugagcggcgacggcuggcccuacaucgccagcagaaccagcaucaccggcagagccugggagaacaccgugguggaccuggagagcgacggcaagccccagaaggccggcagcaacggcagcaacaagagccugcagagcgccggcuucaccgccggccugaccuacagccagcugaugacccugaaggacgccaugcugcagcuggaccccaacgccaagaccuggauggacaucgagggcagacccgaggaccccguggagaucgcccuguaccagcccagcagcggcugcuacauccacuucuucagagagcccaccgaccugaagcaguucaagcaggacgccaaguacagccacggcaucgacgugaccgaccuguucgccgcccagcccggccugaccagcgccgugaucgacgcccugcccagaaacauggugaucaccugccagggcagcgacgacaucagaaagcuguucgagagccagggcagaaaggacaucaagcugaucgacaucgcccugagcaagaccgacagcagaaaguacgagaacgccgugugggaccaguacaaggaccugugccacaugcacaccggcaucgugguggagaagaagaagagaggcggcaaggaggagaucaccccccacugcgcccugauggacugcaucauguucgacgccgccgugagcggcggccugaacaccagcgugcugagagccgugcugcccagagacaugguguucagaaccagcacccccagaguggugcugugaggacuagucccuguucccagagcccacuuuuuuuucuuuuuuugaaauaaaauagccugucuuucagaucuaaaaaaaaaaaaaaaaaaaaaaaaaaaaaaaaaaaaaaaaaaaaaaaaaaaaaaaaaaaaaaaaaaaaaaaaaaaaaaaaaaaaaaaaaaaaaaaaaaaa

SEQ ID NO: 19736 - RNA, 2009 nt, Artificial Sequence
  mRNA product Design a-1 (A100) comprising derived and/or modified sequence from LASV(Josiah;Clade IV)__NP_694869__SP-HsALB_NP(2-569) (opt5)
aggagagucccgcagucggcguccagcggcucugcuuguucgugugugugucguugcaggccuuauucaagcuuaccaugaagugggugaccuucaucagccugcucuuucuguucuccucugccuacagcagcgccuccaaggagaucaaaucuuuccuguggacccagagccucagacgggaacuguccggcuacugcucuaacauuaagcugcaaguggucaaagacgcucaggcccugcuccacgggcuggauuuuagcgagguuuccaaugugcagcgccuuaugagaaaggaacggcgcgacgauaacgaccugaaaagacuccgggaucugaaucaggcggugaacaaucuggucgagcucaagucuacacaacaaaagagcauccugcgcgugggaacgcuuaccuccgacgaucugcucauucuggcugccgaccuugaaaaacuuaagagcaaaguuaucagaacagagcggccccucucugccggcguguauauggggaaccuguccagccagcagcuggaucagcgcagagcucuccugaauaugauuggaaugucuggcgggaaccagggagcccgggcuggccgcgacggcgucgugagaguuugggaugugaagaaugccgagcuucugaacaaucaguucgggaccaugccuucccucacacuggcgugucuuaccaaacagggacaagucgaccugaacgaugccgugcaggcucucacagaccugggccugaucuacaccgccaaguauccgaauacgagcgaccucgaucggcugacccagucucaucccauccuuaacaugauugacacaaagaaauccagccugaauaucuccggguacaacuuuucucucggagcugccgugaaggcgggcgccugcaugcuggaugggggaaacaugcuugaaaccauuaaagucagcccucaaacaauggacggcauccugaaguccauucucaaaguuaagaaagcucugggcauguucaucagcgauacccccggggagcgcaauccuuaugaaaacauucuguacaagaucugucucucuggagacggcuggcccuauaucgccuccagaacgagcauuacagggcgggcuugggagaauaccgugguggaucuggagucugacggaaagccucagaaagccgauagcaacaauuccucuaagagccuucaguccgccggcuuuacagcugggcugaccuacagccagcucaugacccugaaagacgcgaugcugcaacuugauccgaacgccaagacauggauggacaucgaaggaagacccgaggacccugucgaaauugcucucuaccagcccucuuccggcugcuauauccacuucuuucgcgagccuacggaucugaaacaguucaagcaggacgccaaguacagccauggcauugaugugaccgaccuguuugccacacaacccgggcucaccucugcuguuaucgaugcccugccgcggaauauggugaucacaugucagggauccgacgauauuagaaaacuucuggaaagccagggccgcaaggacaucaaacucauugauaucgcgcuguccaagaccgacucucggaaauaugagaacgcugucugggaucaguacaaggaccugugccacaugcauacgggggugguuguggagaagaaaaagagaggaggcaaagaagagauuacaccucacugugcccuuauggauugcaucauguucgacgccgcugucagcgggggccucaauaccuccgugcugcgcgccguccugccccgggacaugguguuuagaaccucuacaccucgcguugugcucugaggacuagucccuguucccagagcccacuuuuuuuucuuuuuuugaaauaaaauagccugucuuucagaucuaaaaaaaaaaaaaaaaaaaaaaaaaaaaaaaaaaaaaaaaaaaaaaaaaaaaaaaaaaaaaaaaaaaaaaaaaaaaaaaaaaaaaaaaaaaaaaaaaaaa

SEQ ID NO: 19737 - RNA, 2009 nt, Artificial Sequence
  mRNA product Design a-1 (A100) comprising derived and/or modified sequence from LASV(LP;Clade I)__AAF86702__SP-HsALB_NP(2-569) (opt5)
aggagagucccgcagucggcguccagcggcucugcuuguucgugugugugucguugcaggccuuauucaagcuuaccaugaagugggugaccuucaucagccugcucuuucuguucuccucugccuacagcagcaacuccaaggagaucaaaucuuuccuguggacccagagccucagacgggaacuguccggcuacugcucuaauauuaagcuccaaguggucaaagacgcccaggcucugcuccacgggcuggauuuuagcgagguuuccaacgugcagcgccuuaugagaaagcagaaacgggacgaugccgaccugaagcgccucagagaucugaaucaagcggugaacaaucuggucgaacucaagucuacacagcagaaaaacgugcugcggguuggaacgcuuagcuccgacgaucugaucacccucgcugccgaccuggagaaacuuaaaagcaaggugauucgcacagaaagaccccugucuuccggcgucuauauggggaaucucagcucucagcaacuggaucagcggcgcgcccugcucuccaugaucggaaugagcggcgggccucagggaaacagaaccggcggcgacggggugguucgggugugggaugucaaaaaugcugagcugcuuaacaaucaguucggaacaaugccgucucugacccucgccugucugacaaagcaaggccagguggaccuuaacgaugcugugcaggcccugaccgaccucgggcugauuuacacggcgaaguaucccaauuccagcgaccuggauaugcucacccaaucccauccuauccugggaauggucgacacaaagaagucuagccuuaacaucuccggcuacaauuuuagccugggggccgcuguuaaagccggagcuugcaugcucgauggcggcaacaugcuggagaccauuaaggugucuccccagacaauggacgggauccuuaaauccauucugaaggugaaacgcagccucggaauguucaucucugauaccccuggcgaaagaaaccccuaugagaauauucuguacaagaucugucugagcggggaaggauggccuuauauugccucccggacgucuaucacaggccgcgcgugggagaacacccucgucgaccuggagagcgauaauaagccgcccaaacuuaacuccgccgggagcaauaagucucugcaggcugccggacucaacgcuggccugacauacucccagcugaugacccuuaaagacugcaugcuccaacuggauccuagcucuaagaccuggaucgacauugaaggcagacccgaggauccuguggaaaucgcccuguuucagcccuccagcggguguuacauucacuucuuucgggagccgacagaccucaaacaguucaagcaggacgccaaguauucccauggaaucgauguuacggaccuguuuucuacccaaccuggccuuacaagcgcugugauugaagcgcugcccagaaauaugguccuuaccugccagggguccgaugacaucaaaaagcugcuggagucucagggacgccgggauaucaaacuuauugacaucagccucuccaaggccgauagcagaaaauucgagaacgcugugugggaccaguacaaggaucugugucacaugcauacaggcguuguggucgaaaagaaaaagcgcgggggcaaagaggaaauuaccccucacugcgcccugcucgacuguaucauguuugaugccgcuacgacaggaucucugaauauuaccacccuucgggccgugcugcccagagacauggucuuccgcacauccacccccaaggugguucucugaggacuagucccuguucccagagcccacuuuuuuuucuuuuuuugaaauaaaauagccugucuuucagaucuaaaaaaaaaaaaaaaaaaaaaaaaaaaaaaaaaaaaaaaaaaaaaaaaaaaaaaaaaaaaaaaaaaaaaaaaaaaaaaaaaaaaaaaaaaaaaaaaaaaa

SEQ ID NO: 19738 - RNA, 2009 nt, Artificial Sequence
  mRNA product Design a-1 (A100) comprising derived and/or modified sequence from LASV(803213;Clade II)__AAF86704__SP-HsALB_NP(2-569) (opt5)
aggagagucccgcagucggcguccagcggcucugcuuguucgugugugugucguugcaggccuuauucaagcuuaccaugaagugggugaccuucaucagccugcucuuucuguucuccucugccuacagcagcgccuccaaggaggugaaaucuuuccuguggacccagagccucagacgggaacuguccggcuacugcucuaacaucaaacuucaagucguuaaggacgcucaggcccugcuccacgggcuggauuuuagcgaggugaauaacgugcagcgccuuaugagaaagcagaaacgggacgauggagaccugaagcgccucagagaucugaaucaagcggucaacaaucugguggaacucaaguccacacagcagaaaucuauucugcggguuggcacgcuuaccagcgacgaucugcucacacuggcugccgaccuugagaagcugaaauccaaggugauccgcaccgaaagaccccucagcucuggggucuauaugggaaaccuguccacacagcaacuggagcagcggcgcgcccuccugaauaugauuggcauggugggaggagcucagggcacccagccuggcagagaugggguugugcgggucugggacgugaaaaacccggaucuucugaauaaccaauucggaacaaugcccagccucacccuggccugucuuacgaagcagggccagguggaccugaaugaugcuguccucgcccugaccgaccuggggcucaucuacacagcgaaguauccuaacucuuccgaccuggaucgccuuagccaaucucaucccauucugaauaugguugacaccaaaaaguccagccucaacaucuccggauacaauuuuucucugggcgccgcugugaaagccggggcuugcaugcuugauggaggcaacaugcuggagacaaucaaggugaccccucagacgauggacggcauucucaaaagcauccugaaggucaaaagaucccuggggauguucgugagcgauacacccggagaacggaacccuuaugagaauauucucuacaagaucugucugucuggcgacggguggccguauauugccucccgcaccagcaucguugggagagcgugggaaaacacaaccguggaucuugagucugacggcaagccccagaaagucgggaccgccggaagcaauaagucccugcagucugcuggcuuuccuacaggccucacguacagccaacugaugacccugaaagauuccaugaugcagcuugaccccagcgccaagacauggauugauaucgaggggcggccugaagaccccguggagaucgcucucuaccagccgaugucuggaugcuauauucacuucuuuagagaaccuaccgaccugaaacaguucaagcaagaugccaaguacucccauggcaucgacguugccgaucuguuucccgcucagccugggcucacaagcgcggugauugaggcccugccccgcaacaugguccuuaccugucagggaucugacgauaucaaaaagcugcucgacucccagggccggagagauauuaaacugaucgacaucagccuguccaagguggauucucgcaaauucgaaaaugcugucugggaccaaugcaaggaucuuugucacaugcauacgggggugguuguggagaagaaaaagcggggcggaaaagaggaaauuacaccccacugcgcccucauggacuguaucauguuugaugccgcugucagcggcgggcugaacauuccugugcugagagccguucucccgcgcgacaugguguuccggaccuccucucccaaggucgugcugugaggacuagucccuguucccagagcccacuuuuuuuucuuuuuuugaaauaaaauagccugucuuucagaucuaaaaaaaaaaaaaaaaaaaaaaaaaaaaaaaaaaaaaaaaaaaaaaaaaaaaaaaaaaaaaaaaaaaaaaaaaaaaaaaaaaaaaaaaaaaaaaaaaaaa

SEQ ID NO: 19739 - RNA, 2012 nt, Artificial Sequence
  mRNA product Design a-1 (A100) comprising derived and/or modified sequence from LASV(GA391;Clade III)__CAA36646__SP-HsALB_NP(2-570) (opt5)
aggagagucccgcagucggcguccagcggcucugcuuguucgugugugugucguugcaggccuuauucaagcuuaccaugaagugggugaccuucaucagccugcucuuucuguucuccucugccuacagcagcgccuccaaggaggugagaucuuuccuguggacccagagccuccggcgcgaacuguccggcuacugcucuaacaucaaacuucaagucguuaaggacgcucaggcccugcuccacgggcuggauuuuagcgagguguccaaugugcagagacuuaugcggaaacagaagcgcgacgauggagaccugaaaagacuccgggaucugaaccaagcggucaauaaccugguggaacucaagucuacacagcagaaaagcguucugcgcgugggcacgcuuuccagcgacgaucugcucauucuggcugccgaccuugagaaacugaagucuaaagucaccagaacagaacggccccucuccagcgggguguauaugggaaaucugucuucccagcaacuggaucagcgcagagcccuccugaacaugaucggcaugaccgggguuagcggaggcggcaagggggcuucugacggaauugugcgggucugggaugugaaaaaugccgagcuucugaacaaucaguucggcacaaugccuucccucacccuggcuugucuuacaaagcaggggcaaguggaccugaacgaugccguccaggcgcucaccgaccugggacugaucuacacggccaaguauccgaauagcuccgaccucgaucgccugucucagagccaucccauucuuaacaugaucgacaccaaaaaguccagccugaauaucucuggcuacaacuuuucccucggggcugccguuaaagcuggagccugcaugcuggauggcggcaauaugcuugagacaauuaaggugagcccucaaaccauggacgggauccugaaaucuauucucaaggugaaaaagagccugggaauguucgucuccgauacacccggcgaaagaaacccuuaugagaacauccuguacaagauuugucucucuggggacggauggcccuauaucgcgagccggaccuccauugugggccgcgccugggaaaauacgguuguggaucuggagcaggacaacaaaccucagaagaucgggaauggaggcagcaacaaaucucuucaguccgcuggcuuugccgcugggcugacauacagccaacucaugacccugaaggauuucaaaugcuuuaaucugaucccgaacgccaagacauggauggacauugagggaagacccgaagauccugucgagaucgcccuuuaccagcccucuuccggcuguuaugugcacuucuuucgggaaccuaccgaccucaagcaguucaaacaggacgcuaaguacagccaugggauugauguuaccgaccuguuugcggcccaacccggacugacauccgcugugaucgaggcccucccgagaaauauggucauuacgugccagggcucugaagauauccgcaaacugcuugagagccaggggcggagagacaucaagcugauugauaucacccucuccaaagccgacucucgcaaguucgagaacgcugugugggaucaguuuaaggaccugugucacaugcauacaggcgucgugguugaaaagaagaaacggggaggcaaggaggaaauuaccccucacugcgcccugauggauuguaucauguucgacgcggcugugagcgggggacuugaugccaaaguccucagagugguucugccccgcgacaugguguuccggacauccaccccuaaggucgugcugugaggacuagucccuguucccagagcccacuuuuuuuucuuuuuuugaaauaaaauagccugucuuucagaucuaaaaaaaaaaaaaaaaaaaaaaaaaaaaaaaaaaaaaaaaaaaaaaaaaaaaaaaaaaaaaaaaaaaaaaaaaaaaaaaaaaaaaaaaaaaaaaaaaaaa

SEQ ID NO: 19740 - RNA, 2009 nt, Artificial Sequence
  mRNA product Design a-1 (A100) comprising derived and/or modified sequence from LASV(AV;Clade V)__CCA30315__SP-HsALB_NP(2-569) (opt5)
aggagagucccgcagucggcguccagcggcucugcuuguucgugugugugucguugcaggccuuauucaagcuuaccaugaagugggugaccuucaucagccugcucuuucuguucuccucugccuacagcagcgccuccaaggaggugaaaucuuuccuguggacccagagccucagacgggaacuguccggcuacugcucuaacaucaaacuucaagucguuaaggacgcucaggcccugcuccacgggcuggauuuuagcgagguguccaaugugcagcgccuuaugagaaagcagcggcgcgacgauucugaccugaaaagacuccgggaucugaaccaagcggucaauaaccugguggaacucaagagcacacagcagaaguccguucugcgcgugggaacgcuuagcucugacgaucugcucacccuggcugccgaccuugagaaacugaaguccaaagucacaagaaccgaacggccccucagcucuggcguguauauggggaaucuguccagccagcaacuggaucagcgcagagcccuccugaaccuuauuggaaugacaaauggcucucaggggucccaggcuggacgggacggcguugugcgcgucugggaugugaagaacgccgagcugcucaauaaccaauucggcaccaugccuagccugacacuugcuugucugaccaaacagggacagguggaccucaaugaugucguucaagcccugacggaccuggggcucaucuacaccgcgaaguauccgaacacauccgaccuggauagacuuacccagucucaucccauucugaauaugaucgacacaaagaaaagcucccucaacauuagcggcuacaauuuuucucugggggccgcugugaaggccggagcuugcaugcuugauggcgggaacaugcuggagaccaucaaaguguccccucagagcauggacggaauccucaagucuauucugaaagucaagcgggcccugggcauguucgugagcgauacgcccggcgaacgcaacccuuaugagaauauccucuacaaaauuugucuguccggggacggauggcccuauaucgcgucuagaacaagcauuguuggccgggccugggaaaacaccguggucgaucuugagacagacgggaagccucagaagaucggauccggcaauagcaacaaaucucugcaauccgcuggguuuagcgccggacucaccuacucucagcugaugacccugaaggaugcuaugcuucagcucgacccgaaugccaaaacauggauggauauugagggcagacccgaagacccuguggagguugcccuguaccagcccaucuccggcugcuauauccacuucuuucgcgaaccuacggaccugaagcaauucaaacaggaugcuaaguacagccaugggauugacaucgcggaucucuuugccgcucagcccggacugaccuccgccgugauugaggcccuuccgcggaacauggucaucacaugucagggcucugaagacauuaagaaacugcucgagagccaagggagaaaggauaucaaacugaucgacauugcucuguccaagaucgauucucgcaaauucgagaaugccgugugggaccaguauaaggaucuuugccacaugcauaccggagucgugguugaaaagaaaaagcggggcgggaaagaggaaauuacaccucacugugcgcucauggacugcaucauguuugaugcugccgugagcggcggacugaacacccugguccucagagccgugcugccccgcgacaugguuuuccggacguccacaccuagagugguccuuugaggacuagucccuguucccagagcccacuuuuuuuucuuuuuuugaaauaaaauagccugucuuucagaucuaaaaaaaaaaaaaaaaaaaaaaaaaaaaaaaaaaaaaaaaaaaaaaaaaaaaaaaaaaaaaaaaaaaaaaaaaaaaaaaaaaaaaaaaaaaaaaaaaaaa

SEQ ID NO: 19741 - RNA, 2009 nt, Artificial Sequence
  mRNA product Design a-1 (A100) comprising derived and/or modified sequence from LASV(Togo/2016/7082;Clade VI)__AMR44578__SP-HsALB_NP(2-569) (opt5)
aggagagucccgcagucggcguccagcggcucugcuuguucgugugugugucguugcaggccuuauucaagcuuaccaugaagugggugaccuucaucagccugcucuuucuguucuccucugccuacagcagcaacuccaaggaggugaaaucuuuccuguggacccagagccucagacgggaacuguccggcuacugcucuaauaucaaacuucaagucguuaaagacgcccaggcucugcuccacgggcuggauuuuagcgagguguccaacgugcagcgccuuaugagaaagcagaaacgggacgauggagaccugaagcgccucagagaucugaaucaagccgucaacaaucugguggaacucaagucuguucagcagaaaagcauucugcgggugggcacacuuacguccgacgaucugcucacccuggcggcugaccuugagaagcugaaaagcaaggucacacgcaccgaaagaccccucucuuccgggguguauaugggaaaccugagcucucagcaacuggaucagcggcgcgcccuccuguccaugaucggcaugagcgggggaaaucagaacucucagccuaaaggcgacggcguugugagagucugggaugugaagaaugccgaccuucugaacaaucaauucgggacaaugccgucccucacccuggcuugucuuacaaagcagggacagguggaucugaacgacgccguccaagcucucaccgaccugggccugauuuacacggccaaauaucccaauagcuccgaucucgaccggcugucucagagccauccuauccuuaacaugauugauaccaagaaauccagccugaauaucucuggguacaacuuuucccucggagcggccaucaagacaggcgcuugcaugcuggacgggggaaacaugcuugagaccauuaaaguuacaccccagaccauggauggcauccucaagagcauucugaaagugaagcgcucucugggcauguucaucagcgacacgccuggggagagaaaucccuaugaaaacauucuguacaagaucugucucuccggagauggcuggccuuauauugccucucggacagcuaucaucgggcgcgccugggagaauaccguggucgaccuggaaagcgauuccaaaccgcagaagauuggaagcaacggcucuaauaaaucccuucaaagcgcgggguuugcccccggacugacauacucucagcucaugacccugaaggacuccaugcugcagcuugauccuaacgcuaaaaccuggaucgacauugagggcagacccgaggacccuguggaaguugcccucuuccagcccaucagcggcugcuacauucacuuuuuccgggagccgacagaucugaagcaauuuaagcaggacgcuaaauauucccaugggaucgaugugacggaccuguucgccgcccagccuggacucaccucugcugucaucgaagcgcugcccagaaauauggugcuuacaugucagggcagcgaugacauuaagaaacugcucgauucccaagggcgccgggacaucaagcugauugauguuucucugaacaaaaucgacagcagaaaguuugagaaugccgugugggaucaguacaaggaccuuugccacaugcauaccggagucguggucgaaaagaagaaaaagggcgggaaagaggagauuacaccucacugugcucuccuggauugcaucauguucgacgccgccguguccggcggacugaacgcuaccguucuccgcgccgugcugccccgggacauggucuuuagaacgagcucucccaaggugguucuuugaggacuagucccuguucccagagcccacuuuuuuuucuuuuuuugaaauaaaauagccugucuuucagaucuaaaaaaaaaaaaaaaaaaaaaaaaaaaaaaaaaaaaaaaaaaaaaaaaaaaaaaaaaaaaaaaaaaaaaaaaaaaaaaaaaaaaaaaaaaaaaaaaaaaa

SEQ ID NO: 19742 - RNA, 2009 nt, Artificial Sequence
  mRNA product Design a-1 (A100) comprising derived and/or modified sequence from LASV(KAK-428;Clade n.d. (VII))__ANH09741__SP-HsALB_NP(2-569) (opt5)
aggagagucccgcagucggcguccagcggcucugcuuguucgugugugugucguugcaggccuuauucaagcuuaccaugaagugggugaccuucaucagccugcucuuucuguucuccucugccuacagcagcaacuccaaggaggugaaaucuuuccuguggacccagagccucagacgggaacuguccggcuacugcacaaauaucaaacuucaagucguuaaggacgcccaggcucugcuccacgggcuggauuuuucugaggugagcaacgugcagcgccuuaugagaaagcagaaacgggacgauaaugaccugaagcgccucagagaucugaaccaagccgucaauaaccugguggaacucaaguccguucagcagaaaucugugcugaaggucggaacgcuuaauagcgacgaucugcucacccuggcggcugaccuugagaaacugaaguccaaagugguucggacagaacgcccccucagcucuggcguguauauggggaaccuguccagccagcaacuggaucagagacgggcccuccugaauaugauuggaauggccggcgggucucagggaaaccagccuucccgcgacggcgucgugagagugugggaugucaagaaugcugaccuucugaacaaucaauucggcaccaugccgagccucacacuggccugucuuaccaagcaggggcagguugaucugaacgacguggugcucgcucugacagaccugggacucaucuacaccgccaaauaucccaauucuuccgaucuggaccggcuuagccaaaaccauccuguccugaacaugauugaugugaauaaguccucucucaacaucagcggcuacaauuuuucccugggggcggccguuaaagcuggagccugcaugcuugacggcgggaacaugcuggagacgauuaagaucagcccccagaccguggauggaauccucaaaucuauucugaaggucaaacgcgcucugggcauguucguguccgacacaccuggcgagagaaaucccuaugaaaacauccucuacaagguuugucugagcgggaauggauggccuuauauugccucucggaccagcaucgugggccgcgcgugggagaacacagucguggaucuugaauccaauaagaaccagccgaaagucgggaauaacggaucuaauaagaugcugcagagcuccggcuuugccaccgggcucacguacagccaacugaugacacugagagacucuaugcuucagcucgaucccaccgcuaaaacauggauugacaucgagggacggccugaggaucccguggaacuggcccuguuccagccuuccagcggcugcuacauucacuuuuucagagagcccaccgaccucaagcaguuuaaacaagacgcuaaguauucucauggcaucgauguuaacgaccuguucuccgcccagccggggcuuaccagcgccgugcuggaagcucucccucgcaauaugguccugacaugucagggauccgaugacauccggaagcugcuugauucucaggacagaaaagauauuaagcucaucgacauuagccuguccaaagcggaugcccgcaaguuugagaacgacgugugggaucaauucaaagaccugugccacaugcauacgggcaucguuguggaaaagaagaaaaagggagggaaacaggagaugacaccccacugugcucuccuggauugcauuauguuugacgccgccgucucuggcgggcuuaacgugccuacccugcgggcugugcuccccaccgacaugguuuucagaacaaucaccacgaaggucgugcugugaggacuagucccuguucccagagcccacuuuuuuuucuuuuuuugaaauaaaauagccugucuuucagaucuaaaaaaaaaaaaaaaaaaaaaaaaaaaaaaaaaaaaaaaaaaaaaaaaaaaaaaaaaaaaaaaaaaaaaaaaaaaaaaaaaaaaaaaaaaaaaaaaaaaa

SEQ ID NO: 19743 - RNA, 2009 nt, Artificial Sequence; identical to SEQ ID NO: 19737
  mRNA product Design a-1 (A100) comprising derived and/or modified sequence from LASV(Pinneo-NIG-1969;Clade I)__AIT17837__SP-HsALB_NP(2-569) (opt5)

SEQ ID NO: 19744 - RNA, 2009 nt, Artificial Sequence
  mRNA product Design a-1 (A100) comprising derived and/or modified sequence from LASV(ISTH0009-NIG-2011;Clade II)__AIT17405__SP-HsALB_NP(2-569) (opt5)
aggagagucccgcagucggcguccagcggcucugcuuguucgugugugugucguugcaggccuuauucaagcuuaccaugaagugggugaccuucaucagccugcucuuucuguucuccucugccuacagcagcguguccaaggaggucaaaucuuuccuguggacccagagccucagacgggaacuguccggcuacugcucuaacaucaaacuucaaguugugaaggacgcccaggcucugcuccacgggcuggauuuuagcgagguguccaauguccagcgccuuaugagaaagcagaaacgggacgauucugaccugaagcgccucagagaucugaaccaagccgugaauaaccugguugaacucaagagcacacagcagaaauccauucugcgggugggaacgcuuaccagcgacgaucugcucacacuggcggcugaccuugagaagcugaaaucuaaggucauccgcaccgaaagaccccucuccagcggcguguauauggggaaucugucuacacagcaacuggagcagcggcgcgcccuccugaacaugauuggaaugguuggcggggcccagggaacccagccuggcagagauggcgugguccgggugugggacgugaaaaauccggaucuucugaacaaucaauucgggacaaugcccucccucacccuggcuugucuuacgaagcagggacaggucgaccugaacgaugccguucucgcucugaccgaccugggccucaucuacacagccaaguauccuaauagcucugaccuggaucgccuuucccaaagccaucccauucugaacaugguggacaucaaaaaguccucucucaauaucagcggguacaacuuuucccugggagcggccgugaaagcuggcgccugcaugcuugaugggggaaauaugcuggagaccauuaaggucacaccucagaccauggacggcauccucaaaagcauucugaaggugaaaagaucucugggcauguucguuuccgauacgcccggggaacggaacccuuaugagaacauccucuacaagauuugucugagcggagacggcuggccguauaucgcuucucgcacaagcauuguggggagagccugggaaaauaccacagucgaucuugaguccgacggaaagccccagaaagugggcucugcggggagcaacaagucccugcagagcgccggauuuccuaccggccucaccuacucucaacugaugacacugaaagauuccaugaugcagcuugaccccagcgcuaagacguggaucgauaucgagggccggccugaagaccccguugagauugcccucuaccagccgaugucugggugcuauauccacuucuuuagagaaccuaccgaccugaaacaguucaagcaagaugcuaaguacucccauggaauugacguggccgaucuguuucccgcccagccuggccucacaagcgcugucaucgaggcgcugccccgcaauauggugcuuaccugucagggguccgacgauauuaaacggcugcucgacucucagggaagacgcgauaucaagcugaucgacauugcccugagcaaagcugauucccggagauucgaaaacgccgucugggaccaaugcaaggaucuuugucacaugcauacaggcgugguuguggagaaaaagaagcgcgggggcaaagaggaaaucacgccccacugcgcccucauggacuguauuauguaugaugcugccgucucuggaggccugaauaucccugugcugcgggcgguucucccgagagacaugguguuucgcaccagcucccccaaggucgugcugugaggacuagucccuguucccagagcccacuuuuuuuucuuuuuuugaaauaaaauagccugucuuucagaucuaaaaaaaaaaaaaaaaaaaaaaaaaaaaaaaaaaaaaaaaaaaaaaaaaaaaaaaaaaaaaaaaaaaaaaaaaaaaaaaaaaaaaaaaaaaaaaaaaaaa

SEQ ID NO: 19745 - RNA, 2009 nt, Artificial Sequence
  mRNA product Design a-1 (A100) comprising derived and/or modified sequence from LASV(ISTH2010-NIG-2012;Clade II)__AIT17483__SP-HsALB_NP(2-569) (opt5)
aggagagucccgcagucggcguccagcggcucugcuuguucgugugugugucguugcaggccuuauucaagcuuaccaugaagugggugaccuucaucagccugcucuuucuguucuccucugccuacagcagcgccuccaaggaggugaaaucuuuccuguggacccagagccucagacgggaacuguccggcuacugcucuaacaucaaacuucaagucguuaaggacgcucaggcccugcuccacgggcuggauuuuagcgagguguccaaugugcagcgccuuaugagaaagcagaaacgggacgauucugaccugaagcgccucagagaucugaaccaagcggucaauaaccugguggaacucaagagcacacagcagaaauccauucugcggguuggaacgcuuaccagcgacgaucugcucacacuggcugccgaccuugagaagcugaaaucuaaggugauccgcaccgaaagaccccucuccagcggcgucuauauggggaaucugucuacacagcaacuggagcagcggcgcgcccuccugaaccuuauuggaauggugggcggggcucagggaacccagccuggcagagauggcguugugcgggucugggacgugaaaaauccggaucugcucaacaaucaauucgggacaaugcccucccugacccuugccugucugacgaagcagggacagguggaccucaacgaugcuguccuggcccugaccgaccucggccugaucuacacagcgaaguauccuaauagcucugaccuugaucgccugucccaaagccaucccauucucaacaugguugacaccaaaaaguccucucugaauaucagcggguuuaacuucucccuuggagccgcugugaaagccggcgcuugcaugcuggaugggggaaauaugcucgagacaaucaaggugaccccucagacgauggacggcauucugaaaagcauccugaaggucaaaaagucucucggcauguuuguguccgauacacccggggaaagaaacccuuacgagaacauucuguauaagaucugucuuagcggagacggcuggccguacauugccucucggaccagcaucguugggcgcgcgugggaaaauacaaccguggaucuggaguccgacggaaaaccccacaaggucggcaccgccgggucuaacaaaagccuccaguccgcuggauucccuacaggccugacguauagccagcugaugacccuuaaggauucuaugaugcaacucgaccccuccgccaaaacauggauugauaucgagggcagaccugaagaccccguggagaucgcucuguaccagccgaugagcgggugcuacauucacuuuuuccgggaaccuaccgaccugaagcaguuuaagcaggaugccaaauauucucauggaaucgacguugccgaucucuuccccgcucaaccuggccugacauccgcggugauugaggcccuucccagaaauaugguccugaccugucaggggagcgacgauaucaagcgccuccuggacucccagggacggagagauauuaaacugaucgacaucgcucuuucuaaggccgauagccgccgguuugaaaacgccgugugggaccagugcaaagaucucugucauaugcacacgggcgucgugguugagaagaagaaaagagggggcaaggaggaaauuacaccccacugcgcucugauggacuguaucauguacgaugccgcgguguccggaggccugaauauuccuguccuccgcgcugugcugccgcgggacaugguuuucagaaccucuagccccaaagugguccuuugaggacuagucccuguucccagagcccacuuuuuuuucuuuuuuugaaauaaaauagccugucuuucagaucuaaaaaaaaaaaaaaaaaaaaaaaaaaaaaaaaaaaaaaaaaaaaaaaaaaaaaaaaaaaaaaaaaaaaaaaaaaaaaaaaaaaaaaaaaaaaaaaaaaaa

SEQ ID NO: 19746 - RNA, 2009 nt, Artificial Sequence
  mRNA product Design a-1 (A100) comprising derived and/or modified sequence from LASV(Lassa virus/H.sapiens-wt/NGA/2015/ISTH_0543;Clade II)__AVO03640__SP-HsALB_NP(2-569) (opt5)
aggagagucccgcagucggcguccagcggcucugcuuguucgugugugugucguugcaggccuuauucaagcuuaccaugaagugggugaccuucaucagccugcucuuucuguucuccucugccuacagcagcgccuccaaggaggugaaaucuuuccuguggacccagagccucagacgggaacuguccggcuacugcucuaacaucaaacuucaagucguuaaggacgcucaggcccugcuccacgggcuggauuuuagcgagguguccaaugugcagcgccuuaugagaaagcagaaacgggacgauucugaccugaagcgccucagagaucugaaccaagcggucaauaaccugguggaacucaagagcacacagcagaaauccauucugcggguuggaacgcuuaccagcgacgaucugcucacacuggcugccgaccuugagaagcugaaaucuaaggugauccgcaccgaaagaccccucuccagcggcgucuauauggggaaucugucuacacagcaacuggagcagcggcgcgcccuccugaacaugauuggaauggugggcggggcucagggaacccagccuggcagagauggcguugugcgggucugggacgugaaaaauccggaucuucugaacaaucaauucgggacaaugcccucccucacccuggccugucuuacgaagcagggacagguggaccugaacgaugcuguccucgcccugaccgaccugggccucaucuacacagcgaaguauccuaauagcucugaccuggaucgccuuucccaaagccaucccauucugaacaugguugacaccaaaaaguccucucucaauaucagcggguacaacuuuucccugggagccgcugugaaagccggcgcuugcaugcuugaugggggaaauaugcuggagacaaucaaggugaccccucagacgauggacggcauucucaaaagcauccugaaggucaaaaagucucugggcauguucguguccgauacacccggggaaagaaacccuuaugagaacauucucuacaagaucugucugagcggagacggcuggccguauauugccucucggaccagcaucguugggcgcgcgugggaaaauacaaccguggaucuugaguccgacggaaaaccccagaaggucggcucugccgggagcaacaaaucccugcagagcgcuggauuuccuaccggccucacauacucucaacugaugacgcugaaggauuccaugaugcagcuugaccccagcgccaaaaccuggauugauaucgagggcagaccugaagaccccguggagaucgcucucuaccagccgaugucugggugcuauauucacuucuuucgggaaccuacagaccugaagcaguucaagcaagaugccaaauacucccauggaaucgacguugccgaucuguuucccgcucagccuggccucaccagcgcggugauugaggcccugcccagaaauaugguccuuacaugucagggguccgacgauaucaagcgccugcucgacucucagggacggaaagauauuaagcugaucgacaucgcucugagcaaagccgauuccagacgcuucgaaaacgccgugugggaccaaugcaaggaucuuugucacaugcauaccggcgucgugguugagaagaaaaagagagggggcaaagaggaaauuacgccccacugcgcucucauggacuguaucauguaugaugccgcggugucuggaggccugaauauuccuguccugcgggcugugcucccgcgcgacaugguuuuucggacaagcucccccaaggugguccugugaggacuagucccuguucccagagcccacuuuuuuuucuuuuuuugaaauaaaauagccugucuuucagaucuaaaaaaaaaaaaaaaaaaaaaaaaaaaaaaaaaaaaaaaaaaaaaaaaaaaaaaaaaaaaaaaaaaaaaaaaaaaaaaaaaaaaaaaaaaaaaaaaaaaa

SEQ ID NO: 19747 - RNA, 2009 nt, Artificial Sequence
  mRNA product Design a-1 (A100) comprising derived and/or modified sequence from LASV(Lassa virus/H.sapiens-wt/NGA/2016/ISTH_0009;Clade II)__AVO03572__SP-HsALB_NP(2-569) (opt5)
aggagagucccgcagucggcguccagcggcucugcuuguucgugugugugucguugcaggccuuauucaagcuuaccaugaagugggugaccuucaucagccugcucuuucuguucuccucugccuacagcagcgccuccaaggaggugaaaucuuuccuguggacccagagccucagacgggaacuguccggcuacugcucuaacaucaaacuucaagucguuaaggacgcucaggcccugcuccacgggcuggauuuuagcgagguguccaaugugcagcgccuuaugagaaagcagaaacgggacgauucugaccugaagcgccucagagaucugaaccaagcggucaauaaccugguggaacucaagagcacacagcagaaauccauucugcggguuggaacgcuuaccagcgacgaucugcucacacuggcugccgaccuugagaagcugaaaucuaaggugauccgcaccgaaagaccccucuccagcggcgucuauauggggaaucugucuacacagcaacuggagcagcggcgcgcccuccugaacaugauuggaauggugggcggggcucagggaacccagccuggcagagauggcguugugcgggucugggacgugaaaaauccggaucuucugaacaaucaauucgggacaaugcccucccucacccuggccugucuuacgaagcagggacagguggaccugaacgaugcuguccucgcccugaccgaccugggccucaucuacacagcgaaguauccuaauagcucugaccuggaucgccuuucccaaagccaucccauucugaacaugguugacaccaaaaaguccucucucaauaucagcggguacaacuuuucccugggagccgcugugaaagccggcgcuugcaugcuugaugggggaaauaugcuggagacaaucaaggugaccccucagacgauggacggcauucucaaaagcauccugaaggucaaaaagucucugggcauguucguguccgauacacccggggaaagaaacccuuaugagaacauucucuacaagaucugucugagcggagacggcuggccguauauugccucucggaccagcaucguugggcgcgcgugggaaaauacaaccguggaucuugaguccgacggaaaaccccagaaggucggcucugccgggagcaacaaaucccugcagagcgcuggauuuccuaccggccucacauacucucaacugaugacgcugaaggauuccaugaugcagcuugaccccagcgccaaaaccuggauugauaucgagggcagaccugaagaccccguggagaucgcucucuaccagccgaugucugggugcuauauucacuucuuucgggaaccuacagaccugaagcaguucaagcaagaugccaaauacucccauggaaucgacguugccgaucuguuucccgcucagccuggccucaccagcgcggugauugaggcccugcccagaaauaugguccuuacaugucagggguccgacgauaucaagcgccugcucgacucucagggacggagagauauuaaacugaucgacaucgcucugagcaaggccgauucccgccgguucgaaaacgccgugugggaccaaugcaaagaucuuugucacaugcauaccggcgucgugguugagaagaagaaaagagggggcaaggaggaaauuacgccccacugcgcucucauggacuguaucauguaugaugccgcggugucuggaggccugaauauuccuguccugcgcgcugugcucccgcgggacaugguuuuuagaacaagcucccccaaagugguccugugaggacuagucccuguucccagagcccacuuuuuuuucuuuuuuugaaauaaaauagccugucuuucagaucuaaaaaaaaaaaaaaaaaaaaaaaaaaaaaaaaaaaaaaaaaaaaaaaaaaaaaaaaaaaaaaaaaaaaaaaaaaaaaaaaaaaaaaaaaaaaaaaaaaaa

SEQ ID NO: 19748 - RNA, 2009 nt, Artificial Sequence
  mRNA product Design a-1 (A100) comprising derived and/or modified sequence from LASV(Lassa virus/H.sapiens-wt/NGA/2016/ISTH_0017;Clade II)__AVO03568__SP-HsALB_NP(2-569) (opt5)
aggagagucccgcagucggcguccagcggcucugcuuguucgugugugugucguugcaggccuuauucaagcuuaccaugaagugggugaccuucaucagccugcucuuucuguucuccucugccuacagcagcgccuccaaggaggugaaaucuuuccuguggacccagagccucagacgggaacuguccggcuacugcucuagcaucaaacuucaagucguuaaggacgcucaggcccugcuccacgggcuggauuuuuccgaggugucuaacgugcagcgccuuaugagaaagcagaaacgggacgauagcgaccugaagcgccucagagaucugaaucaagcggucaacaaucugguggaacucaaguccacacagcagaaaagcauucugcggguuggaacgcuuaccucugacgaucugcucacacuggcugccgaccuugagaagcugaaauccaaggugauccgcaccgaaagaccccucagcucuggcgucuauauggggaaccuguccacacagcaacuggagcagcggcgcgcccuccugaauaugauuggaauggcuggcggggcccagggaacccagccuggcagagauggcgugguucgggugugggacgucaaaaacccggaucuucugaauaaccaauucgggacaaugcccagccucacccuggcuugucuuacgaagcagggacagguggaccugaaugaugccgugcucgcgcugaccgaccugggccucaucuacacagccaaguauccuaacucuuccgaccuggaucgccuuagccaaucccaucccauucugaauauggucgacaccaaaaagucuagccucaacaucuccggguacaauuuuagccugggagcugccguuaaagcuggcgccugcaugcuugaugggggaaacaugcuggagacaaucaaggugaccccucagacgauggacggcauucucaaaucuauccugaaggugaaaagaucccugggcauguucgucagcgaugcgcccggggaacggaauccuuaugagaacauucucuacaagaucugucugucuggagacggcuggccguauauugccagccgcacauccaucguggggagagcuugggaaaacaccacaguugaucuugagucugacggaaagccccagaaagugggcgccaccgggagcaauaagucccugcagagcgcuggauuuccuaccggccucacauacucucaacugaugacgcugaaagauuccaugaugcagcuugaccccagcgccaagaccuggauugauaucgagggccggccugaagaccccgucgagguggcccucuaccagccgguuucugggugcuauauccacuucuuuagagaaccuacagaccugaaacaguucaagcaagaugcuaaguacucccauggaauugacguggcggaucuguuucccgcccagccuggccucaccagcgcugucaucgaggcccugccccgcaacauggugcuuacaugucagggguccgacgauauuaaaaagcugcucgacucucagggacggaaagauaucaagcugauugacaucgcccugagcaaagcugauuccagacgcuucgaaaaugccgucugggaccaaugcaaggaucuuugucacaugcauaccggcgugguuguggagaagaaaaagagagggggcaaagaggaaaucacgccccacugcgcgcucauggacuguauuauguaugaugcugccgucucuggaggccugaacaucccugugcugcgggccguucucccgcgcgacaugguguuucggacaagcucccccaaggucgugcugugaggacuagucccuguucccagagcccacuuuuuuuucuuuuuuugaaauaaaauagccugucuuucagaucuaaaaaaaaaaaaaaaaaaaaaaaaaaaaaaaaaaaaaaaaaaaaaaaaaaaaaaaaaaaaaaaaaaaaaaaaaaaaaaaaaaaaaaaaaaaaaaaaaaaa

SEQ ID NO: 19749 - RNA, 2009 nt, Artificial Sequence
  mRNA product Design a-1 (A100) comprising derived and/or modified sequence from LASV(Lassa virus/H.sapiens-wt/NGA/2018/ISTH_0959;Clade II)__AVV65100__SP-HsALB_NP(2-569) (opt5)
aggagagucccgcagucggcguccagcggcucugcuuguucgugugugugucguugcaggccuuauucaagcuuaccaugaagugggugaccuucaucagccugcucuuucuguucuccucugccuacagcagcgccuccaaggaggugaaaucuuuccuguggacccagagccucagacgggaacuguccggcuacugcucuaacaucaaacuucaagucguuaaggacgcucaggcccugcuccacgggcuggauuuuagcgagguguccaaugugcagcgccuuaugagaaagcagaaacgggacgauucugaccugaagcgccucagagaucugaaccaagcggucaauaaccugguggaacucaagagcacccagcagaaauccauucugcggguuggaacgcuuaccagcgacgaucugcucacacuggcugccgaccuugagaagcugaaaucuaaggugauccgcaccgaaagaccccucuccagcggcgucuauauggggaaucugucuacacagcaacuggagcagcggcgcgcccuccugaaccuuauuggaauggugggcggggcucagggaacccagccuggcagagauggcguugugcgggucugggacgugaaaaauccggaucugcucaacaaucaauucgggacaaugcccucccugacccuugccugucugacgaagcagggacagguggaccucaacgaugucguucuggcucugaccgaccucggccugaucuacacagccaaguauccuaauagcucugaccuugaucgccugucccaaagccaucccauucucaacaugguggacaccaaaaaguccucucugaauaucagcggguuuaacuucucccuuggagcggccgugaaagcuggcgccugcaugcuggaugggggaaauaugcucgagacaaucaaggucaccccucagacgauggacggcauucugaaaagcauccugaaggugaaaaagucucucggcauguuuguuuccgauacacccggggaaagaaacccuuacgagaacauucuguauaagaucugucuuagcggagacggcuggccguacauugcuucucggaccagcaucguggggcgcgccugggaaaauacaaccgucgaucuggaguccgacggaaaaccccacaaggugggcaccgcggggucuaacaaaagccuccaguccgccggauucccuacaggccugacguauagccagcugaugacccuuaaggauucuaugaugcaacucgaccccuccgcuaaaacauggauugauaucgagggcagaccugaagaccccguugagaucgcccuguaccagccgaugagcgggugcuacauucacuuuuuccgggaaccuaccgaccugaagcaguuuaagcaggaugcuaaauauucucauggaaucgacguggccgaucucuuccccgcccaaccuggccugacauccgcugucauugaggcgcuucccagaaauauggugcugaccugucaggggagcgacgauaucaagcgccuccuggacucccagggacggaaagauauuaagcugaucgacaucgcccuuucuaaaacggauagcagacgcuuugaaaacgcugucugggaccagugcaaggaucucugucauaugcacacaggcgugguuguggagaagaaaaagagagggggcaaagaggaaauuacaccccacugcgcccugauggacuguaucauguacgaugccgcugucuccggaggccugaauauuccugugcuccgggccguucugccgcgcgacaugguguuccggaccucuagccccaaggucgugcuuugaggacuagucccuguucccagagcccacuuuuuuuucuuuuuuugaaauaaaauagccugucuuucagaucuaaaaaaaaaaaaaaaaaaaaaaaaaaaaaaaaaaaaaaaaaaaaaaaaaaaaaaaaaaaaaaaaaaaaaaaaaaaaaaaaaaaaaaaaaaaaaaaaaaaa

SEQ ID NO: 19750 - RNA, 2009 nt, Artificial Sequence
  mRNA product Design a-1 (A100) comprising derived and/or modified sequence from LASV(LASV003-NIG-2008;Clade II)__AIT17581__SP-HsALB_NP(2-569) (opt5)
aggagagucccgcagucggcguccagcggcucugcuuguucgugugugugucguugcaggccuuauucaagcuuaccaugaagugggugaccuucaucagccugcucuuucuguucuccucugccuacagcagcgccuccaaggaggugaaaucuuuccuguggacccagagccucagacgggaacuguccggcuacugcucuagcaucaaacuucaagucguuaaggacgcucaggcccugcuccacgggcuggauuuuuccgaggugucuaacgugcagcgccuuaugagaaagcagaaacgggacgauagcgaccugaagcgccucagagaucugaaucaagcggucaacaaucugguggaacucaaguccacccagcagaaaagcguucugcgggugggaacgcuuaccucugacgaucugcucacacuggcugccgaccuugagaagcugaaauccaaggucauucgcaccgaaagaccccucagcucuggcguguauauggggaaccuguccgcccagcaacuggagcagcggcgcacacuccugaauaugaucggaaugguuggcggggcucagggaacccagccuggcagagauggcgugguccgggugugggacgugaaaaacccggaucuucugaauaaccaauucgggacaaugcccagccucacccuggccugucuuacgaagcagggacaggucgaccugaaugauguugugcucgcucugaccgaccugggccucauuuacacagccaaguauccuaacucuuccgaccuggaucgccuuagccaaucccaucccauccugucuaugguggacaccaaaaagagcucccucaauauuagcggguacaacuuuucucugggagcggccgucaaagcuggcgccugcaugcuugaugggggaaauaugcuggagacaaucaaggugaccccucagacgauggacggcauccucaaauccauucugaagguuaaaaagagccugggcauguucgugucugauacacccggggaaagaaacccuuaugagaauauccucuacaagauuugucugagcggagacggcuggccguauaucgcuucccggaccucuauugucgggcgcgccugggaaaacacaaccguggaucuugagagcgacggaaaaccccagaagguuggcaccgcgggguccaacaaaagccugcagucugccggauuuccuacaggccucacguacucccaacugaugacccugaaggauagcaugaugcagcuugaccccucugcuaaaacauggaucgauauugagggcagaccugaagaccccguggagaucgcccucuaccagccgauguccgggugcuauauccacuucuuucgggaaccuaccgaccugaagcaguucaagcaagaugcuaaauacagccauggaauugacgucacagaucuguuucccgcccagccuggccucaccuccgccgugaucgaggcucugcccagaaauaugguccuuacgugucaggggucugacgauauuaagcgccugcucgacagccagggacggagagauaucaaacugauugacaucgcgcuguccaaggccgauucucgccgguucgaaaacgcugugugggaccaaugcaaagaucuuugucacaugcauacaggcguuguggucgagaagaagaaaagagggggcaaggaggaaaucacaccccacugcgcccucauggacuguauuauguaugaugccgcugugagcggaggccugaauaucccuguucugcgcgccgugcucccgcgggacauggucuuuagaaccuccagccccaaaguggugcugugaggacuagucccuguucccagagcccacuuuuuuuucuuuuuuugaaauaaaauagccugucuuucagaucuaaaaaaaaaaaaaaaaaaaaaaaaaaaaaaaaaaaaaaaaaaaaaaaaaaaaaaaaaaaaaaaaaaaaaaaaaaaaaaaaaaaaaaaaaaaaaaaaaaaa

SEQ ID NO: 19751 - RNA, 2009 nt, Artificial Sequence
  mRNA product Design a-1 (A100) comprising derived and/or modified sequence from LASV(LASV035-NIG-2009;Clade II)__AIT17589__SP-HsALB_NP(2-569) (opt5)
aggagagucccgcagucggcguccagcggcucugcuuguucgugugugugucguugcaggccuuauucaagcuuaccaugaagugggugaccuucaucagccugcucuuucuguucuccucugccuacagcagcgccuccaaggaggugaaaucuuuccuguggacccagagccucagacgggaacuguccggcuacugcucuagcaucaaacuucaagucguuaaagacgcucaggcccugcuccacgggcuggauuuuuccgaggugucuaacgugcagcgccuuaugagaaagcagaaacgggacgauagcgaccugaagcgccucagagaucugaaucaagcggucaacaaucugguggaacucaaguccacacagcagaaaagcauucugcggguuggaacgcuuaccucugacgaucugcucacacuggcugccgaccuugagaagcugaaauccaaggugauccgcaccgaaagaccccucagcucuggcgucuauauggggaaccuguccgcccagcaacuggagcagcggcgcgcucuccugaauaugauuggaauggugggcggggcccagggaacacagccuggcagagauggcguugugcgggucugggacgugaaaaacccggaucuucugaauaaccaauucgggaccaugcccagccucacacuggcuugucuuaccaagcagggacagguggaccugaaugaugccguccucgcgcugacggaccugggccucaucuacaccgccaaguauccuaacucuuccgaccuggaucgccuuagccaaucccaucccauucugaauaugguugacacaaagaagucuagccucaacaucuccggguacaauuuuagccugggagcugccgugaaagcuggcgccugcaugcuugaugggggaaacaugcuggagaccaucaaggugacaccucagaccauggacggcauucucaaaucuauccugaaggucaaaagaucccugggcauguucgugagcgauacgcccggggaacggaauccuuaugagaacauucucuacaagaucugucugucuggagacggcuggccguauauugcgagccgcacauccaucguugggagagccugggaaaacaccacaguggaucuugagucugacggaaagccccagaaagucggcaccaccgggagcaauaagucccugcagagcgcuggauuuccuacaggccucacguacucucaacugaugacccugaaagauuccaugaugcagcuugaccccagcgccaagacauggauugauaucgagggccggccugaagaccccguggagaucgcucucuaccagccgaugucugggugcuauauucacuucuuuagagaaccuaccgaccugaaacaguucaagcaagaugccaaguacucccauggaaucgacguugccgaucuguuucccgcucagccuggccucacaagcgcggugauugaggcccugccccgcaacaugguccuuaccugucagggguccgacgauaucaaaaagcugcucgacucucagggacggagagauauuaaacugaucgacaucgcucugagcaaggccgauucccgcaaauucgaaaaugccgugugggaccaaugcaaggaucuuugucacaugcauacgggcgucgugguugagaagaaaaagagagggggcaaagaggaaauuacaccccacugcgcucucauggacuguaucauguaugaugccgcggugucuggaggccugaacauuccuguccugcgggcugugcucccgcgcgacaugguuuuucggaccagcucccccaaggugguccugugaggacuagucccuguucccagagcccacuuuuuuuucuuuuuuugaaauaaaauagccugucuuucagaucuaaaaaaaaaaaaaaaaaaaaaaaaaaaaaaaaaaaaaaaaaaaaaaaaaaaaaaaaaaaaaaaaaaaaaaaaaaaaaaaaaaaaaaaaaaaaaaaaaaaa

SEQ ID NO: 19752 - RNA, 2009 nt, Artificial Sequence
  mRNA product Design a-1 (A100) comprising derived and/or modified sequence from LASV(LASV1000-NIG-2009;Clade II)__AIT17783__SP-HsALB_NP(2-569) (opt5)
aggagagucccgcagucggcguccagcggcucugcuuguucgugugugugucguugcaggccuuauucaagcuuaccaugaagugggugaccuucaucagccugcucuuucuguucuccucugccuacagcagcgccuccaaggaggugaaaucuuuccuguggacccagagccucagacgggaacuguccggcuacugcucuaacaucaaacuucaagucguuaaggacgcucaggcccugcuccacgggcuggauuuuagcgagguguccaaugugcagcgccuuaugagaaagcagaaacgggacgauucugaccugaagcgccucagagaucugaaccaagcggucaauaaccugguggaacucaagagcacacagcagaaauccauucugcggguuggaacgcuuaccagcgacgaucugcucacacuggcugccgaccuugagaagcugaaaucuaaggugauccgcaccgaaagaccccucuccagcggcgucuauauggggaaucugucuacacagcaacuggagcagcggcgcgcccuccugaacaugauuggaauggugggcggggcucagggaacccagccuggcagagauggcguugugcgggucugggacgugaaaaauccggaucuucugaacaaucaauucgggacaaugcccucccucacccuggccugucuuacgaagcagggacagguggaccugaacgaugucguucucgcucugaccgaccugggccucaucuacacagccaaguauccuaauagcucugaccuggaucgccuuucccaaagccaucccauucugaacaugguggacaccaaaaaguccucucucaauaucagcggguacaacuuuucccugggagcggccgugaaagcuggcgccugcaugcuugaugggggaaauaugcuggagacaaucaaggucaccccucagacgauggacggcauucucaaaagcauccugaaggugaaaaagucucugggcauguucguuuccgauacacccggggaaagaaacccuuaugagaacauucucuacaagaucugucugagcggagacggcuggccguauauugcuucucggaccagcaucguggggcgcgccugggaaaauacaaccgucgaucuugaguccgacggaaaaccccagaaggugggcaccgcggggucuaacaaaagccugcaguccgccggauuuccuacaggccucacguacagccaacugaugacccugaaggauucuaugaugcagcuugaccccuccgcuaaaacauggauugauaucgagggcagaccugaagaccccguugagaucgcccucuaccagccggugagcgggugcuauauucacuucuuucgggaaccuaccgaccugaagcaguucaagcaagaugcuaaauacucucauggaaucgacgucgccgaucuguuucccgcccagccuggccucacauccgcugugauugaggcgcugcccagaaauaugguccuuaccugucaggggagcgacgauaucaagcgccugcucgacucccagggacggagagauauuaaacugaucgacaucgcccugucuaaggcugauagccgccgguucgaaaacgccgugugggaccaaugcaaagaucuuugucacaugcauacgggcguuguggucgagaagaagaaaagagggggcaaggaggaaauuacaccccacugcgcccucauggacuguaucauguaugaugcugccguguccggaggccugaauauuccuguucugcgcgcggugcucccgcgggacauggucuuuagaaccucuagccccaaaguggugcugugaggacuagucccuguucccagagcccacuuuuuuuucuuuuuuugaaauaaaauagccugucuuucagaucuaaaaaaaaaaaaaaaaaaaaaaaaaaaaaaaaaaaaaaaaaaaaaaaaaaaaaaaaaaaaaaaaaaaaaaaaaaaaaaaaaaaaaaaaaaaaaaaaaaaa

SEQ ID NO: 19753 - RNA, 2009 nt, Artificial Sequence
  mRNA product Design a-1 (A100) comprising derived and/or modified sequence from LASV(LASV221-NIG-2010;Clade II)__AIT17625__SP-HsALB_NP(2-569) (opt5)
aggagagucccgcagucggcguccagcggcucugcuuguucgugugugugucguugcaggccuuauucaagcuuaccaugaagugggugaccuucaucagccugcucuuucuguucuccucugccuacagcagcgccuccaaggaggugaaaucuuuccuguggacccagagccucagacgggaacuguccggcuacugcucuagcaucaaacuucaagucguuaaggacgcucaggcccugcuccacgggcuggauuuuuccgaggugucuaacgugcagcgccuuaugagaaagcagcggcgcgacgauagcgaccugaaaagacuccgggaucugaaucaagcggucaacaaucugguggaacucaaguccacacagcaaaagagcauucugcgcguuggaacgcuuaccucugacgaucugcucacacuggcugccgaccuugagaaacugaaguccaaagugaucagaaccgaacggccccucagcucuggcgucuauauggggaaccuguccacacagcagcuggagcagcgcagagcccuccugaauaugauuggaauggugggcggggcucagggaacccagccuggccgggauggcguugugcgcgucugggacgugaagaacccggaucuucugaauaaccaauucgggacaaugcccagccucacccuggccugucuuacgaaacagggacagguggaccugaaugaugcuguccucgcccugaccgaccugggccucaucuacacagcgaaguauccuaacucuuccgaccuggauagacuuagccaaucccaucccauucugaauaugguugacaccaagaaaucuagccucaacaucuccggguacaauuuuagccugggagccgcugugaaggccggcgcuugcaugcuugaugggggaaacaugcuggagacaaucaaagugaccccucagacggucgacggcauucucaagucuauccugaaagugaagcggucccugggcauguucguuagcgauacacccggggaacgcaauccuuaugagaacauucucuacaaaaucugucugucuggagacggcuggccguauauugccagcagaaccuccaucguggggcgggcgugggaaaacacaaccgucgaucuugagucugacggaaagccccagaaggugggcaccgccgggagcaauaaaucccugcagagcgcuggauuuccuacaggccucacguacucucaacugaugacccugaaggauuccaugaugcagcuugaccccagcgccaaaacauggauugauaucgagggcagaccugaagaccccguugagaucgcucucuaccagccgaugucugggugcuauauucacuucuuucgcgaaccuaccgaccugaagcaguucaaacaagaugccaaguacucccauggaaucgacguggccgaucuguuucccgcucagccuggccucacaagcgcggucauugaggcccugccccggaacauggugcuuaccugucagggguccgacgauaucaagagacugcucgacucucagggacgccgggauauuaaacugaucgacaucgcucugagcaaggccgauuccagaaaauucgaaaaugccgucugggaccaaugcaaggaucuuugucacaugcauacgggcgugguuguggagaaaaagaagcgcgggggcaaagaggaaauuacaccccacugcgcucucauggacuguaucauguaugaugccgcggucucuggaggccugaacauuccugugcugcgggcuguucucccgagagacaugguguuucgcaccagcucccccaaggucgugcugugaggacuagucccuguucccagagcccacuuuuuuuucuuuuuuugaaauaaaauagccugucuuucagaucuaaaaaaaaaaaaaaaaaaaaaaaaaaaaaaaaaaaaaaaaaaaaaaaaaaaaaaaaaaaaaaaaaaaaaaaaaaaaaaaaaaaaaaaaaaaaaaaaaaaa

SEQ ID NO: 19754 - RNA, 2009 nt, Artificial Sequence
  mRNA product Design a-1 (A100) comprising derived and/or modified sequence from LASV(LASV237-NIG-2010;Clade II)__AIT17639__SP-HsALB_NP(2-569) (opt5)
aggagagucccgcagucggcguccagcggcucugcuuguucgugugugugucguugcaggccuuauucaagcuuaccaugaagugggugaccuucaucagccugcucuuucuguucuccucugccuacagcagcgccuccaaggaggugaaaucuuuccuguggacccagagccucagacgggaacuguccggcuacugcucuaacaucaaacuucaagucguuaaggacgcucaggcccugcuccacgggcuggauuuuagcgagguguccaaugugcagcgccuuaugagaaagcagaaacgggacgauucugaccugaagcgccucagagaucugaaccaagcggucaauaaccugguggaacucaagagcacacagcagaaauccauucugcggguuggaacgcuuaccagcgacgaucugcucacacuggcugccgaccuugagaagcugaaaucuaaggugauccgcaccgaaagaccccucuccagcggcgucuauauggggaaucugucuacacagcaacuggagcagcggcgcgcccuccugaacaugauuggaauggugggcggggcucagggaacccagccuggcagagauggcguugugcgggucugggacgugaaaaauccggaucuucugaacaaucaauucgggacaaugcccucccucacccuggccugucuuacgaagcagggacagguggaccugaacgaugcuguccucgcccugaccgaccugggccucaucuacacagcgaaguauccuaauagcucugaccuggaucgccuuucccaaagccaucccauucugaacaugguugacaucaaaaaguccucucucaauaucagcggguacaacuuuucccugggagccgcugugaaagccggcgcuugcaugcuugaugggggaaauaugcuggagaccauuaaggugacaccucagaccauggacggcauccucaaaagcauucugaaggucaaaagaucucugggcauguucguguccgauacgcccggggaacggaacccuuaugagaacauccucuacaagauuugucugagcggagacggcuggccguauaucgccucucgcacaagcauuguugggagagcgugggaaaauaccacaguggaucuugaguccgacggaaagccccagaaagucggcucugccgggagcaacaagucccugcagagcgcuggauuuccuaccggccucaccuacucucaacugaugacacugaaagauuccaugaugcagcuugaccccagcgccaagacguggaucgauaucgagggccggccugaagaccccguggagauugcucucuaccagccgaugucugggugcuauauccacuucuuuagagaaccuaccgaccugaaacaguucaagcaagaugccaaguacucccauggaauugacguugccgaucuguuucccgcucagccuggccucacaagcgcggugaucgaggcccugccccgcaauaugguccuuaccugucagggguccgacgauauuaaacggcugcucgacucucagggaagacgcgauaucaagcugaucgacauugcucugagcaaagccgauucccggagauucgaaaacgccgugugggaccaaugcaaggaucuuugucacaugcauacaggcgucgugguugagaaaaagaagcgcgggggcaaagaggaaaucacgccccacugcgcucucauggacuguauuauguaugaugccgcggugucuggaggccugaauaucccuguccugcgggcugugcucccgagagacaugguuuuucgcaccagcucccccaaggugguccugugaggacuagucccuguucccagagcccacuuuuuuuucuuuuuuugaaauaaaauagccugucuuucagaucuaaaaaaaaaaaaaaaaaaaaaaaaaaaaaaaaaaaaaaaaaaaaaaaaaaaaaaaaaaaaaaaaaaaaaaaaaaaaaaaaaaaaaaaaaaaaaaaaaaaa

SEQ ID NO: 19755 - RNA, 2009 nt, Artificial Sequence
  mRNA product Design a-1 (A100) comprising derived and/or modified sequence from LASV(LASV253-NIG-2011;Clade II)__AIT17671__SP-HsALB_NP(2-569) (opt5)
aggagagucccgcagucggcguccagcggcucugcuuguucgugugugugucguugcaggccuuauucaagcuuaccaugaagugggugaccuucaucagccugcucuuucuguucuccucugccuacagcagcgccuccaaggaggugaaaucuuuccuguggacccagagccucagacgggaacuguccggcuacugcucuagcaucaaacuucaagucguuaaggacgcucaggcccugcuccacgggcuggauuuuuccgaggugucuaacgugcagcgccuuaugagaaagcagaaacgggacgauagcgaccugaagcgccucagagaucugaaucaagcggucaacaaucugguggaacucaaguccacccagcagaaaagcguucugcgggugggaacgcuuaccucugacgaucugcucacacuggcugccgaccuugagaagcugaaauccaaggucauucgcaccgaaagaccccucagcucuggcguguauauggggaaccuguccacacagcaacuggagcagcggcgcgcccuccugaauaugaucggaaugguuggcggggcucagggaacccagccuggcagagauggcgugguccgggugugggacgugaaaaacccggaucuucugaauaaccaauucgggacaaugcccagccucacccuggccugucuuacgaagcagggacaggucgaccugaaugauguugugcucgcucugaccgaccugggccucauuuacacagccaaguauccuaacucuuccgaccuggaucgccuuagccaaucccaucccauccugaauaugguggacaccaaaaagucuagccucaacauuuccggguacaauuuuagccugggagcggccgucaaagcuggcgccugcaugcuugaugggggaaacaugcuggagacaaucaaggugaccccucagacgauggacggcauccucaaaucuauucugaagguuaaaaagucccugggcauguucgugagcgauacacccggggaaagaaauccuuaugagaacauccucuacaagauuugucugucuggagacggcuggccguauaucgcuagccggaccuccauugucgggcgcgccugggaaaacacaaccguggaucuugagucugacggaaaaccccagaagguuggcaccgcggggagcaauaaaucccugcagagcgccggauuuccuacaggccucacguacucucaacugaugacccugaaggauuccaugaugcagcuugaccccagcgcuaaaacauggaucgauauugagggcagaccugaagaccccguggagaucgcccucuaccagccgaugucugggugcuauauccacuucuuucgggaaccuaccgaccugaagcaguucaagcaagaugcuaaauacucccauggaauugacgucacagaucuguuucccgcccagccuggccucaccagcgccgugaucgaggcucugcccagaaacaugguccuuacgugucagggguccgacgauauuaagcgccugcucgacucucagggacggagagauaucaaacugauugacaucgcgcugagcaaggccgauucccgccgguucgaaaaugcugugugggaccaaugcaaagaucuuugucacaugcauacaggcguuguggucgagaagaagaaaagagggggcaaggaggaaaucacaccccacugcgcccucauggacuguauuauguaugaugccgcugugucuggaggccugaacaucccuguucugcgcgccgugcucccgcgggacauggucuuuagaaccagcucccccaaaguggugcugugaggacuagucccuguucccagagcccacuuuuuuuucuuuuuuugaaauaaaauagccugucuuucagaucuaaaaaaaaaaaaaaaaaaaaaaaaaaaaaaaaaaaaaaaaaaaaaaaaaaaaaaaaaaaaaaaaaaaaaaaaaaaaaaaaaaaaaaaaaaaaaaaaaaaa

SEQ ID NO: 19756 - RNA, 2009 nt, Artificial Sequence
  mRNA product Design a-1 (A100) comprising derived and/or modified sequence from LASV(LASV254-NIG-2011;Clade II)__AIT17675__SP-HsALB_NP(2-569) (opt5)
aggagagucccgcagucggcguccagcggcucugcuuguucgugugugugucguugcaggccuuauucaagcuuaccaugaagugggugaccuucaucagccugcucuuucuguucuccucugccuacagcagcgccuccaaggaggugaaaucuuuccuguggacccagagccucagacgggaacuguccggcuacugcucuagcaucaaacuucaagucguuaaggacgcucaggcccugcuccacgggcuggauuuuuccgaggugucuaacgugcagcgccuuaugagaaagcagaaacgggacgauagcgaccugaagcgccucagagaucugaaucaagcggucaacaaucugguggaacucaaguccacacagcagaaaagcguucugcgggugggaacgcuuaccucugacgaucugcucacacuggcugccgaccuugagaagcugaaauccaaggucauucgcaccgaaagaccccucagcucuggcguguauauggggaaccuguccacacagcaacuggagcagcggcgcgcccuccugaauaugaucggaaugguuggcggggcucagggaacccagccuggcagagauggcgugguccgggugugggacgugaaaaacccggaucuucugaauaaccaauucgggacaaugcccagccucacccuggccugucuuacgaagcagggacaggucgaccugaaugaugcuguucucgcccugaccgaccugggccucauuuacacagcgaaguauccuaacucuuccgaccuggaucgccuuagccaaucccaucccauccugaauaugguggacaccaaaaagucuagccucaacauuuccggguacaauuuuagccugggagccgcugugaaagccggcgcuugcaugcuugaugggggaaacaugcuggagacaaucaaggucaccccucagacgauggacggcauccucaaaucuauucugaaggugaaaaagucccugggcauguucguuagcgauacacccggggaaagaaauccuuaugagaacauccucuacaagauuugucugucuggagacggcuggccguauaucgccagccggaccuccauuguggggcgcgcgugggaaaacacaaucgucgaucuugagucugacggaaaaccccagaaggugggcaccgccgggagcaauaaaucccugcagagcgcuggauuuccuaccggccucacauacucucaacugaugacgcugaaggauuccaugaugcagcuugaccccagcgccaaaaccuggauugauaucgagggcagaccugaagaccccguugagaucgcucucuaccagccgaugucugggugcuauauucacuucuuucgggaaccuacagaccugaagcaguucaagcaagaugccaaauacucccauggaaucgacguggccgaucuguuucccgcucagccuggccucaccagcgcggucauugaggcccugcccagaaacauggugcuuacaugucagggguccgacgauaucaagcgccugcucgacucucagggacggagagauauuaaacugaucgacaucgcucugagcaaggccgauucccgccgguucgaaaaugccgucugggaccaaugcaaagaucuuugucacaugcauaccggcgugguuguggagaagaagaaaagagggggcaaggaggaaauuacgccccacugcgcucucauggacuguaucauguaugaugccgcggucucuggaggccugaacauuccugugcugcgcgcuguucucccgcgggacaugguguuuagaacaagcucccccaaagucgugcugugaggacuagucccuguucccagagcccacuuuuuuuucuuuuuuugaaauaaaauagccugucuuucagaucuaaaaaaaaaaaaaaaaaaaaaaaaaaaaaaaaaaaaaaaaaaaaaaaaaaaaaaaaaaaaaaaaaaaaaaaaaaaaaaaaaaaaaaaaaaaaaaaaaaaa

SEQ ID NO: 19757 - RNA, 2009 nt, Artificial Sequence
  mRNA product Design a-1 (A100) comprising derived and/or modified sequence from LASV(Nig08-04;Clade II)__ADU56611__SP-HsALB_NP(2-569) (opt5)
aggagagucccgcagucggcguccagcggcucugcuuguucgugugugugucguugcaggccuuauucaagcuuaccaugaagugggugaccuucaucagccugcucuuucuguucuccucugccuacagcagcgccuccaaggaggugaaaucuuuccuguggacccagagccucagacgggaacuguccggcuacugcucuaacaucaaacuucaagucguuaaggacgcucaggcccugcuccacgggcuggauuuuagcgagguguccaaugugcagcgccuuaugagaaagcagaaacgggacgauggagaccugaagcgccucagagaucugaaccaagcggucaauaaccugguggaacucaagucuacccagcagaaaagcguucugcgggugggcacgcuuaccuccgacgaucugcucacacuggcugccgaccuugagaagcugaaaagcaaggucauucgcaccgaaagaccccucucuuccgggguguauaugggaaaucugagcacacagcaacuggagcagcggaaagcccuccugucuaugaucggcaugguugggggagcucagggcacccagccuggccgcgaugggguggucagagugugggacgugaagaacccggaucuucugaauaaccaauucggaacaaugcccucccucacccuggccugucuuacgaagcagggccaggucgaccugaaugaugcuguucucgcccugaccgaccuggggcucauuuacacagcgaaauauccuaacagcucugaccuggaucggcuuucccaaagccaucccauccugaauaugguggacaccaagaaauccucucucaacauuagcggauacaauuuuucccugggcgccgcugugaaggccggggcuugcaugcuugauggaggcaacaugcuggagacaaucaaagucaccccucagacgauggacggcauccucaagagcauucugaaagugaagcgcucucuggggauguucguuuccgauacacccggagaaagaaauccuuaugagaacauccucuacaagauuugucugagcggcgacggguggccguauaucgccucucggaccagcauugugggacgcgcgugggaaaacacaaccgucgaucuugaguccgacggcaaaccccagaagguggggaccgccggaucuaauaaaagccugcaguccgcuggcuuuccuacaggccucacguacagccaacugaugacccugaaggauucuaugaugcagcuugaccccuccgccaaaacauggaucgauauugaggggagaccugaagaccccguugagaucgcucucuaccagccgaugagcggaugcuauauccacuucuuucgggaaccuaccgaccugaagcaguucaagcaagaugccaaauacucucauggcauugacgugacagaucuguuuuccgcccagcccgggcucaccagcgcugucaucgaggcgcugccuagaaacauggugcuuacgugucagggauccgacgauauuaagaaacugcucgacucucagggccgccgggauaucaagcugauugacaucagccugaauaaagccgauuccagacgcuucgaaaacgcugucugggaccaaugcaaggaucuuugucacaugcauacaggggugguuguggagaagaaaaagcggggcggaaaagaggaaaucacaccccacugcgcccucauggacuguauuauguuugaugccgcugucucuggcgggcugaauauccccauucugagagccgugcucccucgcgacaugguuuuccggaccagcuccccgaaggugguccugugaggacuagucccuguucccagagcccacuuuuuuuucuuuuuuugaaauaaaauagccugucuuucagaucuaaaaaaaaaaaaaaaaaaaaaaaaaaaaaaaaaaaaaaaaaaaaaaaaaaaaaaaaaaaaaaaaaaaaaaaaaaaaaaaaaaaaaaaaaaaaaaaaaaaa

SEQ ID NO: 19758 - RNA, 2012 nt, Artificial Sequence
  mRNA product Design a-1 (A100) comprising derived and/or modified sequence from LASV(GA391;Clade III)__AAA46284__SP-HsALB_NP(2-570) (opt5)
aggagagucccgcagucggcguccagcggcucugcuuguucgugugugugucguugcaggccuuauucaagcuuaccaugaagugggugaccuucaucagccugcucuuucuguucuccucugccuacagcagcgccuccaaggaggugagaucuugccuguggacccagagccuccggcgcgaacuguccggcuacuguucuaacaucaaacuucaagucguuaaggacgcucaggcccugcuccacgggcuggauuucagcgagguguccaaugugcagagacuuaugcggaaacagaagcgcgacgauggagaccugaaaagacuccgggaucugaaccaagcggucaauaaccugguggaacucaagucuacacagcagaaaagcguucugcgcgugggcacgcuuuccagcgacgaucugcucauucuggcugccgaccuugagaaacugaagucuaaagucaccagaacagaacggccccucuccagcgggguguauaugggaaaucugucuucccagcaacuggaucagcgcagagcccuccugaacaugaucggcaugaccgggguuagcggaggcggcaagggggcuucuaauggaauugugcgggucugggacgugaaaaacgccgagcuucugaauaaccaguuuggcacaaugccuucccucacccuggcuugccuuacaaagcaggggcaaguggaucugaaugacgccguccaggcgcucaccgaucugggacugaucuacacggccaaguauccgaacagcuccgaccucgaccgccugucucagagccaucccauucuuaauaugaucgauaccaaaaaguccagccugaacaucucuggcuacaauuucucccucggggcugccguuaaagcuggagccuguaugcuggacggcggcaacaugcuugagacaauuaaggugagcccucaaaccauggaugggauccugaaaucuauucucaaggugaaaaagagccugggaauguuugucuccgacacacccggcgaaagaaacccuuaugagaauauccuguacaagauuugccucucuggggauggauggagcuauaucgcgucccggaccagcauugugggccgcgccugggaaaacacgguuguggaccuggagcaggauaauaaaccccagaagaucgggaacggaggcucuaauaaaucccuucagagcgcuggcuucgccgcugggcugaucuacucucaacucaugacacugaaggacuuuaaauguuucaaccugauuccuaaugccaagaccuggauggauaucgagggaagaccggaagaccccgucgagauugcccuuuaccagccuuccagcggcugcuaugugcacuuuuuccgggaacccacagaucucaagcaguuuaaacaggacgcuaaguacucccaugggagagacguuaccgaucuguucgcggcccaaccuggacugaccucugcugugaucgaggcccucccccgcaacauggucauuacaugucagggcagcgaagacauccggaaacugcuugagucccaggggagacgcgauaucaagcugauugacaucacgcucucuaaagccgauagccggaaguuugagaaugcugugugggaccaguucaaggaucugugccacaugcauaccggcgucgugguugaaaagaagaaaagaggaggcaaggaggaaauuacaccgcacugugcccugauggacugcaucauguuugaugcggcuguguccgggggacuugacgccaaaguccuccgcgugguucugccucgggauaugguguucagaaccagcacacccaaggucgugcugugaggacuagucccuguucccagagcccacuuuuuuuucuuuuuuugaaauaaaauagccugucuuucagaucuaaaaaaaaaaaaaaaaaaaaaaaaaaaaaaaaaaaaaaaaaaaaaaaaaaaaaaaaaaaaaaaaaaaaaaaaaaaaaaaaaaaaaaaaaaaaaaaaaaaa

SEQ ID NO: 19759 - RNA, 2009 nt, Artificial Sequence
  mRNA product Design a-1 (A100) comprising derived and/or modified sequence from LASV(Nig08-A19;Clade III)__ADU56619__SP-HsALB_NP(2-569) (opt5)
aggagagucccgcagucggcguccagcggcucugcuuguucgugugugugucguugcaggccuuauucaagcuuaccaugaagugggugaccuucaucagccugcucuuucuguucuccucugccuacagcagcgccuccaaggaggugaaaucuuuccuguggacccagagccucagacgggaacuguccggcuacugcucuaacaucaaacuucaagucguuaaggacgcucaggcccugcuccacgggcuggauuuuagcgagguguccaaugugcagcgccuuaugagaaagcagaaacgggacgauggagaccugaagcgccucagagaucugaaccaagcggucaauaaccugguggaacucaagucuacacagcagaaaagcguucugcgggugggcacgcuuuccagcgacgaucugcucguccuggcugccgaccuugagaagcugaaaucuaaggugguucgcaccgaaagaccccucuccagcgggauuuauaugggaaaucugucuucccagcaacuggaucagcggaaagcccuccugaacaugaucggcaugacagggggaaauggcggccgcaacaccacaagcgacgggauugugagagucugggaugugaagaaugcugagcuucugaacaaucaguucggaaccaugccuucucucacacuggccugucuuaccaagcagggccaaguggaccugaacgaugcuguccaggcccucacggaccuggggcugaucuacaccgcgaaauaucccaauuccagcgaccucgaucggcuggcccagucccauccgauucuuaacaugaucgacacaaagaaaucuagccugaauaucuccggauacaacuuuagccucggcgcugccguuaaggcuggggccugcaugcuggauggaggcaacaugcuugagaccauuaaagugucuccucaaacaauggacggcauccugaaguccauucucaaagugaagcgcagccuggggauguucaucucugauacccccggagaaagaaauccuuaugagaacauucuguacaagaucugucucagcggcgacggguggcccuauauugcgucccggacgucuaucgucggacgcgccugggaaaauacagugguugaucuggagagcgacaacaaaccucagaagaccggcaaugggggauccaacaaaagccuucagucugcuggcuuugccgcuggccugacauacucccagcucaugacccugaaggauagcaugcugcaacuugacccgaaugccaaaaccuggauggauaucgaggggagacccgaagacccuguggagauugcccucuaccagcccucuuccggaugcuauauccacuucuuucgggaaccuacagaccugaagcaguucaagcaggaugcuaaauacagccauggcauugacgucacggaucuguuugcggcccaacccgggcucaccuccgcugugaucgaggcccugccgagaaacaugguuauuacaugucagggaucugaagacauccgcaaacuucuggagagccagggccggagagauaucaagcucauugacaucucccugucuaagguggauagccgcaaauucgagaaugccgucugggaccaguuuaaggaucugugccacaugcauaccgggauuguggucgaaaagaaaaagcggggcggaaaagaggaaaucacaccucacugugcucuuauggacugcauuauguucgaugccgcgguguccggcgggguugacgcuaaggugcucagagccguccugccccgcgauaugguguuucggaccagcacgccuaaaguugugcugugaggacuagucccuguucccagagcccacuuuuuuuucuuuuuuugaaauaaaauagccugucuuucagaucuaaaaaaaaaaaaaaaaaaaaaaaaaaaaaaaaaaaaaaaaaaaaaaaaaaaaaaaaaaaaaaaaaaaaaaaaaaaaaaaaaaaaaaaaaaaaaaaaaaaa

SEQ ID NO: 19760 - RNA, 2009 nt, Artificial Sequence
  mRNA product Design a-1 (A100) comprising derived and/or modified sequence from LASV(G1180-SLE-2010;Clade IV)__AIT17169__SP-HsALB_NP(2-569) (opt5)
aggagagucccgcagucggcguccagcggcucugcuuguucgugugugugucguugcaggccuuauucaagcuuaccaugaagugggugaccuucaucagccugcucuuucuguucuccucugccuacagcagcgccuccaaggagaucaaaucuuuccuguggacccagagccucagacgggaacuguccggcuacugcucuaacauuaagcugcaaguggucaaagacgcucaggcccugcuccacgggcuggauuuuagcgagguuuccaaugugcagcgccuuaugagaaaggaacggcgcgacgauaacgaccugaaaagacuccgggaucugaaucaggcggugaacaaucuggucgagcucaagucuacacaacaaaagagcauccugcgcgugggaacgcuuaccuccgacgaucugcucauucuggcugccgaccuugaaaaacuuaagagcaaaguuaucagaacagagcggccccucucugccggcguguauauggggaaccuguccagccagcagcuggaucagcgcagagcucuccugucuaugauuggaauguccagcggcaaucagcgggcccaggcugggcgcgacggagucgugagaguuugggaugugaagaacgucgagcuucugaauaaccaguucggcaccaugccuucucucacacuggccugucuuaccaaacaaggccagguggaccugaaugaugcggugcaggcccucacagaccuggggcugaucuacaccgcuaaguauccgaacacguccgaccucgaucggcugacccaaagccaucccauccuuaauaugauugacacaaagaaauccucucugaacaucagcggauacaauuuuucccucggcgccgcugucaaggccggggcgugcaugcuggauggaggcaacaugcuugaaaccauuaaaguuagcccucagacaauggacgggauccugaagucuauucucaaagugaagaaagcccugggaauguucaucuccgauacccccggcgagcgcaacccuuaugaaaauauucuguacaagaucugucucagcggcgacggguggcccuauaucgcuucuagaacgagcauuacaggacgggccugggagaacaccguggucgaucuggaguccgacggcaagccucagaaagcugggucuaauaacagcaauaagucccuucagagcgugggauuuacagccggccugaccuacucucaacucaugacccugaaagaugccaugcugcagcuugacccgaacgcuaagacauggauggauaucgaagggagacccgaggacccuguugaaauugcgcucuaccagcccuccagcggaugcuauauccacuucuuucgcgagccuacggaccugaaacaguucaagcaagaugccaaguacucucauggcauugacgugaccgaucuguuugcugcccagcccggccucacauccgccgucaucgacgcucugccgcggaauauggugaucaccugucaggggagcgaugacauuagaaaacuucuggaaucccagggacgcaaggauaucaaacucauugacaucgcccugucuaagacagauagccggaaauaugagaacgcgguuugggaccaauacaaggaucugugccacaugcauaccggcguggucguggagaagaaaaagagagggggaaaagaagagauuacgccucacugugcucuuauggacugcaucauguucgaugccgccgucuccggcgggcucaauacaucugugcugcgcgcuguucugccccgggacaugguguuuagaaccagcaccccucgcgucgugcucugaggacuagucccuguucccagagcccacuuuuuuuucuuuuuuugaaauaaaauagccugucuuucagaucuaaaaaaaaaaaaaaaaaaaaaaaaaaaaaaaaaaaaaaaaaaaaaaaaaaaaaaaaaaaaaaaaaaaaaaaaaaaaaaaaaaaaaaaaaaaaaaaaaaaa

SEQ ID NO: 19761 - RNA, 2009 nt, Artificial Sequence
  mRNA product Design a-1 (A100) comprising derived and/or modified sequence from LASV(G1442-SLE-2011;Clade IV)__AIT17181__SP-HsALB_NP(2-569) (opt5)
aggagagucccgcagucggcguccagcggcucugcuuguucgugugugugucguugcaggccuuauucaagcuuaccaugaagugggugaccuucaucagccugcucuuucuguucuccucugccuacagcagcgccuccaaggaggugaaaucuuuccuguggacccagagccucagacgggaacuguccggcuacugcucuaacaucaaacuucaagucguuaaggacgcucaggcccugcuccacgggcuggauuuuagcgagguguccaaugugcagcgccuuaugagaaagcagcggcgcgacgauaacgaccugaaaagacuccgggaucugaaucaagcggucaacaaucugguggaacucaagucuacacagcaaaagagcguucugcgcgugggaacgcuuaccuccgacgaucugcucguccuggcugccgaccuugagaaacuuaagagcaaagugauuagaacagaacggccccucucugccggcguuuauauggggaaccuguccagccagcagcuggaucagcgcagagcucuccugaauaugaucggaaugucuggcgggauucagggaacccggacaggccgcgacggcguggucagagugugggaugugaagaacgccgaccuucugaauaaccaguucgggaccaugccuucccucacacuggcuugucuuaccaaacaaggacaggucgaucugaaugacguugugcaggcccucacggaccugggccugaucuacaccgcgaaguauccgaacgccagcgaucucgaccggcugacacaaucucaucccauucuuaauaugaucgauaccaagaaauccagccugaacaucuccggguacaauuuuucucucggagcugccgugaaggcuggcgccugcaugcuggacgggggaaacaugcuugagacaauuaaagucagcccucagaccauggauggcauccugaaguccauucucaaagugaagaaaacgcugggcauguucaucagcgacacacccggggagcgcaacccuuaugaaaauauucuguacaagaucugucucucuggagauggcuggcccuauauugcguccagaaccagcaucacagggcgggccugggagaacaccguuguggaccuggaaucugauggaaagccucagaaagcuggcagcaauaacuccaauaagucucuucagagcgccggguuugcugccggacugaccuacucccaacucaugacacugaaagacgccaugcugcagcuugauccgaacgcuaagacguggauggacaucgagggcagacccgaggacccugucgaaauugcgcucuaccagcccagcucuggcugcuauauccacuucuuucgcgagccuaccgaucugaaacaguucaagcaagacgccaaguacucccaugggauugaugugacagaccuguuugcugcccagcccggacucaccagcgccguuaucgaagcucugccgcggaauauggugauuacaugucagggcucugaugacaucaaaaagcugcuggagucccaggggagaaaagauaucaagcucauugacaucgcccugagcaaaaccgauucccgcaaguaugaaaacgcggucugggaccaauacaaggaucugugccacaugcauacgggaguggucguggagaaaaagaaacggggcgggaaggaggaaauuacaccucacugugcucuuauggacugcaucauguucgaugccgccguuucuggcggacucaauacccuggugcugagagcuguccucccccgcgacaugguguuucggaccagcacaccuagaguugugcugugaggacuagucccuguucccagagcccacuuuuuuuucuuuuuuugaaauaaaauagccugucuuucagaucuaaaaaaaaaaaaaaaaaaaaaaaaaaaaaaaaaaaaaaaaaaaaaaaaaaaaaaaaaaaaaaaaaaaaaaaaaaaaaaaaaaaaaaaaaaaaaaaaaaaa

SEQ ID NO: 19762 - RNA, 2009 nt, Artificial Sequence
  mRNA product Design a-1 (A100) comprising derived and/or modified sequence from LASV(G3010-SLE-2013;Clade IV)__AIT17345__SP-HsALB_NP(2-569) (opt5)
aggagagucccgcagucggcguccagcggcucugcuuguucgugugugugucguugcaggccuuauucaagcuuaccaugaagugggugaccuucaucagccugcucuuucuguucuccucugccuacagcagcgccuccaaggagaucaaaucuuuccuguggacccagagccucagacgggaacuguccggcuacugcucuaacauuaaacuucaaguggucaaagacgcucaggcccugcuccacgggcuggauuuuagcgagguuuccaaugugcagcgccuuaugagaaaggaacggcgcgacgauaacgaccugaaaagacuccgggaucugaaucaggcggugaacaaucuggucgagcucaagucuacacaacaaaagagcauccugcgcgugggaacgcuuaccuccgacgaucugcucauucuggcugccgaccuugaaaaacuuaagagcaaaguuacaagaaccgagcggccccucucugccggcguguauauggggaaccuguccagccagcagcuggaucagcgcagagcucuccugucuaugaucggaauguccagcggcguccagggggcccgggcuggacgcgacggcgugguuagagugugggaugucaagaaugccgagcuucugaacaaucaguucggcacaaugccuucucucacccuggcgugucuuacaaaacaggggcaaguggaccugaacgaugugguccaggcccucaccgaccugggacugauuuacacggcuaaguauccgaauaccuccgaccucgaucggcugacacagagccaucccauccuuaacaugaucgacaccaagaaauccucucugaauauuagcggcuacaacuuuucccucggggccgcuguuaaggccggagcgugcaugcuggauggcgggaauaugcuugaaacaaucaaagugagcccucaaaccauggacggcauucugaagucuauccucaaagugaagaaagcccugggaauguucauuuccgagacgcccggcgaacgcaacccuuaugagaacauccuguacaagauuugucucagcggggauggauggcccuauaucgcuucuagaacaagcaucaccggccgggccugggagaauacagucguggaccuggaauccgaugggaagccucagaaagcuggaucuaacaauagcaacaagucccuucagagcgccggcuuuaccgccgggcugaccuacucucagcucaugacacugaaagacgcuaugcugcaacuugauccgaaugcgaagacguggauggacauugagggaagacccgaagauccuguugagguggcccucuaccagcccuccagcggcugcuauauccacuucuuucgcgaaccuaccgaccugaaacaguucaagcaggacgcuaaguacucucauggcauugaugucacagaccuguuugccgcccaacccgggcucaccuccgcugugaucgaugcccugccgcggaacaugguuauuacaugucagggaagcgacgauaucaaaaagcugcuggagucccagggcagaaaagacaucaagcucauugauaucgcgcugucuaaaaccgacagccgcaaguaugagaaugcugugugggaucaguacaaggaccugugccacaugcauacgggggucguggucgaaaagaagaaacggggaggcaaggaggaaauuacaccucacugugcccuuauggauugcaucauguucgacgccgcuguguccgggggccucaacaccucuguucugagagccgugcugccccgcgauauggucuuucggaccagcacaccuagagugguucucugaggacuagucccuguucccagagcccacuuuuuuuucuuuuuuugaaauaaaauagccugucuuucagaucuaaaaaaaaaaaaaaaaaaaaaaaaaaaaaaaaaaaaaaaaaaaaaaaaaaaaaaaaaaaaaaaaaaaaaaaaaaaaaaaaaaaaaaaaaaaaaaaaaaaa

SEQ ID NO: 19763 - RNA, 2009 nt, Artificial Sequence
  mRNA product Design a-1 (A100) comprising derived and/or modified sequence from LASV(G502-SLE-2009;Clade IV)__AIT17127__SP-HsALB_NP(2-569) (opt5)
aggagagucccgcagucggcguccagcggcucugcuuguucgugugugugucguugcaggccuuauucaagcuuaccaugaagugggugaccuucaucagccugcucuuucuguucuccucugccuacagcagcgccuccaaggagaucaaaucuuuccuguggacccagagccucagacgggaacuguccggcuacugcucuaacauuaagcugcaaguggucaaagacgcucaggcccugcuccacgggcuggauuuuagcgagguuuccaaugugcagcgccuuaugagaaaggaacggcgcgacgauaacgaccugaaaagacuccgggaucugaaucaggcggugaacaaucuggucgagcucaagucuacacaacaaaagagcauccugcgcgugggaacgcuuaccuccgacgaucugcucauucuggcugccgaccuugaaaaacuuaagagcaaaguuaucagaacagagcggccccucucugccggcguguauauggggaaccuguccagccagcagcuggaucagcgcagagcucuccugucuaugauuggaauguccggcgggaaucagggaguccgggccggcaaggacggcgugguucgcgugugggaugucaaaaacgcugagcuucugaauaaccaguucgggaccaugccuagccucacacuggccugucuuaccaagcagggacaaguggaccugaaugaugcggugcaggcccucacagaccugggccugaucuacaccgcuaaguauccgaacacgucugaccucgauagacugacccagucccaucccauccuuaauaugauugacaccaaaaagagcucccugaacaucucuggguacaauuuuagccucggagccgcugucaaagccggcgcgugcaugcuggaugggggaaacaugcuugaaacaauuaagguuuccccucaaacaauggacggcauccugaaaagcauucucaaggugaaaaaggcccugggcauguucaucucugauacccccggggagcggaacccuuaugaaaauauucuguacaagaucugucucuccggagacggcuggcccuauaucgcuagccgcacgucuauuacagggagagccugggagaacaccguggucgaucuggagagcgacggaaaaccucagaaggcuggcuccaauaacucuaauaaaagccuucaguccgccggguuuacagccggacugaccuacagccagcucaugacccugaaggaugcuaugcugcaacuugacccgaacacaaaaacguggauggauaucgaaggccggcccgaggacccuguggaaauugcgcucuaccagcccucuuccggcugcuauauccacuucuuuagagagccuaccgaccugaagcaguucaagcaggaugccaaauacagccaugggauugacguuacagaucuguuugcugcccaacccggacucaccucugccgugaucgacgcucugccgcgcaauauggucaucacaugucagggcuccgaugacauucggaaacuucuggaaagccaggggagaaaggauaucaagcucauugacaucgcccugaacaaaaccgauucccgcaaguaugagaaugcggugugggaccaguacaaggaucugugccacaugcauacgggaguuguggucgagaaaaagaaacggggcgggaaggaagagauuacaccucacugugcucuuauggacugcaucauguucgaugccgccgugucuggcggacucaacaccagcguccugagagcugugcugccccgcgacaugguuuuucggaccuccacaccuagagugguccucugaggacuagucccuguucccagagcccacuuuuuuuucuuuuuuugaaauaaaauagccugucuuucagaucuaaaaaaaaaaaaaaaaaaaaaaaaaaaaaaaaaaaaaaaaaaaaaaaaaaaaaaaaaaaaaaaaaaaaaaaaaaaaaaaaaaaaaaaaaaaaaaaaaaaa

SEQ ID NO: 19764 - RNA, 2009 nt, Artificial Sequence
  mRNA product Design a-1 (A100) comprising derived and/or modified sequence from LASV(G733-SLE-2010;Clade IV)__AIT17155__SP-HsALB_NP(2-569) (opt5)
aggagagucccgcagucggcguccagcggcucugcuuguucgugugugugucguugcaggccuuauucaagcuuaccaugaagugggugaccuucaucagccugcucuuucuguucuccucugccuacagcagcgccuccaaggagaucaaaucuuuccuguggacccagagccucagacgggaacuguccggcuacugcucuaacauuaagcugcaaguggucaaagacgcucaggcccugcuccacgggcuggauuuuagcgagguuuccaaugugcagcgccuuaugagaaaggaacggcgcgacgauaacgaccugaaaagacuccgggaucugaaucaggcggugaacaaucuggucgagcucaagucuacacaacaaaagagcgugcugcgcguuggaacgcuuaccuccgacgaacugcucgugcuggcugccgaucuugagaaacuuaagagcaaagucaucagaacagagcggccccucucugccggcguguauauggggaaccuguccagccagcagcuggaccagcgcagagcucuccugucuaugauuggaauguccggcgggaaucagggagcccggaccggccgcgauggcguugugagagucugggacgugaagaacgcugaacuucugaauaaccaguucgggacaaugccuagccucacccuggccugucuuacaaaacagggacaaguggaucugaaugacgcgguccaggcccucaccgaucugggccugaucuacacggcuaaguauccgaacaccucugaccucgaccggcugacacagucccaucccauucuuaauaugaucgauaccaagaaaagcucccugaacaucucuggguacaauuuuagccucggagccgcuguuaaggccggcgcgugcaugcuggacgggggaaacaugcuugagacaauuaaaguguccccucaaaccauggauggcauccucaagagcauucugaaagugaagaaagcccugggcauguucaucucugacacgcccggggaacgcaacccuuaugagaauauucuguacaagaucugucucuccggagauggcuggcccuauauugcuagcagaacaucuaucaccgggcgggccugggagaacacagucguggaccuggaaagcgauggaaagccucagaaagcuggcuccaauaacucuaauaagagccuucaguccgccggguuuaccgccggacugaccuacagccagcucaugacacugaaagacgcuaugcugcaacuugauccgaacgcgaagacguggauggacaucgagggcagacccgaagauccuguugagauugcccucuaccagcccucuuccggcugcuauauccacuucuuucgcgaaccuaccgaccugaaacaguucaagcaggacgcuaaguacagccaugggauugaugugacagaccuguuugccgcccaacccggacucaccucugcugucaucgaugcccugccgcggaauauggugauuacaugucagggcuccgacgauaucagaaaacuucuggagagccaggggcgcaaggacaucaaacucauugauaucgcgcuguccaagauugacucucggaaauaugagaacgcuguuugggaucaguacaaggaccugugccacaugcauaccggaguggucguggaaaagaaaaagagaggcgggaaagaggaaaucacgccucacugugcccuuauggauugcauuauguucgacgccgcugucagcggcggacucaauucccuggugcugcgcgccguucucccccgggauaugguguuuagaacaucuaccccucgcgucgugcugugaggacuagucccuguucccagagcccacuuuuuuuucuuuuuuugaaauaaaauagccugucuuucagaucuaaaaaaaaaaaaaaaaaaaaaaaaaaaaaaaaaaaaaaaaaaaaaaaaaaaaaaaaaaaaaaaaaaaaaaaaaaaaaaaaaaaaaaaaaaaaaaaaaaaa

SEQ ID NO: 19765 - RNA, 2009 nt, Artificial Sequence
  mRNA product Design a-1 (A100) comprising derived and/or modified sequence from MOPV/LASV reassortant(IGS-1;Clade IV)__AFY05578__SP-HsALB_NP(2-569) (opt5)
aggagagucccgcagucggcguccagcggcucugcuuguucgugugugugucguugcaggccuuauucaagcuuaccaugaagugggugaccuucaucagccugcucuuucuguucuccucugccuacagcagcgccuccaaggagaucaaaucuuuccuguggacccagagccucagacgggaacuguccggcuacugcucuaacauuaaacuucaaguggucaaggacgcucaggcccugcuccacgggcuggauuuuagcgagguuuccaaugugcagcgccuuaugagaaaggaacggcgcgacgauaacgaccugaaaagacuccgggaucugaaucaggcggugaacaaucuggucgagcucaagucuacacaacaaaagagcauccugcgcgugggaacgcuuaccuccgacgaucugcucauucuggcugccgaccuugaaaaacugagaagcaagguuauccggacagagcgcccccucucugccggcguguauauggggaaccuguccagccagcagcuggaucagagacgggcucuccugaauaugauuggaaugucuggcgggaaccagggagcccgcgcuggcagagacggcgucgugcggguuugggaugugaaaaaugccgagcuucuguccaaccaguucgggaccaugccuagccucacacuggcgugucuuaccaagcagggacaagucgaccugaaugaugccgugcaggcucucacagaccugggccugaucuacaccgccaaauauccgaacacgucugaccucgaucgccugacccagucccaucccauccuuaauaugauugacacaaagaaaagcucccugaacaucucuggguacaauuuuagccucggagcugccgugaaggcgggcgccugcaugcuggaugggggaaacaugcuugaaaccauuaaggucuccccucaaacaauggacggcauccugaaaagcauucucaagguuaaaaaggcucugggcauguucaucucugauacccccggggagagaaacccuuaugaaaauauucuguacaaaaucugucucuccggagacggcuggcccuauaucgccagccggacgucuauuacagggagagcuugggagaacaccgugguggaucuggagagcgacggaaagccucagaaggccgauuccaauaacucuagcaaaucccuucagagcgccggcuuuacagcugggcugaccuacucucagcucaugacccugaaggacgcgaugcugcaacuugauccgaaugccaaaacauggauggacaucgaaggacgccccgaggacccugucgaaauugcucucuaccagcccuccagcggcugcuauauccacuucuuucgggagccuacggaucugaagcaguucaaacaggacgccaaguacucucauggcauugaugugaccgaccuguuugccacacaacccgggcucaccuccgcuguuaucgaugcccugccgagaaacauggugaucacaugucagggaagcgacgauauucgcaaacuucuggaaucccagggccggaaggacaucaagcucauugauaucgaccugucuaaaaccgauagcagaaaguaugagaaugcggucugggaccaguacaaagaucugugccacaugcauacgggggugguuguggagaagaagaaacgcggaggcaaggaagagauuacaccucacugugcucuuauggacugcaucauguucgacgccgccgucuccgggggccucaacaccucugugcugcgggcuguccugcccagagauaugguguuucgcaccagcacaccucggguugugcucugaggacuagucccuguucccagagcccacuuuuuuuucuuuuuuugaaauaaaauagccugucuuucagaucuaaaaaaaaaaaaaaaaaaaaaaaaaaaaaaaaaaaaaaaaaaaaaaaaaaaaaaaaaaaaaaaaaaaaaaaaaaaaaaaaaaaaaaaaaaaaaaaaaaaa

SEQ ID NO: 19766 - RNA, 2009 nt, Artificial Sequence
  mRNA product Design a-1 (A100) comprising derived and/or modified sequence from LASV(LM765-SLE-2012;Clade IV)__AIT17815__SP-HsALB_NP(2-569) (opt5)
aggagagucccgcagucggcguccagcggcucugcuuguucgugugugugucguugcaggccuuauucaagcuuaccaugaagugggugaccuucaucagccugcucuuucuguucuccucugccuacagcagcgccuccaaggagaucaaaucuuuccuguggacccagagccucagacgggaacuguccggcuacugcucuaacauuaagcugcaaguggucaaagacgcucaggcccugcuccacgggcuggauuuuagcgagguuuccaaugugcagcgccuuaugagaaaggaacggcgcgacgauaacgaccugaaaagacuccgggaucugaaucaggcggugaacaaucuggucgagcucaagucuacacaacaaaagagcauccugcgcgugggaacgcuuaccuccgacgaucugcucauucuggcugccgaccuugaaaaacuuaagagcaaaguuacaagaaccgagcggccccucucugccggcguguauauggggaaccuguccagccagcagcuggaucagcgcagagcucuccuggacaugaucggaaugucuggcuccaaucagggggcccgggcuggacgcgauggcgucgugagaguuugggacgugaagaacgccgagcuucugaauaaccaguucggcacaaugccuagccucacccuggcgugucuuacaaaacaggggcaagucgaucugaaugacgccgugcaggcucucaccgaccugggacugauuuacacggccaaguauccgaacaccucugaucucgaccggcugacacagucccaucccauccuuaauaugaucgauaccaagaaaagcucccugaacauuucuggcuacaauuuuagccucggggcugccgugaaggcgggagccugcaugcuggacggcgggaacaugcuugaaacaaucaaagucuccccucaaaccauggauggcauucucaagagcauccugaaaguuaagaaagcucugggaauguucauuucugacgcccccggcgagcgcaacccuuaugaaaauauccuguacaagauuugucucuccggggauggauggcccuauaucgcuagcagaacgucuaucacaggccgggccugggagaacaccgugguggaccuggagagcgaugggaagccucagaaagccggauccaauggcucuaacaagagccuucaguccgcuggguuuacagcgggacugaccuacagccagcucaugacccugaaagacgccaugcugcaacuugauccgaaugcuaagacauggauggacauugaaggcagacccgaggacccugucgaaaucgcccucuaccagcccucuuccggcugcuauauucacuucuuucgcgagccuacggaucugaaacaguucaagcaggacgccaaguacagccaugggaucgaugugaccgaccuguuugcugcccaacccggacucacaucugcgguuauugaugcucugccgcggaacauggugaucaccugucagggcuccgacgauaucagaaaacuuuucgaaagccaggggcgcaaggacauuaaacugaucgauauugcccucuccaagacagacucucggaaauaugagaaugccgucugggaucaguacaaggaccugugccacaugcauaccggaaucgugguugagaagaaaaagagaggcgggaaagaagagauuacgccucacugugcucugauggauugcaucauguuugacgccgcugugagcggcggacuuaacacauccguccuccgcgccgugcugccccgggacauggucuucagaaccucuaccccucgcgugguucugugaggacuagucccuguucccagagcccacuuuuuuuucuuuuuuugaaauaaaauagccugucuuucagaucuaaaaaaaaaaaaaaaaaaaaaaaaaaaaaaaaaaaaaaaaaaaaaaaaaaaaaaaaaaaaaaaaaaaaaaaaaaaaaaaaaaaaaaaaaaaaaaaaaaaa

SEQ ID NO: 19767 - RNA, 2009 nt, Artificial Sequence
  mRNA product Design a-1 (A100) comprising derived and/or modified sequence from LASV(LM776-SLE-2012;Clade IV)__AIT17825__SP-HsALB_NP(2-569) (opt5)
aggagagucccgcagucggcguccagcggcucugcuuguucgugugugugucguugcaggccuuauucaagcuuaccaugaagugggugaccuucaucagccugcucuuucuguucuccucugccuacagcagcgccuccaaggagaucaaaucuuuccuguggacccagagccucagacgggaacuguccucuuacugcagcaacauuaaacuucaaguggucaaggacgcucaggcccugcuccacggccuggauuuuuccgagguuucuaaugugcagcgccuuaugagaaaggaacggcgcgacgauaacgaccugaaaagacuccgggaucugaaucaggcggugaacaaucuggucgagcucaagagcacacaacagaaguccauccugcgcguggggacgcuuaccagcgacgaucugcucauucuggcugccgaccuugaaaaacugaagucuaaaguuacaagaaccgagcggccccucuccgccggaguguauaugggcaaccugagcucucagcagcuggaucaacgcagagcucuccuguccaugaucgggaugagcggaucuaaucagggcgcccgggcugggcgcgacggagucgugagaguuugggaugugaagaacgccgagcuucugaauaaccaguucggcacaaugccuucccucacccuggcgugucuuacaaaacagggccaagucgaccugaaugaugccgugcaggcucucaccgaccuggggcugauuuacacggccaaguauccgaacaccagcgaccucgaucggcugacacagucccaucccauccuuaauaugaucgacaccaagaaaucuagccugaacauuuccggauacaauuuuagccucggcgcugccgugaaggcgggggccugcaugcuggauggaggcaacaugcuugaaacaaucaaagucucuccucaaaccauggacgggauucugaaguccauccucaaaguuaagaaagcucugggaauguucauuagcgauacgcccggcgagcgcaacccuuaugaaaauauccuguacaagauuugucucucuggcgacggguggcccuauaucgccagcagaacauccaucaccggacgggcuugggagaacacagugguggaucuggagucugacggcaagccucagaaagccgggagcaauaacuccaauaagagccuucagucugccggauuuaccgcuggccugaccuacucccagcucaugacacugaaagaugcgaugcugcaacuugacccgaacgccaagacguggauggauauugaagggagacccgaggacccugucgaaguggcucucuaccagcccagcucuggaugcuauauccacuucuuucgcgagccuaccgaccugaaacaguucaagcaggaugccaaguacucccauggcauugacguuacagaucuguuugccgcucaacccggccucaccagcgccgugaucgacgcgcugccgcggaauauggucauuacaugucagggguccgaugacaucagaaaacuucuggaaucucagggacgcaaggauaucaaacucauugacaucgcucugagcaagaccgauucccggaaauaugagaacgccgugugggaccaguacaaggaucugugccacaugcauacgggcguuguggucgagaagaaaaagagagggggaaaagaagagauuacaccucacugugcccuuauggacugcaucauguucgaugcugccgugucuggcgggcucaauaccagcguccugcgcgcugugcugccccgggacaugguuuuuagaaccuccacaccucgcgugguccucugaggacuagucccuguucccagagcccacuuuuuuuucuuuuuuugaaauaaaauagccugucuuucagaucuaaaaaaaaaaaaaaaaaaaaaaaaaaaaaaaaaaaaaaaaaaaaaaaaaaaaaaaaaaaaaaaaaaaaaaaaaaaaaaaaaaaaaaaaaaaaaaaaaaaa

SEQ ID NO: 19768 - RNA, 2009 nt, Artificial Sequence
  mRNA product Design a-1 (A100) comprising derived and/or modified sequence from LASV(Mad39;Clade IV)__ANH09723__SP-HsALB_NP(2-569) (opt5)
aggagagucccgcagucggcguccagcggcucugcuuguucgugugugugucguugcaggccuuauucaagcuuaccaugaagugggugaccuucaucagccugcucuuucuguucuccucugccuacagcagcgccuccaaggagaucaaaucuuuccuguggacccagagccucagacgggaacuguccggcuacugcucuaacauuaagcugcaaguggucaaagacgcucaggcccugcuccacgggcuggauuuuagcgagguuuccaaugugcagcgccuuaugagaaagcagcggcgcgacgauaacgaccugaaaagacuccgggaucugaaucaagcggugaacaaucuggucgaacucaagucuacacagcaaaagagcgugcugcgcguuggaacgcuuaccuccgacgaucugcucacacuggcugccgaccuugagaaacuuaagagcaaagugaccagaacagaacggccccucaccgccggcgucuauauggggaaccugucuucccagcagcuggaucagcgcagagcucuccugaauaugaucggaaugagcggcgggaaccagggagcccggacaggccgcgacggcgugguuagagugugggaugucaagaaugcugagcuucugaacaaucaguucgggaccaugccuucucucacgcuggccugucuuaccaaacaaggacagguggaccugaacgaugugguccaggcgcucacagaccugggccugauuuacaccgccaaguauccgaauacauccgaccucgaucggcugacccaaagccaucccauccuuaacaugauugacacgaauaagucuucccugaacaucagcggguacaacuuuucccucggagcugccguuaaagcuggcgccugcaugcuggaugggggaaauaugcuugagacaaucaaggugucuccucagaccauggacggcauucugaaaagcauccucaaggugaaaaagucccugggcauguucauuagcgauacacccggggaacgcaacccuuaugagaauauccuguacaaaauuugucucucuggagacggcuggcccuauaucgcguccagaaccagcauuaccgggcgggccugggaaaacacagucguggaucuggagucuggaggcaagccucagaaggcugggagcaauaacuccaauaaaucucuucagagcgccggauuugcugccggccugacguacucccaacucaugacccugaaggacgccaugcugcagcuugauccgaacgcuaaaacauggauggacaucgagggcagacccgaagauccuguugagaucgcgcucuaccagcccauuagcgggugcuauauccacuucuuucgcgaaccuaccgaccugaagcaguucaaacaagacgccaaguacucucauggaauugaugugacagaccuguuugcugcccagcccggccucaccuccgccgucaucgaggcucugccgcggaauauggugauuacgugucaggggagcgaugacaucagaaaacuuuucgaaucucagggacgcaaggauaucaagcugauugacaucgcccucuccaaaacagauagccggaaguaugagaacgcgguuugggaccaauacaaagaucugugccacaugcauaccggcguggucguggagaagaagaaaaagggcgggaaagaagagauuaccccucacugugcucugauggacugcaucauguuugaugccgccgucuccggaggccuuaauacacucgugcugagagcuguucugccccgcgacaugguguuccggaccucuacaccuaaggucgugcucugaggacuagucccuguucccagagcccacuuuuuuuucuuuuuuugaaauaaaauagccugucuuucagaucuaaaaaaaaaaaaaaaaaaaaaaaaaaaaaaaaaaaaaaaaaaaaaaaaaaaaaaaaaaaaaaaaaaaaaaaaaaaaaaaaaaaaaaaaaaaaaaaaaaaa

SEQ ID NO: 19769 - RNA, 2009 nt, Artificial Sequence
  mRNA product Design a-1 (A100) comprising derived and/or modified sequence from LASV(Z0947-SLE-2011;Clade IV)__AIT17841__SP-HsALB_NP(2-569) (opt5)
aggagagucccgcagucggcguccagcggcucugcuuguucgugugugugucguugcaggccuuauucaagcuuaccaugaagugggugaccuucaucagccugcucuuucuguucuccucugccuacagcagcgccuccaaggagaucaaaucuuuccuguggacccagagccucagacgggaacuguccggcuacugcucuaacauuaagcugcaaguggucaaagacgcucaggcccugcuccacgggcuggauuuuagcgagguuuccaaugugcagcgccuuaugagaaaggaacggcgcgacgauaacgaccugaaaagacuccgggaucugaaucaggcggugaacaaucuggucgagcucaagucuacacaacaaaagagcauccugcgcgugggaacgcuuaccuccgacgaucugcucauucuggcugccgaccuugaaaaacuuaagagcaaaguuacaagaaccgagcggccccucucugccggcguguauauggggaaccuguccagccagcagcuggaucagcgcagagcucuccugaauaugaucggaaugucuggcuccaaccagggggcccggacaggacgcgacggcgucgugagaguuugggaugugaagaaugcugagcuucugaacaaucaguucggcaccaugccuagccucacacuggccugucuuaccaaacaggggcaagucgaccugaacgaugcggugcaggcccucacggaccugggacugauuuacaccgcuaaguauccgaauacaucugaccucgaucggcugacccagucccaucccauccuuaacaugaucgacacaaagaaaagcucccugaauauuucuggcuacaacuuuagccucggggccgcugugaaggccggagcgugcaugcuggauggcgggaacaugcuugaaaccaucaaagucuccccucaaacgauggacggcauucucaagagcauccugaaaguuaagaaagcccugggaauguucauuucugaugcucccggcgagcgcaauccuuaugaaaacauccuguacaagauuugucucuccggggacggauggcccuauaucgccagcagaacaucuaucaccggccgggcuugggagaauacagugguggaucuggagagcgacgggaagccucagaaagccggauccaacggcucuaauaagagccuucaguccgccggguuuaccgcuggacugaccuacagccagcucaugacacugaaagaugcgaugcugcaacuugacccgaacgccaagacguggauggauauugaaggcagacccgaggacccugucgaaaucgcucucuaccagcccucuuccggcugcuauauucacuucuuucgcgagccuaccgaccugaaacaguucaagcaggaugccaaguacagccaugggaucgacgugacagaucuguuugccgcucaacccggacucaccucugccguuauugacgcgcugccgcggaauauggugaucacaugucagggcuccgaugacaucagaaaacuuuucgaaagccaggggcgcaaggauauuaaacugaucgacauugcucucuccaagaccgauucucggaaauaugagaacgccgucugggaccaguacaaggaucugugccacaugcauacgggaaucgugguugagaagaaaaagagaggcgggaaagaagagauuacaccucacugugcccugauggacugcaucauguuugaugcugccgugagcggcggacuuaauaccuccguccuccgcgcugugcugccccgggacauggucuucagaaccucuacaccucgcgugguucugugaggacuagucccuguucccagagcccacuuuuuuuucuuuuuuugaaauaaaauagccugucuuucagaucuaaaaaaaaaaaaaaaaaaaaaaaaaaaaaaaaaaaaaaaaaaaaaaaaaaaaaaaaaaaaaaaaaaaaaaaaaaaaaaaaaaaaaaaaaaaaaaaaaaaa

SEQ ID NO: 19770 - RNA, 2021 nt, Artificial Sequence
  mRNA product Design a-2 (hSL-A64-N5) comprising derived and/or modified sequence from LASV(Josiah;Clade IV)__NP_694869__SP-HsALB_NP(2-569) (opt1)
aggagaguccgcucagccagguugcagaagcggcuuagcguguguccuaaucuucucucugcguguagguaggccugugccgcaaacaagcuuaccaugaagugggugaccuucaucagccugcucuuccuguucuccagcgccuacuccagcgccuccaaggagaucaagagcuuccuguggacccagucccuccgccgggagcugagcggcuacugcuccaacaucaagcuccagguggucaaggacgcccaggcgcugcugcacgggcuggacuucagcgagguguccaacgugcagcgccucaugcggaaggagcgccgggacgacaacgaccugaagcgccugcgggaccucaaccaggccgucaacaaccugguggagcucaagagcacccagcagaaguccauccugcgcgugggcacccugaccagcgacgaccugcucauccuggccgccgaccuggagaagcucaaguccaaggucauccggaccgagcgcccccugagcgccgggguguacaugggcaaccuguccagccagcagcucgaccagcggcgcgcgcugcugaacaugaucgggauguccggcggcaaccagggggcccgggccggccgcgacggggugguccgggugugggacgugaagaacgccgagcuccugaacaaccaguucggcaccaugccgagccugacgcucgcgugccugaccaagcaggggcaggucgaccugaacgacgccgugcaggcccucaccgaccugggccugaucuacaccgccaaguaccccaacacguccgaccucgaccgccugacccagagccaccccauccugaacaugaucgacaccaagaaguccagccucaacaucagcggcuacaacuucucccugggggccgcggugaaggccggcgccugcaugcuggacgggggcaacaugcucgagaccaucaaggucagcccccagacgauggacggcauccugaaguccauccugaaggugaagaaggcccucgggauguucaucagcgacaccccgggcgagcggaaccccuacgagaacauccuguacaagaucugccuguccggggacggcuggcccuacaucgccagccgcaccuccaucaccgggcgggcgugggagaacacgguggucgaccucgagagcgacggcaagccccagaaggccgacuccaacaacagcuccaagagccugcaguccgccggcuucaccgccgggcugaccuacagccagcucaugacccugaaggacgccaugcugcagcuggacccgaacgcgaagacguggauggacaucgagggccgccccgaggaccccguggagaucgcccucuaccagcccuccagcgggugcuacauccacuucuuccgggagccgaccgaccugaagcaguucaagcaggacgccaaguacucccacggcaucgacgugaccgaccuguucgccacccagcccgggcucacgagcgccgucaucgacgcgcugccccgcaacauggugaucacgugccagggcuccgacgacauccgcaagcugcucgagagccagggccggaaggacaucaagcugaucgacaucgcccugagcaagaccgacucccgcaaguacgagaacgccgugugggaccaguacaaggaccucugccacaugcacaccggggucguggucgagaagaagaagcggggcgggaaggaggagaucaccccgcacugcgcccugauggacugcaucauguucgacgcggccgugagcggcgggcugaacaccuccgugcuccgcgccguccugccccgggacaugguguuccgcaccagcacgccccgggugguccugugaggacuagucccuguucccagagcccacuuuuuuuucuuuuuuugaaauaaaauagccugucuuucagaucucaaaggcucuuuucagagccaccaaaaaaaaaaaaaaaaaaaaaaaaaaaaaaaaaaaaaaaaaaaaaaaaaaaaaaaaaaaaaaaaagaauu

SEQ ID NO: 19771 - RNA, 2021 nt, Artificial Sequence
  mRNA product Design a-2 (hSL-A64-N5) comprising derived and/or modified sequence from LASV(LP;Clade I)__AAF86702__SP-HsALB_NP(2-569) (opt1)
aggagaguccgcucagccagguugcagaagcggcuuagcguguguccuaaucuucucucugcguguagguaggccugugccgcaaacaagcuuaccaugaagugggugaccuucaucagccugcucuuccuguucuccagcgccuacuccagcaacuccaaggagaucaagagcuuccuguggacccagucccuccgccgggagcugagcggcuacugcuccaacaucaagcuccagguggucaaggacgcccaggcccugcugcacgggcuggacuucagcgagguguccaacgugcagcgccucaugcggaagcagaagcgcgacgacgcggaccugaagcggcugcgcgaccucaaccaggccgucaacaaccugguggagcucaagagcacccagcagaagaacgugcugcgggucggcacgcuguccagcgacgaccugaucacccucgccgccgaccuggagaagcugaaguccaaggugauccgcaccgagcggccccucagcuccgggguguacaugggcaaccugagcucccagcagcuggaccagcgccgggcccuccugagcaugaucgggauguccggcggcccgcaggggaaccgcaccggcggggacggcgucgugcgggugugggacgucaagaacgcggagcugcucaacaaccaguucgggacgaugcccagccugacccuggccugccucaccaagcagggccagguggaccugaacgacgccgugcaggcccugaccgaccucggccugaucuacacggcgaaguaccccaacuccagcgaccuggacaugcucacccagagccaccccauccuggggauggucgacaccaagaaguccagccugaacaucuccggcuacaacuucagccucggggccgccgugaaggccggcgccugcaugcuggacggcgggaacaugcuggagaccaucaagguguccccgcagacgauggacggcauccucaagagcauccugaaggucaagcgcucccuggggauguucaucagcgacacccccggcgagcggaaccccuacgagaacauccucuacaagaucugccuguccggggagggcuggcccuacaucgcgagccgcaccuccaucaccggccgggccugggagaacacgcugguggaccucgagagcgacaacaagccgcccaagcugaacuccgccgggagcaacaagucccugcaggccgccggccucaacgcggggcugaccuacagccagcugaugacccugaaggacugcaugcuccagcuggaccccuccagcaagaccuggaucgacaucgagggccgccccgaggacccgguggagaucgcccuguuccagcccuccagcgggugcuacauccacuucuuccgggagcccacggaccucaagcaguucaagcaggacgccaaguacagccacggcaucgacgucaccgaccuguucuccacccagcccggccugaccagcgccgugaucgaggcccucccgcgcaacauggugcugacgugccagggguccgacgacaucaagaagcugcucgagagccagggccggcgcgacaucaagcugaucgacaucucccugagcaaggcggacucccgcaaguucgagaacgccgucugggaccaguacaaggaccucugccacaugcacaccgggguggucguggagaagaagaagcggggcgggaaggaggagaucacgccccacugcgcccugcuggacugcaucauguucgacgccgccaccaccggcagccucaacaucaccacccugcgcgcggugcugccccgggacauggucuuccgcaccuccacgcccaagguggugcucugaggacuagucccuguucccagagcccacuuuuuuuucuuuuuuugaaauaaaauagccugucuuucagaucucaaaggcucuuuucagagccaccaaaaaaaaaaaaaaaaaaaaaaaaaaaaaaaaaaaaaaaaaaaaaaaaaaaaaaaaaaaaaaaaagaauu

SEQ ID NO: 19772 - RNA, 2021 nt, Artificial Sequence
  mRNA product Design a-2 (hSL-A64-N5) comprising derived and/or modified sequence from LASV(803213;Clade II)__AAF86704__SP-HsALB_NP(2-569) (opt1)
aggagaguccgcucagccagguugcagaagcggcuuagcguguguccuaaucuucucucugcguguagguaggccugugccgcaaacaagcuuaccaugaagugggugaccuucaucagccugcucuuccuguucuccagcgccuacuccagcgccuccaaggaggugaaguccuuccuguggacccagagccuccgccgggagcugagcggcuacugcuccaacaucaagcugcaggucgugaaggacgcccaggcgcuccugcacgggcuggacuucagcgaggugaacaacguccagcgccucaugcggaagcagaagcgcgacgacggcgaccugaagcggcugcgcgaccucaaccaggccgugaacaaccugguggagcugaaguccacccagcagaaguccauccuccgggucgggacgcugaccagcgacgaccugcucacccuggccgccgaccuggagaagcucaagagcaaggugauccgcaccgagcggccccuguccagcggcguguacauggggaaccuguccacgcagcagcucgagcagcgccgggcccugcugaacaugaucggcauggucggcggggcgcagggcacccagccggggcgcgacggcguggugcgggucugggacgugaagaaccccgaccuccugaacaaccaguucgggaccaugcccagccugacccucgccugccugacgaagcagggccagguggaccugaacgacgccguccucgcccugaccgaccugggccucaucuacaccgcgaaguaccccaacuccagcgaccuggaccgccugucccagagccacccgauccucaacaugguggacaccaagaaguccagccugaacaucagcggguacaacuucucccugggcgccgccgugaaggccggggccugcaugcucgacggcggcaacaugcuggagacgaucaaggucacgccccagaccauggacgggauccucaagagcauccugaaggugaagcggucccugggcauguucgugagcgacacccccggggagcgcaaccccuacgagaacauccuguacaagaucugccucuccggcgacggguggccguacaucgcgagccggaccuccaucgucggccgcgccugggagaacaccaccguggaccuggagagcgacggcaagccccagaagguggggaccgccggcuccaacaagagccugcaguccgccggguuccccacgggccucaccuacagccagcugaugacccugaaggacuccaugaugcagcuggaccccagcgccaagaccuggaucgacaucgaggggcggccggaggaccccgucgagaucgcgcucuaccagcccauguccggcugcuacauccacuucuuccgcgagcccacggaccugaagcaguucaagcaggacgccaaguacagccacggcaucgacguggccgaccuguucccggcccagcccgggcucaccuccgccgucaucgaggcgcugccccggaacauggugcugaccugccagggcagcgacgacaucaagaagcuccuggacucccaggggcgccgcgacaucaagcugaucgacaucagccucagcaagguggacucccggaaguucgagaacgccgucugggaccagugcaaggaccugugccacaugcacaccggcgugguggucgagaagaagaagcgcgggggcaaggaggagaucacgccccacugcgcccugauggacugcaucauguucgacgccgccgugagcggcgggcucaacaucccggugcugcgggcgguccugccccgcgacaugguguuccggaccuccagccccaaggugguccucugaggacuagucccuguucccagagcccacuuuuuuuucuuuuuuugaaauaaaauagccugucuuucagaucucaaaggcucuuuucagagccaccaaaaaaaaaaaaaaaaaaaaaaaaaaaaaaaaaaaaaaaaaaaaaaaaaaaaaaaaaaaaaaaaagaauu

SEQ ID NO: 19773 - RNA, 2024 nt, Artificial Sequence
  mRNA product Design a-2 (hSL-A64-N5) comprising derived and/or modified sequence from LASV(GA391;Clade III)__CAA36646__SP-HsALB_NP(2-570) (opt1)
aggagaguccgcucagccagguugcagaagcggcuuagcguguguccuaaucuucucucugcguguagguaggccugugccgcaaacaagcuuaccaugaagugggugaccuucaucagccugcucuuccuguucuccagcgccuacuccagcgccuccaaggaggugcgcagcuuccuguggacccagucccuccggcgcgagcugagcggcuacugcuccaacaucaagcugcaggucgugaaggacgcccaggcgcuccugcacgggcuggacuucagcgagguguccaacguccagcggcucaugcgcaagcagaagcgggacgacggcgaccugaagcgccugcgggaccucaaccaggccgugaacaaccugguggagcucaagagcacccagcagaaguccguccugcgcguggggacccugagcuccgacgaccugcucauccuggccgccgaccuggagaagcucaagagcaaggugacccggaccgagcgcccccuguccagcggcgucuacauggggaaccuguccagccagcagcucgaccagcggcgcgcccugcugaacaugaucggcaugaccggcguguccgggggcgggaagggcgcgagcgacgggaucgugcgggucugggacgugaagaacgccgagcuccugaacaaccaguucggcacgaugccgucccugacccucgccugccugaccaagcagggccagguggaccugaacgacgccguccaggcgcucaccgaccuggggcugaucuacacggccaaguaccccaacagcagcgaccucgaccgccugucccagagccaccccauccugaacaugaucgacaccaagaaguccagccucaacaucuccggcuacaacuucagccugggggccgccgugaaggccggcgcgugcaugcuggacggcgggaacaugcucgagaccaucaaggugagcccccagaccauggacggcauccucaaguccauccugaaggucaagaagucccuggggauguucgugagcgacacgccgggcgagcggaaccccuacgagaacauccuguacaagaucugccuguccggggacggcuggcccuacaucgccagccgcaccuccaucgugggccgggccugggagaacaccgucguggaccucgagcaggacaacaagccccagaagaucgggaacggcgggagcaacaagucccugcagagcgccggcuucgccgcggggcugaccuacucccagcucaugacgcugaaggacuucaagugcuucaaccugaucccgaacgccaagaccuggauggacaucgagggccgccccgaggaccccguggagaucgcccuguaccagcccagcuccggcugcuacguccacuucuuccgggagccgaccgaccucaagcaguucaagcaggacgccaaguacagccacgggaucgacgugaccgaccuguucgccgcgcagcccggccugacgagcgccgucaucgaggcccucccccgcaacauggugaucacgugccagggguccgaggacauccggaagcugcuggagagccagggccgccgcgacaucaagcucaucgacaucacccuguccaaggccgacagccggaaguucgagaacgccgugugggaccaguucaaggaccugugccacaugcacaccggggucgugguggagaagaagaagcgcggcggcaaggaggagaucacgccccacugcgcgcucauggacugcaucauguucgacgccgccgucuccgggggccuggacgccaaggugcugcgggugguccucccgcgcgacaugguguuccggaccagcacccccaaggugguccugugaggacuagucccuguucccagagcccacuuuuuuuucuuuuuuugaaauaaaauagccugucuuucagaucucaaaggcucuuuucagagccaccaaaaaaaaaaaaaaaaaaaaaaaaaaaaaaaaaaaaaaaaaaaaaaaaaaaaaaaaaaaaaaaaagaauu

SEQ ID NO: 19774 - RNA, 2021 nt, Artificial Sequence
  mRNA product Design a-2 (hSL-A64-N5) comprising derived and/or modified sequence from LASV(AV;Clade V)__CCA30315__SP-HsALB_NP(2-569) (opt1)
aggagaguccgcucagccagguugcagaagcggcuuagcguguguccuaaucuucucucugcguguagguaggccugugccgcaaacaagcuuaccaugaagugggugaccuucaucagccugcucuuccuguucuccagcgccuacuccagcgccuccaaggaggugaaguccuuccuguggacccagagccuccgccgggagcugagcggcuacugcuccaacaucaagcugcaggucgugaaggacgcccaggcgcuccugcacgggcuggacuucagcgagguguccaacguccagcgccucaugcggaagcagcgccgggacgacagcgaccugaagcgccugcgggaccucaaccaggccgugaacaaccugguggagcugaaguccacccagcagaaguccguccuccgcgugggcacgcugagcagcgacgaccugcucacccuggccgccgaccuggagaagcucaaguccaaggugacccggaccgagcgcccccugagcuccggggucuacaugggcaaccugagcucccagcagcucgaccagcggcgcgcccugcugaaccucaucgggaugacgaacggcagccagggcucccaggcggggcgggacggcguggugcgcgucugggacgugaagaacgccgagcugcugaacaaccaguucgggaccaugccgagccucacccuggccugccugaccaagcagggccagguggaccucaacgacgucgugcaggcccugacggaccuggggcucaucuacaccgcgaaguaccccaacaccagcgaccuggaccggcugacccagucccaccccauccucaacaugaucgacacgaagaaguccagccugaacaucagcggcuacaacuucucccugggcgccgccgugaaggccggggccugcaugcucgacggcgggaacaugcuggagaccaucaaggucagcccccaguccauggacggcauccucaagagcauccugaaggugaagcgcgcgcugggcauguucguguccgacaccccgggggagcggaaccccuacgagaacauccuguacaagaucugccucagcggcgacggguggcccuacaucgccucccgcaccagcaucgucggccgggccugggagaacacggugguggaccuggagaccgacgggaagccccagaagaucggcuccggcaacagcaacaagucccugcagagcgccggguucuccgccggccucaccuacagccagcugaugacccugaaggacgcgaugcugcagcucgacccgaacgccaagacguggauggacaucgaggggcgccccgaggaccccgucgagguggcccuguaccagcccaucuccggcugcuacauccacuucuuccgggagccgaccgaccugaagcaguucaagcaggacgccaaguacagccacgggaucgacaucgccgaccucuucgcggcccagcccggccugaccagcgccgucaucgaggcccugccccgcaacauggugaucacgugccagggcuccgaggacaucaagaagcuccuggagagccaggggcgcaaggacaucaagcugaucgacaucgcccucuccaagaucgacagccggaaguucgagaacgcggugugggaccaguacaaggaccugugccacaugcacaccggcgucgugguggagaagaagaagcgcgggggcaaggaggagaucaccccgcacugcgcccugauggacugcaucauguucgacgccgccgucuccgggggccucaacacccuggugcugcgggcggugcucccccgcgacauggucuuccggaccagcacgccccgcguggugcugugaggacuagucccuguucccagagcccacuuuuuuuucuuuuuuugaaauaaaauagccugucuuucagaucucaaaggcucuuuucagagccaccaaaaaaaaaaaaaaaaaaaaaaaaaaaaaaaaaaaaaaaaaaaaaaaaaaaaaaaaaaaaaaaaagaauu

SEQ ID NO: 19775 - RNA, 2021 nt, Artificial Sequence
  mRNA product Design a-2 (hSL-A64-N5) comprising derived and/or modified sequence from LASV(Togo/2016/7082;Clade VI)__AMR44578__SP-HsALB_NP(2-569) (opt1)
aggagaguccgcucagccagguugcagaagcggcuuagcguguguccuaaucuucucucugcguguagguaggccugugccgcaaacaagcuuaccaugaagugggugaccuucaucagccugcucuuccuguucuccagcgccuacuccagcaacuccaaggaggugaaguccuuccuguggacccagagccuccgccgggagcugagcggcuacugcuccaacaucaagcugcaggucgugaaggacgcccaggcccuccugcacgggcuggacuucagcgagguguccaacguccagcgccucaugcggaagcagaagcgcgacgacggcgaccugaagcggcugcgcgaccucaaccaggcggugaacaaccugguggagcucaagagcguccagcagaaguccauccugcggguggggacccugaccagcgacgaccugcucacccuggccgccgaccuggagaagcucaaguccaaggugacccgcaccgagcggccccugagcuccggcgucuacauggggaaccugagcucccagcagcucgaccagcgccgggcccugcugagcaugaucggcauguccggcgggaaccagaacagccagccgaagggcgacgggguggugcgcgucugggacgugaagaacgccgaccuccugaacaaccaguucggcacgaugcccucccugacccucgcgugccugaccaagcagggccagguggaccugaacgacgccguccaggcccucaccgaccuggggcugaucuacacggccaaguaccccaacagcagcgaccucgaccggcugucccagagccaccccauccugaacaugaucgacaccaagaaguccagccucaacaucuccggcuacaacuucagccugggggcggccaucaagaccggcgccugcaugcuggacgggggcaacaugcucgagaccaucaaggugacgccgcagaccauggacggcauccugaaguccauccugaaggugaagcgcagccucgggauguucaucuccgacacccccggcgagcggaaccccuacgagaacauccuguacaagaucugccugagcggggacggcuggcccuacaucgccucccgcaccgccaucaucgggcgggcgugggagaacacggucguggaccucgagagcgacuccaagccgcagaagaucggcagcaacggcuccaacaagagccugcaguccgccggguucgcccccggccugaccuacagccagcucaugacccugaaggacuccaugcugcagcuggaccccaacgccaagaccuggaucgacaucgaggggcgccccgaggacccgguggaggucgcccucuuccagcccaucagcggcugcuacauccacuucuuccgggagcccacggaccugaagcaguucaagcaggacgcgaaguacagccacgggaucgacgugaccgaccuguucgccgcccagcccggccucaccuccgccgugaucgaggcccugccgcgcaacaugguccugaccugccagggcagcgacgacaucaagaagcuccuggacucccaggggcggcgcgacaucaagcugaucgacgugagccucaacaagaucgacucccgcaaguucgagaacgcggucugggaccaguacaaggaccugugccacaugcacacgggcgugguggucgagaagaagaagaagggcgggaaggaggagaucacgccccacugcgcccugcucgacugcaucauguucgacgccgccgugagcgggggccugaacgccaccgugcugcgggcgguccucccccgcgacaugguguuccggaccuccagccccaaggugguccugugaggacuagucccuguucccagagcccacuuuuuuuucuuuuuuugaaauaaaauagccugucuuucagaucucaaaggcucuuuucagagccaccaaaaaaaaaaaaaaaaaaaaaaaaaaaaaaaaaaaaaaaaaaaaaaaaaaaaaaaaaaaaaaaaagaauu

SEQ ID NO: 19776 - RNA, 2021 nt, Artificial Sequence
  mRNA product Design a-2 (hSL-A64-N5) comprising derived and/or modified sequence from LASV(KAK-428;Clade n.d. (VII))__ANH09741__SP-HsALB_NP(2-569) (opt1)
aggagaguccgcucagccagguugcagaagcggcuuagcguguguccuaaucuucucucugcguguagguaggccugugccgcaaacaagcuuaccaugaagugggugaccuucaucagccugcucuuccuguucuccagcgccuacuccagcaacuccaaggaggugaaguccuuccuguggacccagagccuccgccgggagcugagcggcuacugcaccaacaucaagcugcaggucgugaaggacgcccaggcccuccugcacgggcuggacuucuccgaggugagcaacguccagcgccucaugcggaagcagaagcgcgacgacaacgaccugaagcggcugcgcgaccucaaccaggcggugaacaaccugguggagcugaaguccguccagcagaaguccgugcucaaggugggcacgcugaacagcgacgaccugcucacccuggccgccgaccuggagaagcucaagagcaaggucgugcggaccgagcgcccccuguccagcgggguguacaugggcaaccuguccagccagcagcucgaccagcggcgcgcccugcugaacaugaucgggauggccggcggcucccaggggaaccagccgagccgggacggcgucgugcgcgugugggacgucaagaacgcggaccuccugaacaaccaguucgggaccaugcccucccugacgcucgccugccugaccaagcagggccagguggaccugaacgacgugguccucgcccugaccgaccuggggcucaucuacaccgccaaguaccccaacagcuccgaccuggaccggcugagccagaaccaccccgugcucaacaugaucgacgugaacaagagcucccugaacaucagcggcuacaacuucucccugggcgcggccgucaaggccggggccugcaugcucgacggcgggaacaugcuggagacgaucaagaucagcccgcagaccguggacggcauccugaaguccauccucaaggugaagcgcgcccugggcauguucgucagcgacacccccggggagcggaaccccuacgagaacauccuguacaaggugugccucuccggcaacggguggcccuacaucgcgagccgcaccuccaucgucggccgggccugggagaacacggugguggaccuggagagcaacaagaaccagccgaaggucgggaacaacggcuccaacaagaugcugcagagcuccggcuucgccaccgggcucaccuacagccagcugaugacccugcgcgacuccaugcugcagcucgaccccacggccaagaccuggaucgacaucgagggccggcccgaggaccccguggagcuggcccuguuccagccgagcuccgggugcuacauccacuucuuccgcgagcccaccgaccucaagcaguucaagcaggacgcgaaguacagccacggcaucgacgugaacgaccuguucuccgcccagcccgggcugaccagcgccguccucgaggcccugccccggaacauggugcugacgugccagggcagcgacgacauccgcaagcuccuggacucccaggaccgcaaggacaucaagcugaucgacaucagccucuccaaggccgacgcgcggaaguucgagaacgacgugugggaccaguucaaggaccugugccacaugcacaccggcaucgucguggagaagaagaagaagggcgggaagcaggagaugaccccgcacugcgcccugcucgacugcaucauguucgacgccgccgugagcgggggccugaacguccccacccugcgcgccgugcuccccacggacaugguguuccggaccaucaccaccaaggucgugcugugaggacuagucccuguucccagagcccacuuuuuuuucuuuuuuugaaauaaaauagccugucuuucagaucucaaaggcucuuuucagagccaccaaaaaaaaaaaaaaaaaaaaaaaaaaaaaaaaaaaaaaaaaaaaaaaaaaaaaaaaaaaaaaaaagaauu

SEQ ID NO: 19777 - RNA, 2021 nt, Artificial Sequence; identical to SEQ ID NO: 19771
  mRNA product Design a-2 (hSL-A64-N5) comprising derived and/or modified sequence from LASV(Pinneo-NIG-1969;Clade I)__AIT17837__SP-HsALB_NP(2-569) (opt1)

SEQ ID NO: 19778 - RNA, 2021 nt, Artificial Sequence
  mRNA product Design a-2 (hSL-A64-N5) comprising derived and/or modified sequence from LASV(ISTH0009-NIG-2011;Clade II)__AIT17405__SP-HsALB_NP(2-569) (opt1)
aggagaguccgcucagccagguugcagaagcggcuuagcguguguccuaaucuucucucugcguguagguaggccugugccgcaaacaagcuuaccaugaagugggugaccuucaucagccugcucuuccuguucuccagcgccuacuccagcguguccaaggaggucaagagcuuccuguggacccagucccuccgccgggagcugagcggcuacugcuccaacaucaagcuccagguggugaaggacgcccaggcccugcugcacgggcuggacuucagcgaggucuccaacgugcagcgccucaugcggaagcagaagcgcgacgacagcgaccugaagcggcugcgcgaccucaaccaggcggugaacaaccuggucgagcugaaguccacccagcagaaguccauccuccgggugggcacccugaccagcgacgaccugcucacccuggccgccgaccuggagaagcucaagagcaaggugauccgcaccgagcggccccuguccagcggggucuacaugggcaaccuguccacgcagcagcucgagcagcgccgggcccugcugaacaugaucgggauggugggcggcgcccaggggacccagccgggccgcgacggggugguccgggugugggacgugaagaaccccgaccuccugaacaaccaguucggcaccaugcccagccugacccucgcgugccugacgaagcaggggcaggucgaccugaacgacgccgugcucgcccugaccgaccugggccucaucuacaccgccaaguaccccaacuccagcgaccuggaccgccugucccagagccacccgauccucaacaugguggacaucaagaaguccagccugaacaucagcggcuacaacuucucccugggggcggccgucaaggccggcgccugcaugcucgacgggggcaacaugcuggagaccaucaaggugacgccccagaccauggacggcauccucaagagcauccugaaggugaagcggucccuggggauguucgucagcgacacccccggcgagcgcaaccccuacgagaacauccuguacaagaucugccucuccggggacggcuggccguacaucgccagccggaccuccaucguggggcgcgcgugggagaacacgaccguggaccuggagagcgacggcaagccccagaaggucggcuccgccgggagcaacaagucccugcagagcgccggcuuccccaccgggcucaccuacucccagcugaugacgcugaaggacagcaugaugcagcuggaccccuccgccaagaccuggaucgacaucgagggccggccggaggaccccguggagaucgcccucuaccagcccaugagcgggugcuacauccacuucuuccgcgagcccaccgaccugaagcaguucaagcaggacgcgaaguacucccacggcaucgacgucgccgaccuguucccggcccagcccggccucaccagcgccgugaucgaggcccugccccggaacauggugcugacgugccaggggagcgacgacaucaagcgccuccuggacucccagggccgccgggacaucaagcugaucgacaucgcgcucagcaaggccgacucccgccgguucgagaacgccgucugggaccagugcaaggaccugugccacaugcacaccggggugguggucgagaagaagaagcgcggcgggaaggaggagaucacgccccacugcgcccugauggacugcaucauguacgacgccgcggugagcggcggccucaacaucccggugcugcgggccguccugccccgcgacaugguguuccggaccuccagccccaaggugguccucugaggacuagucccuguucccagagcccacuuuuuuuucuuuuuuugaaauaaaauagccugucuuucagaucucaaaggcucuuuucagagccaccaaaaaaaaaaaaaaaaaaaaaaaaaaaaaaaaaaaaaaaaaaaaaaaaaaaaaaaaaaaaaaaaagaauu

SEQ ID NO: 19779 - RNA, 2021 nt, Artificial Sequence
  mRNA product Design a-2 (hSL-A64-N5) comprising derived and/or modified sequence from LASV(ISTH2010-NIG-2012;Clade II)__AIT17483__SP-HsALB_NP(2-569) (opt1)
aggagaguccgcucagccagguugcagaagcggcuuagcguguguccuaaucuucucucugcguguagguaggccugugccgcaaacaagcuuaccaugaagugggugaccuucaucagccugcucuuccuguucuccagcgccuacuccagcgccuccaaggaggugaaguccuuccuguggacccagagccuccgccgggagcugagcggcuacugcuccaacaucaagcugcaggucgugaaggacgcccaggcgcuccugcacgggcuggacuucagcgagguguccaacguccagcgccucaugcggaagcagaagcgcgacgacagcgaccugaagcggcugcgcgaccucaaccaggccgugaacaaccugguggagcugaaguccacccagcagaaguccauccuccgggucggcacgcugaccagcgacgaccugcucacccuggccgccgaccuggagaagcucaagagcaaggugauccgcaccgagcggccccuguccagcgggguguacaugggcaaccuguccacgcagcagcucgagcagcgccgggcccugcugaaccucaucgggauggucggcggcgcgcaggggacccagccgggccgcgacgggguggugcgggucugggacgugaagaaccccgaccugcugaacaaccaguucggcaccaugcccagccucacccuggccugccugacgaagcagggccagguggaccucaacgacgccguccuggcccugaccgaccucgggcugaucuacaccgcgaaguaccccaacuccagcgaccuggaccgccucucccagagccacccgauccugaacaugguggacaccaagaaguccagccugaacaucagcggcuucaacuucucccucggggccgccgugaaggccggcgccugcaugcuggacgggggcaacaugcuggagacgaucaaggucacgccccagaccauggacggcauccucaagagcauccugaaggugaagaagucccuggggauguucgugagcgacacccccggcgagcggaaccccuacgagaacauccucuacaagaucugccuguccggggacggcuggccguacaucgcgagccgcaccuccaucgucgggcgggccugggagaacaccaccguggaccuggagagcgacggcaagccccacaaggugggcaccgccggguccaacaagagccuccaguccgccggcuuccccacggggcugaccuacagccagcugaugacccugaaggacuccaugaugcagcucgaccccagcgccaagaccuggaucgacaucgagggccgcccggaggaccccgucgagaucgcgcuguaccagcccauguccgggugcuacauccacuucuuccgggagcccacggaccugaagcaguucaagcaggacgccaaguacagccacggcaucgacguggccgaccucuucccggcccagcccggccugaccuccgccgucaucgaggcgcugccccgcaacauggugcugaccugccaggggagcgacgacaucaagcggcuccuggacagccagggccgccgcgacaucaagcucaucgacaucgcccuguccaaggccgacagccggcgcuucgagaacgccgugugggaccagugcaaggaccugugccacaugcacaccggggucgugguggagaagaagaagcggggcgggaaggaggagaucacgccccacugcgcccucauggacugcaucauguacgacgcggccgucuccggcggccugaacaucccggugcugcgcgccgugcucccccgggacauggucuuccgcaccagcucccccaagguggugcugugaggacuagucccuguucccagagcccacuuuuuuuucuuuuuuugaaauaaaauagccugucuuucagaucucaaaggcucuuuucagagccaccaaaaaaaaaaaaaaaaaaaaaaaaaaaaaaaaaaaaaaaaaaaaaaaaaaaaaaaaaaaaaaaaagaauu

SEQ ID NO: 19780 - RNA, 2021 nt, Artificial Sequence
  mRNA product Design a-2 (hSL-A64-N5) comprising derived and/or modified sequence from LASV(Lassa virus/H.sapiens-wt/NGA/2015/ISTH_0543;Clade II)__AVO03640__SP-HsALB_NP(2-569) (opt1)
aggagaguccgcucagccagguugcagaagcggcuuagcguguguccuaaucuucucucugcguguagguaggccugugccgcaaacaagcuuaccaugaagugggugaccuucaucagccugcucuuccuguucuccagcgccuacuccagcgccuccaaggaggugaaguccuuccuguggacccagagccuccgccgggagcugagcggcuacugcuccaacaucaagcugcaggucgugaaggacgcccaggcgcuccugcacgggcuggacuucagcgagguguccaacguccagcgccucaugcggaagcagaagcgcgacgacagcgaccugaagcggcugcgcgaccucaaccaggccgugaacaaccugguggagcugaaguccacccagcagaaguccauccuccgggucggcacgcugaccagcgacgaccugcucacccuggccgccgaccuggagaagcucaagagcaaggugauccgcaccgagcggccccuguccagcgggguguacaugggcaaccuguccacgcagcagcucgagcagcgccgggcccugcugaacaugaucgggauggucggcggcgcgcaggggacccagccgggccgcgacgggguggugcgggucugggacgugaagaaccccgaccuccugaacaaccaguucggcaccaugcccagccugacccucgccugccugacgaagcagggccagguggaccugaacgacgccguccucgcccugaccgaccuggggcucaucuacaccgcgaaguaccccaacuccagcgaccuggaccgccugucccagagccacccgauccucaacaugguggacaccaagaaguccagccugaacaucagcggcuacaacuucucccugggggccgccgugaaggccggcgccugcaugcucgacgggggcaacaugcuggagacgaucaaggucacgccccagaccauggacggcauccucaagagcauccugaaggugaagaagucccuggggauguucgugagcgacacccccggcgagcggaaccccuacgagaacauccuguacaagaucugccucuccggggacggcuggccguacaucgcgagccgcaccuccaucgucgggcgggccugggagaacaccaccguggaccuggagagcgacggcaagccccagaaggugggcuccgccgggagcaacaagucccugcagagcgccggcuuccccaccgggcucacguacucccagcugaugacccugaaggacagcaugaugcagcuggaccccuccgccaagaccuggaucgacaucgagggccgcccggaggaccccgucgagaucgcgcucuaccagcccaugagcgggugcuacauccacuucuuccgggagcccaccgaccugaagcaguucaagcaggacgccaaguacucccacggcaucgacguggccgaccuguucccggcccagcccggccucacgagcgccgucaucgaggcgcugccccgcaacauggugcugaccugccaggggagcgacgacaucaagcggcuccuggacucccagggccgcaaggacaucaagcugaucgacaucgcccucagcaaggccgacucccgccgguucgagaacgccgugugggaccagugcaaggaccugugccacaugcacaccggggucgugguggagaagaagaagcgcggcgggaaggaggagaucacgccccacugcgcccugauggacugcaucauguacgacgcggccgucagcggcggccucaacaucccggugcugcgggccgugcugccccgcgacauggucuuccggaccuccagccccaagguggugcucugaggacuagucccuguucccagagcccacuuuuuuuucuuuuuuugaaauaaaauagccugucuuucagaucucaaaggcucuuuucagagccaccaaaaaaaaaaaaaaaaaaaaaaaaaaaaaaaaaaaaaaaaaaaaaaaaaaaaaaaaaaaaaaaaagaauu

SEQ ID NO: 19781 - RNA, 2021 nt, Artificial Sequence
  mRNA product Design a-2 (hSL-A64-N5) comprising derived and/or modified sequence from LASV(Lassa virus/H.sapiens-wt/NGA/2016/ISTH_0009;Clade II)__AVO03572__SP-HsALB_NP(2-569) (opt1)
aggagaguccgcucagccagguugcagaagcggcuuagcguguguccuaaucuucucucugcguguagguaggccugugccgcaaacaagcuuaccaugaagugggugaccuucaucagccugcucuuccuguucuccagcgccuacuccagcgccuccaaggaggugaaguccuuccuguggacccagagccuccgccgggagcugagcggcuacugcuccaacaucaagcugcaggucgugaaggacgcccaggcgcuccugcacgggcuggacuucagcgagguguccaacguccagcgccucaugcggaagcagaagcgcgacgacagcgaccugaagcggcugcgcgaccucaaccaggccgugaacaaccugguggagcugaaguccacccagcagaaguccauccuccgggucggcacgcugaccagcgacgaccugcucacccuggccgccgaccuggagaagcucaagagcaaggugauccgcaccgagcggccccuguccagcgggguguacaugggcaaccuguccacgcagcagcucgagcagcgccgggcccugcugaacaugaucgggauggucggcggcgcgcaggggacccagccgggccgcgacgggguggugcgggucugggacgugaagaaccccgaccuccugaacaaccaguucggcaccaugcccagccugacccucgccugccugacgaagcagggccagguggaccugaacgacgccguccucgcccugaccgaccuggggcucaucuacaccgcgaaguaccccaacuccagcgaccuggaccgccugucccagagccacccgauccucaacaugguggacaccaagaaguccagccugaacaucagcggcuacaacuucucccugggggccgccgugaaggccggcgccugcaugcucgacgggggcaacaugcuggagacgaucaaggucacgccccagaccauggacggcauccucaagagcauccugaaggugaagaagucccuggggauguucgugagcgacacccccggcgagcggaaccccuacgagaacauccuguacaagaucugccucuccggggacggcuggccguacaucgcgagccgcaccuccaucgucgggcgggccugggagaacaccaccguggaccuggagagcgacggcaagccccagaaggugggcuccgccgggagcaacaagucccugcagagcgccggcuuccccaccgggcucacguacucccagcugaugacccugaaggacagcaugaugcagcuggaccccuccgccaagaccuggaucgacaucgagggccgcccggaggaccccgucgagaucgcgcucuaccagcccaugagcgggugcuacauccacuucuuccgggagcccaccgaccugaagcaguucaagcaggacgccaaguacucccacggcaucgacguggccgaccuguucccggcccagcccggccucacgagcgccgucaucgaggcgcugccccgcaacauggugcugaccugccaggggagcgacgacaucaagcggcuccuggacucccagggccgccgcgacaucaagcugaucgacaucgcccucagcaaggccgacucccggcgcuucgagaacgccgugugggaccagugcaaggaccugugccacaugcacaccggggucgugguggagaagaagaagcggggcgggaaggaggagaucacgccccacugcgcccugauggacugcaucauguacgacgcggccgucagcggcggccucaacaucccggugcugcgcgccgugcugccccgggacauggucuuccgcaccuccagccccaagguggugcucugaggacuagucccuguucccagagcccacuuuuuuuucuuuuuuugaaauaaaauagccugucuuucagaucucaaaggcucuuuucagagccaccaaaaaaaaaaaaaaaaaaaaaaaaaaaaaaaaaaaaaaaaaaaaaaaaaaaaaaaaaaaaaaaaagaauu

SEQ ID NO: 19782 - RNA, 2021 nt, Artificial Sequence
  mRNA product Design a-2 (hSL-A64-N5) comprising derived and/or modified sequence from LASV(Lassa virus/H.sapiens-wt/NGA/2016/ISTH_0017;Clade II)__AVO03568__SP-HsALB_NP(2-569) (opt1)
aggagaguccgcucagccagguugcagaagcggcuuagcguguguccuaaucuucucucugcguguagguaggccugugccgcaaacaagcuuaccaugaagugggugaccuucaucagccugcucuuccuguucuccagcgccuacuccagcgccuccaaggaggugaaguccuuccuguggacccagagccuccgccgggagcugagcggcuacugcuccagcaucaagcugcaggucgugaaggacgcccaggcgcuccugcacgggcuggacuucuccgaggugagcaacguccagcgccucaugcggaagcagaagcgcgacgacuccgaccugaagcggcugcgcgaccucaaccaggccgugaacaaccugguggagcucaagagcacccagcagaaguccauccugcgggucggcacgcugaccagcgacgaccugcucacccuggccgccgaccuggagaagcucaaguccaaggugauccgcaccgagcggccccugagcuccgggguguacaugggcaaccugagcacgcagcagcucgagcagcgccgggcccugcugaacaugaucgggauggcgggcggcgcccaggggacccagccgggccgcgacggggucgugcgggugugggacgucaagaaccccgaccuccugaacaaccaguucggcaccaugcccucccugacccucgccugccugacgaagcagggccagguggaccugaacgacgccgugcucgcgcugaccgaccuggggcucaucuacaccgccaaguaccccaacagcuccgaccuggaccgccugagccagagccacccgauccucaacauggucgacaccaagaaguccagccugaacaucuccggcuacaacuucagccugggggccgccgugaaggccggcgcgugcaugcucgacgggggcaacaugcuggagacgaucaaggugacgccccagaccauggacggcauccugaaguccauccucaaggucaagcggagccuggggauguucguguccgacgcccccggcgagcgcaaccccuacgagaacauccuguacaagaucugccucagcggggacggcuggccguacaucgccucccggaccagcaucguggggcgcgccugggagaacaccaccgucgaccuggaguccgacggcaagccccagaaggugggcgccaccgggagcaacaagucccugcagagcgcgggcuuccccaccgggcucacguacucccagcugaugacccugaaggacagcaugaugcagcuggaccccuccgccaagaccuggaucgacaucgagggccggccggaggaccccguggaggucgcccucuaccagcccgugagcgggugcuacauccacuucuuccgcgagcccaccgaccugaagcaguucaagcaggacgccaaguacucccacggcaucgacgucgccgaccuguucccggcgcagcccggccucacgagcgccgugaucgaggcccugccccggaacauggugcugaccugccaggggagcgacgacaucaagaagcuccuggacucccagggccgcaaggacaucaagcugaucgacaucgcccucagcaaggccgacucccgccgguucgagaacgcggucugggaccagugcaaggaccugugccacaugcacaccggggugguggucgagaagaagaagcgcggcgggaaggaggagaucacgccccacugcgcccugauggacugcaucauguacgacgccgccgugagcggcggccucaacaucccggugcugcgggcgguccugccccgcgacaugguguuccggaccuccagccccaaggugguccucugaggacuagucccuguucccagagcccacuuuuuuuucuuuuuuugaaauaaaauagccugucuuucagaucucaaaggcucuuuucagagccaccaaaaaaaaaaaaaaaaaaaaaaaaaaaaaaaaaaaaaaaaaaaaaaaaaaaaaaaaaaaaaaaaagaauu

SEQ ID NO: 19783 - RNA, 2021 nt, Artificial Sequence
  mRNA product Design a-2 (hSL-A64-N5) comprising derived and/or modified sequence from LASV(Lassa virus/H.sapiens-wt/NGA/2018/ISTH_0959;Clade II)__AVV65100__SP-HsALB_NP(2-569) (opt1)
aggagaguccgcucagccagguugcagaagcggcuuagcguguguccuaaucuucucucugcguguagguaggccugugccgcaaacaagcuuaccaugaagugggugaccuucaucagccugcucuuccuguucuccagcgccuacuccagcgccuccaaggaggugaaguccuuccuguggacccagagccuccgccgggagcugagcggcuacugcuccaacaucaagcugcaggucgugaaggacgcccaggcgcuccugcacgggcuggacuucagcgagguguccaacguccagcgccucaugcggaagcagaagcgcgacgacagcgaccugaagcggcugcgcgaccucaaccaggccgugaacaaccugguggagcugaaguccacccagcagaaguccauccuccgggucggcacccugaccagcgacgaccugcucacccuggccgccgaccuggagaagcucaagagcaaggugauccgcaccgagcggccccuguccagcgggguguacaugggcaaccuguccacgcagcagcucgagcagcgccgggcccugcugaaccucaucgggauggucggcggcgcgcaggggacccagccgggccgcgacgggguggugcgggucugggacgugaagaaccccgaccugcugaacaaccaguucggcaccaugcccagccucacccuggccugccugacgaagcagggccagguggaccucaacgacgucgugcuggcccugaccgaccucgggcugaucuacaccgccaaguaccccaacuccagcgaccuggaccgccucucccagagccacccgauccugaacaugguggacaccaagaaguccagccugaacaucagcggcuucaacuucucccucggggcggccgucaaggccggcgccugcaugcuggacgggggcaacaugcuggagacgaucaaggugacgccccagaccauggacggcauccucaagagcauccugaaggugaagaagucccuggggauguucgucagcgacacccccggcgagcggaaccccuacgagaacauccucuacaagaucugccuguccggggacggcuggccguacaucgccagccgcaccuccaucguggggcgggcgugggagaacaccaccguggaccuggagagcgacggcaagccccacaaggucggcaccgccggguccaacaagagccuccaguccgccggcuuccccacggggcugaccuacagccagcugaugacccugaaggacuccaugaugcagcucgaccccagcgccaagaccuggaucgacaucgagggccgcccggaggaccccguggagaucgcccuguaccagcccauguccgggugcuacauccacuucuuccgggagcccacggaccugaagcaguucaagcaggacgcgaaguacagccacggcaucgacgucgccgaccucuucccggcccagcccggccugaccuccgccgugaucgaggcccugccccgcaacauggugcugaccugccaggggagcgacgacaucaagcggcuccuggacagccagggccgcaaggacaucaagcucaucgacaucgcgcuguccaagaccgacagccgccgguucgagaacgccgucugggaccagugcaaggaccugugccacaugcacacgggggugguggucgagaagaagaagcgcggcgggaaggaggagaucacgccccacugcgcccucauggacugcaucauguacgacgccgccguguccggcggccugaacaucccggugcugcgggcgguccucccccgcgacaugguguuccggaccagcucccccaaggugguccugugaggacuagucccuguucccagagcccacuuuuuuuucuuuuuuugaaauaaaauagccugucuuucagaucucaaaggcucuuuucagagccaccaaaaaaaaaaaaaaaaaaaaaaaaaaaaaaaaaaaaaaaaaaaaaaaaaaaaaaaaaaaaaaaaagaauu

SEQ ID NO: 19784 - RNA, 2021 nt, Artificial Sequence
  mRNA product Design a-2 (hSL-A64-N5) comprising derived and/or modified sequence from LASV(LASV003-NIG-2008;Clade II)__AIT17581__SP-HsALB_NP(2-569) (opt1)
aggagaguccgcucagccagguugcagaagcggcuuagcguguguccuaaucuucucucugcguguagguaggccugugccgcaaacaagcuuaccaugaagugggugaccuucaucagccugcucuuccuguucuccagcgccuacuccagcgccuccaaggaggugaaguccuuccuguggacccagagccuccgccgggagcugagcggcuacugcuccagcaucaagcugcaggucgugaaggacgcccaggcgcuccugcacgggcuggacuucuccgaggugagcaacguccagcgccucaugcggaagcagaagcgcgacgacuccgaccugaagcggcugcgcgaccucaaccaggccgugaacaaccugguggagcucaagagcacccagcagaaguccguccugcgggugggcacccugaccagcgacgaccugcucacccuggccgccgaccuggagaagcucaaguccaaggugauccgcaccgagcggccccugagcuccggggucuacaugggcaaccugagcgcccagcagcucgagcagcgccggacgcugcugaacaugaucgggauggugggcggcgcgcaggggacccagccgggccgcgacggggugguccgggugugggacgugaagaaccccgaccuccugaacaaccaguucggcaccaugcccucccugacccucgccugccugacgaagcaggggcaggucgaccugaacgacguggugcucgcccugaccgaccugggccucaucuacaccgccaaguaccccaacagcuccgaccuggaccgccugagccagagccacccgauccucuccauggucgacaccaagaaguccagccugaacaucagcggcuacaacuucucccugggggcggccgugaaggccggcgccugcaugcucgacgggggcaacaugcuggagacgaucaaggugacgccccagaccauggacggcauccucaagagcauccugaaggucaagaagucccuggggauguucgugagcgacacccccggcgagcggaaccccuacgagaacauccuguacaagaucugccucuccggggacggcuggccguacaucgccagccgcaccuccaucguggggcgggcgugggagaacaccaccgucgaccuggagagcgacggcaagccccagaaggugggcaccgccggguccaacaagagccugcaguccgccggcuuccccacggggcucaccuacagccagcugaugacccugaaggacuccaugaugcagcuggaccccagcgccaagaccuggaucgacaucgagggccgcccggaggaccccgucgagaucgcccucuaccagcccauguccgggugcuacauccacuucuuccgggagcccacggaccugaagcaguucaagcaggacgcgaaguacagccacggcaucgacgugaccgaccuguucccggcccagcccggccucaccagcgccgugaucgaggcccugccccgcaacaugguccugaccugccagggguccgacgacaucaagcggcuccuggacagccagggccgccgcgacaucaagcugaucgacaucgcccucuccaaggcggacagccggcgcuucgagaacgccgugugggaccagugcaaggaccugugccacaugcacacggggguggucguggagaagaagaagcggggcgggaaggaggagaucacgccccacugcgcccugauggacugcaucauguacgacgccgccguguccggcggccucaacaucccgguccugcgcgcggugcugccccgggacaugguguuccgcaccagcucccccaaggucgugcucugaggacuagucccuguucccagagcccacuuuuuuuucuuuuuuugaaauaaaauagccugucuuucagaucucaaaggcucuuuucagagccaccaaaaaaaaaaaaaaaaaaaaaaaaaaaaaaaaaaaaaaaaaaaaaaaaaaaaaaaaaaaaaaaaagaauu

SEQ ID NO: 19785 - RNA, 2021 nt, Artificial Sequence
  mRNA product Design a-2 (hSL-A64-N5) comprising derived and/or modified sequence from LASV(LASV035-NIG-2009;Clade II)__AIT17589__SP-HsALB_NP(2-569) (opt1)
aggagaguccgcucagccagguugcagaagcggcuuagcguguguccuaaucuucucucugcguguagguaggccugugccgcaaacaagcuuaccaugaagugggugaccuucaucagccugcucuuccuguucuccagcgccuacuccagcgccuccaaggaggugaaguccuuccuguggacccagagccuccgccgggagcugagcggcuacugcuccagcaucaagcugcaggucgugaaggacgcccaggcgcuccugcacgggcuggacuucuccgaggugagcaacguccagcgccucaugcggaagcagaagcgcgacgacuccgaccugaagcggcugcgcgaccucaaccaggccgugaacaaccugguggagcucaagagcacccagcagaaguccauccugcgggucggcacgcugaccagcgacgaccugcucacccuggccgccgaccuggagaagcucaaguccaaggugauccgcaccgagcggccccugagcuccgggguguacaugggcaaccugagcgcccagcagcucgagcagcgccgggcgcugcugaacaugaucgggauggucggcggcgcccaggggacgcagccgggccgcgacgggguggugcgggucugggacgugaagaaccccgaccuccugaacaaccaguucggcaccaugcccucccugacccucgccugccugaccaagcagggccagguggaccugaacgacgccguccucgcgcugacggaccuggggcucaucuacaccgccaaguaccccaacagcuccgaccuggaccgccugagccagagccacccgauccucaacaugguggacaccaagaaguccagccugaacaucuccggcuacaacuucagccugggggccgccgugaaggccggcgcgugcaugcucgacgggggcaacaugcuggagaccaucaaggucacgccccagaccauggacggcauccugaaguccauccucaaggugaagcggagccuggggauguucguguccgacacccccggcgagcgcaaccccuacgagaacauccuguacaagaucugccucagcggggacggcuggccguacaucgccucccggaccagcaucgucgggcgcgccugggagaacacgaccguggaccuggaguccgacggcaagccccagaaggugggcaccaccgggagcaacaagucccugcagagcgccggcuuccccacggggcucaccuacucccagcugaugacccugaaggacagcaugaugcagcuggaccccuccgccaagaccuggaucgacaucgagggccggccggaggaccccgucgagaucgcgcucuaccagcccaugagcgggugcuacauccacuucuuccgcgagcccacggaccugaagcaguucaagcaggacgccaaguacucccacggcaucgacguggccgaccuguucccggcccagcccggccucaccagcgccgucaucgaggcgcugccccggaacauggugcugaccugccaggggagcgacgacaucaagaagcuccuggacucccagggccgccgcgacaucaagcugaucgacaucgcccucagcaaggccgacucccggaaguucgagaacgccgugugggaccagugcaaggaccugugccacaugcacaccggggucgugguggagaagaagaagcgcggcgggaaggaggagaucacgccccacugcgcccugauggacugcaucauguacgacgcggccgucagcggcggccucaacaucccggugcugcgggccgugcugccccgcgacauggucuuccggaccuccagccccaagguggugcucugaggacuagucccuguucccagagcccacuuuuuuuucuuuuuuugaaauaaaauagccugucuuucagaucucaaaggcucuuuucagagccaccaaaaaaaaaaaaaaaaaaaaaaaaaaaaaaaaaaaaaaaaaaaaaaaaaaaaaaaaaaaaaaaaagaauu
